United States Patent Application Publication US 2019/0348154 A1 - sequence listing, part 26

SEQ ID NO: 96874 - DNA, 633 bp, Enterobacter aerogenes
atgttacgcagcagcaacgatgttacgcagcagggcagtcgccctaaaacaaagttaggcatcacaaagtacagcatcgtgaccaacagcaacgattccgtcacactgcgcctcatgactgagcatgaccttgcgatgctctatgagtggctaaatcgatctcatatcgtcgagtggtggggcggagaagaagcacgcccgacacttgctgacgtacaggaacagtacttgccaagcgttttagcgcaagagtccgtcactccatacattgcaatgctgaatggagagccgattgggtatgcccagtcgtacgttgctcttggaagcggggacggatggtgggaagaagaaaccgatccaggagtacgcggaatagaccagttactggcgaatgcatcacaactgggcaaaggcttgggaaccaagctggttcgagctctggttgagttgctgttcaatgatcccgaggtcaccaagatccaaacggacccgtcgccgagcaacttgcgagcgatccgatgctacgagaaagcggggtttgagaggcaaggtaccgtaaccaccccagatggtccagccgtgtacatggttcaaacacgccaggcattcgagcgaacacgcagtgatgcctaa

SEQ ID NO: 96875 - DNA, 1236 bp, Enterobacter aerogenes
ttgggctatggctatgacgccaccggcaacaggacctcgatcacgaccgatggcctgagccaaagctacaccatcaactacatgaacaactggctggtgaagactgggcaaacctccagaagctatgacgccaatggcaacctgacgaagcagggggcggataccttcacctatgacagccagaaccggctggtggccgcaacggtcgctggagtgacagcagcttacacctacaaccatctggatcagcgtgtaactaagaccctaaacggccagacccgcctactgatttacggcttggcaggaaacctcatcgaggagctggacgcagccactggagacgtgctggcggagtatatctggctcgatggcacccccttgagctttgctcagtcaggacagacctatcaagtccacgtcgatcatctgggcaccccgaaggcgctaaccgacgccagcggccaagtggtttggaaggcgagctacagcccgttcggtaaggccagcatcaccactcaggggccgaccttcaatttgcggttcccaggacagtattacgacgcggagaccgggctccactacaactggcggcgttactacgacccgaataccgggcgttacatcaccagtgacccgattgggctggctggtgggattaacacctatgcctatgcgctgagcaacccgataggcaatgcagatccaacaggggagtttgtgccgcttcttctgggggcttatgttgccatagactttgccttgagcgcttgggacgcctatgacaccttcaagaccatcaccagtgattgtgcgacctcaagagaaaagtggatttccggggggctttttgctgctgggattatcctgcctggcaactataaggcgctagggaatgttgcggaacgcgcttttaaaaatacggctgatgattttgtagacctagccagttcccagagacgtaagcatattcttgatggtgacgccactggtggagggcatcgagcaggaacaggcaagcctggaaaaagtgagtttcctcaaagttggtctgatgaaaaaattatgcacgtcatttccgatatagctaccgatccaaatgtttctcgaaaggctgggcgcggtggtaggactattgcagaggcagttaaagaaggtattaatgttcgtgtaatacaagaatctaatggtgatattgtttcaggttttccaacaaacgtaccaaggaatccaaaatga

SEQ ID NO: 96876 - DNA, 273 bp, Enterobacter aerogenes; identical to SEQ ID NO: 34916

SEQ ID NO: 96877 - DNA, 453 bp, Enterobacter aerogenes; identical to SEQ ID NO: 34917

SEQ ID NO: 96878 - DNA, 387 bp, Enterobacter aerogenes
atgcgaccgtttatagaccaaaacgaccgatacagctacgaggattggatgaacgagatgggagccgacgaagggttgccggaattgccgccgatgggccacccgttgcagaaactcggggcgcgcattgccgaacttctggacgaagaccagtgggcagagtgcgaacggctgctgttggatgggtgggcgcacgatgtgattgaccgaaagacggggcagcactggcgcgaaaacagcgatctggaagtgtggtttccactcacggcggaagaacttgaacgcctccgcactgagaacgccgaactgcggcctaacgtcgctatcaatcgcggaaaaaggcgtagtgcgcgaagcgaacgaagctttttgccgtcgattgcatag

SEQ ID NO: 96879 - DNA, 474 bp, Enterobacter aerogenes
ttgaaagtatcattgatagctgcgaaagcgaaaaacggcgtgattggttgcggtccagacataccctggtccgcgaaaggggagcagctactttttaaagcattgacctacaatcagtggcttctggtgggtcgcaagacgtttgaatctatgggcgcactccccaataggaaatacgcggtcgttacccgctcaggttggacatcaaatgatgacaatgtagttgtatttcagtcaatcgaagaggccatggacaggctagctgaattcaccggtcacgttatagtgtctggtggcggagaaatttaccgagaaacattacccatggcctctacgctccacttatcgacgatcgacatcgagccagagggggatgttttcttcccgagtattccaaataccttcgaagttgtttttgagcaacactttacttcaaacattaactattgctatcaaatttggaaaaagggttaa

SEQ ID NO: 96880 - DNA, 1902 bp, Enterobacter aerogenes
atgggcatggctgacattgccgaagtcctgtggcgtgatttcctgaaccataacccgcagaacccgtcctgggccgatcgcgaccgcttcgtgctgtccaacggtcacggctccatgctgatttacagcctgctgcacctcaccggttatgatctgccgattgaagaactgaaaaacttccgtcagctgcactccaagactccgggccacccggaagtcggctacaccgcaggcgtggaaaccaccaccggcccgctgggccaggggatcgctaacgcagtcggtatggctatcgcggaaaaaacgctggcggcgcagtttaaccgtccaggacacgacatcgtcgatcacttcacctacgccttcatgggcgacggctgcatgatggaaggcatttctcacgaagtgtgctccctggccggtaccctgaaactgggtaaactggtggcgttctatgatgacaacggcatctccatcgatggtcacgttgaaggctggttcaccgacgataccgcgaaacgctttgaagcctacggctggcacgtggtgcgcggcgttgacggtcacgacgctgacgccatcaaacgcgcggtagaagaagcgcgcgcggtcaccgacaaaccgtccctgctgatgtgcaaaaccatcatcggcttcggttcgccgaacaaagcaggcacccatgattcccacggcgcgccgctgggcgacgcggaaatcgcgctgacccgcgaagcgctgggctggaaatacggcccgtttgaaatcccgtctgacatctatgcgcagtgggatgcgaaagaagctggccaggcgaaagaagccgcgtggaacgacaagtttgccgcctacgccaaagccttcccgcaggaagcagccgaattcacccgccgtatgaaaggcgaaatgccgtctgacttcgacgcgaaagctaacgagttcatcgctaagctgcaggcgaatccggcgaagatcgccagccgtaaagcatcgcagaacgccatcgaagcgtttggcccgctgctgccggaattcctcggcggttctgccgacctggcgccgtccaacctgaccctgtggtccggctctaagccgatcaacgaagacaccgccggtaactacatccattacggcgtacgtgaattcggtatgaccgcgattgccaacggtatctcgctgcacggcggtttcctgccgtacacctctaccttcctgatgttcgtggaatatgcgcgtaacgcggtacgcatggcggcgctgatgaaacagcgtcaggtgatggtctacacccacgactccatcggtctgggcgaagatggcccgactcaccagccggtagagcaggtcgcttccctgcgcgtcacgccgaacatgtccacctggcgtccgtgtgaccaggttgaatccgcgattgcgtggaaatatggcgtagagcgtcaggacggcccgaccgcgctgatcctctcccgtcagaacctggcgcagcaggagcgtaccgcagagcaactggcaaacgtggcccgcggcggttatgtgctgaaagattgcgccggccagccggaactgatcttcatcgccaccggttcagaagtggaactggcggttgccgcgtgggacaaactgaccgctgaaggcgtgaaggcgcgcgtggtctccatgccgtccaccgacgcgttcgacaagcaggatgcggcctatcgtgaatccgtactgccgaaagccgtttctgcccgcgtagcggtagaagccggtatcgcggactactggttcaaatacgttggcctgaacggcgctatcgttggcatgaccaccttcggtgagtctgcgccggcagagcagctgtttgaagagttcggcttcaccgttgacaacgttgtcgccaaagcgaaagcactgctgtaa

SEQ ID NO: 96881 - DNA, 243 bp, Enterobacter aerogenes
atggtggccgatcctgaatggttcctcgaactgacccgccagacgcacaagcgccgctttgtggcgactggcggcgcactcaaagacgtactgaagctcgatcaggaaaccgacgcagacatggtgatcggggatgatatttccgagggcgacgatgacggttcccgcatcgcgttcgagtggaaaactgaggtcagaaagtaccgtcgctcaccgacgaaagataaaaccgaatcagagtaa

SEQ ID NO: 96882 - DNA, 747 bp, Enterobacter aerogenes
atgaagtctgtattaaaagtgtcactggctgcactgaccctggcttttgcggtttcgtctcacgccgcagataaaaaactggtagtcgccaccgatacggcgtttgttccgtttgaatttaagcaaggtgataaatacgtcggcttcgatattgacctgtgggccgcggtcgctaaagagctgaaactggactacaccctgaaaccaatggacttcagcggcatcattcccgcgctgcagaccaaaaacatcgatctggcgctggcggggatcaccatcaccgacgaacgtaaaaaagcaatcgacttctccgacggctactacaaaagcggcctgctggtgatggtgaacgcgaaaaacaatgacatcaaagatgtgaaagacctgaacggcaaagtggtcgccgtgaagagcggcaccggctccgttgattatgcgaaagccaacatcaaaaccaaagatctgcgccagttcccgaacattgataacgcttatatggaactgggcaccggccgcgctgacgcggtactgcacgacacgccaaacatcctgtacttcattaaaactgccggtcagggcaagttcaaagcggtaggcgaatcgctggaagcgcaaagctacggtatcgccttcccgaaaggcagcgacgaactgcgcgaaaaagtgaacggcgcgctgaaaacgctgcgtgaaaacggcacctacaacgaaatttacaaaaaatggttcggtactgaaccaaaataa

SEQ ID NO: 96883 - DNA, 1332 bp, Enterobacter aerogenes
atgagcacagatataactttcgatatacgtgatgaatataaaagaaaagccattgcagaaaaaataataagtttgctagagtctaatattcctatttcacctatggtcatagatggggactgggggactggaaaaacagagttttcaaaaaagttagcatccttaattgaaataaactcgaccaatcataaagtaatttatatagatgcttttactgaagatcacaacgatgctcccatacttacaataatggccgcaattgcagctctatataatagcgatgaaaaaaaggaattaatatctaaggcattgccagccctcagattcggacttaagactgtactcaaagctggtgctggttgggtattaaaacaaaatgcggatgaaattaatgaggaatttgaagaggttatcaaagacgctgcaaattcagctatcgatggaaccatcgaggctctgttagaagatcatatcgaggcacaaaagaacgttcttgctctaaaagaagtactaaccaaattagctggagaaagtaaactaacaataattatagatgagttagacagatgtaagcctagttttgccatttctattattgaaaatataaaacatgtttttgatataaaaaacattaactttttattaattgcaaacacaactcaactaaaagcatccataaatcatatctatggctcttctgtagactccaaccgttatcttgacaaatttataaaatttacatacagccttcctgttacctttaaggaagataattataatgatactttaacttccaaaaatcattggatgatgctatgtgagcaatctgaaaggctgaccgctgcagtagaagccagcgaagatattttcttacagttcattgaaagtagaaaattatcattacgtgaggttgaaacacttgctagatatgttgaaatataccaactactatcaggcgacaaaattagcaacaaatatatttatggatattgttattacaggactctagcgataataatctacacttttaaccgagagttagctctcaactttcttgaagataaagttgatgctcaatcaatcatgaaattgtttggtttatctaaattttcatatcaaacaagtgaatataatgtagataattatgaatatgctatatttggaatagtttacaaatacttatctgaaaactcatctcttttacctgctgaggaaaatataaaaagacaatgggcagaaatgagtgaataccattttttaaaaggtggtggcggtattggtgaaccaacaaatattgtgaaagatgctttaaaagtttttttacttcagtga

SEQ ID NO: 96884 - DNA, 1608 bp, Enterobacter aerogenes
atgttgagcaacgtaaagagaaaagatgtgccgctgattgtcatcagcctggcggccattgttttcatcgccgctacattaagtctcttcccccaacaaaccgcccaggcggctaattcgatttttaacggcgttacccgcctgctgggttccgcggtacaggtgctggtgctgctggcgctgggactggtgttatatctggctaccagcaaatacggcaatatccggctcggcgaaggcaaagccgagtacagcactctctcatggctgtttatgtttatctgcgccggactcggctcctctacgctgtactggggtgttgccgagtgggcttattactaccagacccctggcctgaatattgcgccgcattcagcaaaagcgctggaatacagcatcccgtactctttcttccactggggcattagcgcgtgggcgacctacaccctcgcctcgctgatcatggcctatcacttccacgtgcggaaaaataaaggcctcagcctttccgggatcatttcggcgatcaccggcgttaatccgcagggcttttggggccgcctggtcgatctgatgttcctgattgccaccgtcggcgcgttaaccatttcgctggtagtcactgccgccaccttcacccgcggcctgtcagctctcaccggactgccggataacttcaccgtccaggcgtttgtgatcctgctctccggcggtattttctgcatgagttcgtggattggtatcaacaacggcctgcagcgtctgagcaaaatggtcggctggggggcgttcctgctgccgttggtggtattactgatcggcccgaccgaattcatcaccaataacatcatcaacgccatcggtctgacgagccaaaactttctgcagatgagcctgtttaccgacccgctcggcgacggcgcctttacccgcaactggaccgtcttctactggttgtggtggatctcctatacccctggggtggcgatgttcgtcacccgcgtctcccgcggccgtaagattaaagaggtgatctgggggcttatcctcggcagcaccgtcggctgctggttcttcttcggggtgatggaaagctatgccatgcatcagttcgtaaacggcgtgattaacgtgccgcaggtgatgcagtccctcggcggcgaaaccgccgtccaacaggtgctgatgtcgctgccggcgggcaagctgttcctcgccgcctatctgttcgtaatgatcgttttcctcgcttcgcacatggatgcggtggcttacaccatggcggcgaccagtacccgtaacctgcgcgaaggcgaggatccggatcgcggcatgcgcctgttctggtgcgtggtgataacccttatcccgctatcgattctgtttaccggcgcttcgctggaaaccatgaaaaccaccgtggtgctgaccgccttaccgttccttgccattttactgatcaagaccggcggcttcgtacgctggctaaaacaggactacgcccacgtgcctgtgcatcagatagaaacccatacgcccgagccgatcgttaaagccgagacgctgccggttggcgcggtactcaaaggcgacggccagtcgctgtaa

SEQ ID NO: 96885 - DNA, 654 bp, Enterobacter aerogenes; identical to SEQ ID NO: 95876

SEQ ID NO: 96886 - DNA, 954 bp, Enterobacter aerogenes; identical to SEQ ID NO: 88323

SEQ ID NO: 96887 - DNA, 459 bp, Enterobacter aerogenes; identical to SEQ ID NO: 88322

SEQ ID NO: 96888 - DNA, 369 bp, Enterobacter aerogenes; identical to SEQ ID NO: 88321

SEQ ID NO: 96889 - DNA, 1017 bp, Enterobacter aerogenes; identical to SEQ ID NO: 88320

SEQ ID NO: 96890 - DNA, 1719 bp, Enterobacter aerogenes; identical to SEQ ID NO: 88319

SEQ ID NO: 96891 - DNA, 1008 bp, Enterobacter aerogenes; identical to SEQ ID NO: 88318

SEQ ID NO: 96892 - DNA, 795 bp, Enterobacter aerogenes; identical to SEQ ID NO: 88317

SEQ ID NO: 96893 - DNA, 963 bp, Enterobacter aerogenes; identical to SEQ ID NO: 88316

SEQ ID NO: 96894 - DNA, 825 bp, Enterobacter aerogenes; identical to SEQ ID NO: 88315

SEQ ID NO: 96895 - DNA, 912 bp, Enterobacter aerogenes; identical to SEQ ID NO: 88314

SEQ ID NO: 96896 - DNA, 1245 bp, Enterobacter aerogenes; identical to SEQ ID NO: 88313

SEQ ID NO: 96897 - DNA, 702 bp, Enterobacter aerogenes; identical to SEQ ID NO: 88312

SEQ ID NO: 96898 - DNA, 1200 bp, Enterobacter aerogenes; identical to SEQ ID NO: 88311

SEQ ID NO: 96899 - DNA, 3447 bp, Enterobacter aerogenes
atgcctgaacaatatcgctatactctgccggtcaaagccggcgatcagcgccagcttggcgaactcaccggcgccgcctgcgccacactggtagccgaaatggccgaacgccatcatggcccggtggtgctggtggcgcctgacatgcaaaacgccctgcgtttgaatgatgaaatcaggcaatttaccgatagcatggtgatcggcctcgctgactgggaaaccctgccctacgatagcttttcgccacatcaggatattatctcttcgcgccttgcgactttataccagttgccaaccatgcagcgcggcgtgcttatcgttccggtcagcactctgatgcagaaggtctgcccgcataattatctgcacggtcacgcgctggtaatgaaaaaagggcagcgtctgtcgcgcgatgcgctacgcacgcagttggacagcgccggttaccgccatgtcgatcaggtaatggaacacggcgaatacgcgacccgcggcgccctgctcgacctcttcccgatgggcagcgagcagccctatcgcctcgatttctttgatgacgaaatagacagcctgcggttattcgatgttgatagccagcgtactctggaagaagtcgaggccatcaatttgctgccggcgcatgagttcccaaccgaccaggcggcgatcgaactgttccgcagccagtggcgcgatcgctttgacgtgaagcgcgatccggaacatatctaccagcaggtaagcaaaggtaccctgcccgccgggatcgaatactggcaaccgctgttcttcaacgagccgctgccgccgctgtttagctatttcccctccagtacgctgattgtgaataccggcgatctggagcacagcgccgagcgtttccagaatgaaacccgcgcccgctttgaaaaccgcggcgtcgatccgatgcgcccgctgctaccgccggaacaactgtggctgcgcagcgacgaactttttagcgagctgaaaaaatggccgcgggtccagttaaaaaccgagcgtctggcggagaaagccgctcatactaatctcggctatcaacccctgcccgagttggcgattcaggcgcagaataaagcgccgctggacaacctgcgacgcttccttgaatccttcagcggcccggtgattttctccgttgaaagcgaaggccgccgcgaggcgctgggcgagatgctggcgcgcatcaaagttgcgccaaaacatatattgcgcctgcaggaagccagcggaaatggtcgtttcctgatgatcggcgccgccgagcacggatttatcgacagccaggctaatctggcgctgatttgcgaaagcgatctgctgggcgaacgcgtcgcccgccgtcgtcaggattcccgccgtaccattaaccccgatacgctcattcgcaacctggcggaactacatatcggacagccggtggtgcaccttgaacatggggtgggtcgttatgcggggatgaccaccctcgaagccgggggcatcaaaggcgaatatctgatgctgacctacgccaacgacgccaaactgtacgtcccggtatcgtcactgcatttgattagccgctacgccggcggggcggaagaaaatgcgccgctacataaactgggcggcgatgcctgggcgcgggcaaggcaaaaagcggcggagaaagtgcgcgacgtcgccgccgaactgctggatatctacgcccagcgcgcggccaaagaaggcttcgcctttaagcatgaccgcgagcagtatcaattattctgcgatggtttcccgttcgaaaccacgccggatcaggcgcaggcgatcaacgccgttctcagcgatatgtgccagccgctggcaatggaccgcctggtctgcggcgacgttggcttcgggaaaaccgaagtggcgatgcgcgccgccttcctcgccgtcgaaaaccacaaacaggtggccgtgctggtgccgaccaccctgctcgcccagcagcactacgataacttccgcgaccgcttcgccaactggccggtacgcattgagatgctatcgcgtttccgcagcgccaaagagcaggcgcagatcctcgaactggcggcagaaggtaaaatcgatattctgatcggcacccataagctgctgcaaaatgaagtcaagctgcgcgacctggggttattaatcgtcgatgaagagcaccgcttcggggtgcgtcataaagaacgcatcaaggcgatgcgcgcggacgtcgatatcctgacgctgaccgccacgcctattccgcgtacgcttaatatggcgatgagcggaatgcgcgatctgtccattatcgccaccccgccagctcgccgtctggcggtaaaaacctttgtccgcgaatatgacgcgctggtggttcgcgaggcgatcctgcgtgaagtcctgcgcggcggtcaggtttactatctgtataacgatgttgaaaatattcagaaagcggcggatcgtctggcggaactggtgccggaggcgcgaattgccatcggtcacggccagatgcgcgaacgcgaactggaacgggtgatgaatgatttccatcaccagcgttttaacgtgctggtctgtacgacaattattgaaaccggcatcgatatcccgaccgccaataccatcatcattgagcgcgccgatcacttcggccttgcccagctgcaccagctgcgcggccgcgtgggtcgttcgcaccatcaggcctacgcctggctgctcaccccgcatccgaaagccatgaccaccgacgcgcagaaacgcctggaagctatcgcttcgctggaagacctcggcgccggctttgccctcgcgacccacgatcttgaaattcgcggcgccggcgaactgctgggagaaggtcagagcggacagatggaaactatcggcttctcgctgtatatggaactgctggagaacgccgtcgatgccctgaaagagggtcgcgagccgtcgctggaagatctcaccagccagcagacggaagtggagctgcgcatgccggcgttgctgccggatgactttattcccgacgtgaacacccgtctgtcgttctataagcgtatcgccagcaccaaaaacgaacacgatctcgatgaaatcaaagtcgagctgatcgatcgctttggcacattgccggatgcggcgcgtaatttgctggatatcacgcgcctacgccagcaggcgcaaaagctggggatccgtaagctggagtgcaatgaaaaaggcggcgtgatcgagtttaacgagaaaaataatgtgaacccggtctggcttatcggtttgctgcagaagcagccgcagcattaccggctggatgggccaactcgtcttaaattcttccaggagctggatgagcgtaaaacacgtatggactgggtacgccagtttatgcgtcagttggaagaaaacgccaccgcttga

SEQ ID NO: 96900 - DNA, 960 bp, Enterobacter aerogenes; identical to SEQ ID NO: 88309

SEQ ID NO: 96901 - DNA, 258 bp, Enterobacter aerogenes; identical to SEQ ID NO: 88308

SEQ ID NO: 96902 - DNA, 636 bp, Enterobacter aerogenes; identical to SEQ ID NO: 88307

SEQ ID NO: 96903 - DNA, 2190 bp, Enterobacter aerogenes
atgaacaagcgcctctggctgctcaatcctctgctgctggccaccgccctgccagcctttaccgcgcaggccgccgatgaagatgatattatcgtcagcgccaaccgtaaccaccgtaccgtcgccgagatggcgcaaaccacctgggtgattgaaggccaggagattgagcaacaggttcagggtggtaaagagtttaaagatgtcctcgcgcagctgatccccgggatagatgtcagcagccaggggcgtactaactacggcatgaacatgcgcggacgcgccatcgtcgtgctcatcgacggcgtgcgtctcaattcatcgcgtaccgatagccgccagcttgatgccatcgatccgtttaacatcgaacatattgaagttatttccggcgccacgtcgttatacggcggcggcagtaccggcggtctgattaatatcgtcacgaaaaaaggccagcaggaacgccaggtggatctagagctgggtggtaaaaccggctttgccaatagcaacgatcatgatgaacgagtagcggcggccgtcagcgggggtaccgatcatgcttccggccgattgtcggtggcctatcagcgcttcggcggctggtatgacggcaacaatgacgcgctgatcctcgataatacgcaaaccggcttacagcattcggaccgactcgacgtgatgggtaccggaaccatcgaaattgatgaccagcgccagctccagcttgtcacgcagtactataaaagccagggcgatgattatggtctgaatttgggcaaagatatgtctgcggtacttggcgaaagtaaagcctggacctctaacgggcttaactccgatcgcgtgcctggtaccgagcgtcatttgatcagtctgcaatactccgacgccgacttcttcggccagaatctggtcagccagatttattaccgcgacgaatcactgaccttctaccccttcccggccctgagcaaagggcaaatcagcagtttttccgcttcacagcaggataccgatcagtacggcgctaagatcaccttcaacagccagccgctgacgggatgggatctgacctggggcgttgatgccgaccatgaaaccttcaactccaaccaaatgttcttcgacctggataaagcaatggcttccggcggcctgaataatcagtcagcctacaccaccggccgctatccaggctacagcatcaccaatctcgcgccgttcctgcaaaccagctatgacctgaacgacatcttcacccttagcggcggcgtgcgctatcaatggacggaaaaccgcgtcgatgattttgtcggctacgcgcagcagcaggatgtcgctaaaggcaaatatcagtcggcggatgccattcctggcggtaagaccgattatgataacttcctctttaatgccgggatcgtcgcccacattaccgaacgtcagcagacctggtttaacttctctcagggcgtcgaactaccggatccgggcaaatattacggtatcggcagctacggcgccgcggtcgacggccatctgccgctggtctcgagcgttaacgtcggcgactcgccgctacaggggatcaaagttaactcctgggagctgggctggcgttacaccggcgacaacctgcgcacccagcttgccgcttattactcgacatcagacaaaaccatcgtagttaaccgcagcgatatgaccattgatgtgcaatcggataaacgacgcatttacggcgtggaaggcgcggtggactacttcgtgcctgatagcgactggagcctgggcgctaacttcaacgtgctgaaatcgcaagtaaaaaccgatggcagttggcagaagtgggacgtcaccctggcctcgccgtcgaaagccaccgcctgggtcggctgggcgccggacccgtggtcgctacgcgtgcaaagccagcaggtatttgatttaagcgatgccagcggcaataagcttgatgggtacaataccgtcgattttatcggtagctatttgctgccggtgggtaaactgacctttagcatcgaaaacttgctgaacgaagattacgtcaccatctggggacagcgcgcgccgctattgtacagtccaacctatggcagcgccgggctgtacgaatataaaggccgtggccggaccttcggcctgaactacgcgttaacgttctaa

SEQ ID NO: 96904 - DNA, 540 bp, Enterobacter aerogenes
gtgaataaatcaatgttggcgggtattgggattggcgttgccgccgcgttgggcgtcgccgccgttgccggtctcaatgtattagatcgtggcccgcaatatgcgcaagtggtgtccagtacgccgataaaagaaagcataaaaacgccgcgccaggaatgccgtaacgtgaccgttacccatcgtcgtccggtgcaggatgaaaaccgtattgccggttctgttctcggcgcggtcgccgggggcgtgattggccaccagtttggcggcgggcgagggcgtgatgtcgctaccgtggttggcgcgctgggcggcggctatgccggtaaccaaattcagggctcgatgcaggataacgacacctataccaccacccagcagcgctgtaagacggtttacgacaagtcggaaaaaatgctcggttatgatgccacctataaaatcggcgaccagcagggcaaaatccgcatggaccaccagccgggggcgcaaatcccgctggacagcaacggtcagctgattctgaataacaaagcgtaa

SEQ ID NO: 96905 - DNA, 1305 bp, Enterobacter aerogenes
gtgactacgccattgaaaagaatcgttattgtaggtggtggtgccggcggactggaactggctactcagttgggtagaaagctgggccgcaacaaaaaagcgaaaattacgctggtggatcgcaaccatagccacctgtggaagccgctactgcatgaagtggcgaccggttctctggatgagggcgttgatgcgctgagctacctggcgcatgcgcgtaaccacggtttccagttccagttaggatcggtggtggatatcaatcgcgaaggaaagaccattactctcgcggaactgcgcaacgagaaaggcgagctgttggttgccgagcgtaagctgccgtacgacacgctggtgatggcgctgggtagtacctccaatgactttaacacgccaggggtgaaggaaaactgcattttccttgataacccgcaccaggcgcgccgtttccatcaggaaatgcttaacctgttcctcaagtattctgcaaacctcggcgccaacggtaaggtcaatatcgccatcgttggcggcggggctaccggggttgagctgtccgccgagctacataatgcggtgaaacagctgcatagctatggttacaaagggttgaccaacgaagcgctgaacgtgacgctggttgaagccggcgaacgtattcttccggcgctgccgccgcgcatttccggcgccgcgcacaatgaactgactaagcttggcgtacgtgtcctgacgcagaccatggtgaccagcgcagacgttaacggcctgcacactaaagatggtcaatttattgatgccgacctgatggtgtgggcggcgggcatcaaagcgcctgatttcatgaaagagattggcggcctggagaccaaccgcattaaccaactggtggtggagccgacgctgcagacaacgcgtgatccggatatctacgctatcggcgattgtgcctcatgcgctcgtccggaaggcggctttgtacctccacgcgcccaggcggcgcaccagatggcgacctgcgcgttgaataacattctggcgcagatgaaaggtaaagcgctgaaaccgtatgtctataaagatcacggttcactggtctccctgtcgaactactccaccgttggcagcctgatgggtaacctgatgcgtggctcgatgatggttgaagggcgaattgcgcgcttcgtgtatatctcgctgtaccgcatgcatcagattgcgttacacggctatttcaagaccggcctgatgatgttggtaggacgtattaaccgcatcattcgtccgcgtctcaagctgcactaa

SEQ ID NO: 96906 - DNA, 543 bp, Enterobacter aerogenes; identical to SEQ ID NO: 88303

SEQ ID NO: 96907 - DNA, 1023 bp, Enterobacter aerogenes
gtgggtccggtaatgttggatgtcgaaggttttgaactggatgcggaagagcgtgagattctggctcatcctttggtcggcggcttaattttgtttacccgcaactaccacgatccggcgcagttgcgcgaactggtacgccaaatccgcgaggcctcgcgtaatcatctcgtggtggcggtggatcaggaaggtgggcgtgtgcagcgctttcgcgaaggttttacccgtctgccggccgcgcagtcttttgccgcgctgctgggggtggaagagggcggtaagctcgccgcagaagccggttggctgatggccagcgaaatgattgccatggatattgatatcagcttcgcgccggtgctggatgtggggcacatcagcgctgcgatcggcgaacgctcatggcatgaagacccgcaaaaggcgctggtgatggcgcgtcatttcattgacggtatgcatgccgccggtatgaaaaccaccggtaaacacttcccgggccacggcgcggtgacggcggattcacacaaagagacaccgtttgatccgcgtccggcagcggaaatccgtgctaaagatatggcggtgttcaagagcctgatcgatgaacaacgcctggatgcgattatgccggcgcatgtgatttactctgacatcgatccgcgcccggcgagtggttcagaatactggctgaaaacggtgctgcgcggcgagctgggctttgatggcgtcattttctcagacgacctgtcgatggaaggggcggcgatcatgggcagctatgctgaacgtgggcaggcatcgctcgatgccggttgcgatatgatcctggtctgcaataatcgtaaaggcgcggtgagcgtattggataacctgtccccgatcaaagcagagcgtgttacaaaattgtatcataaaggttcatttacccgtcaggaactgcgagattccgctcgttggcaaacggtaagcgcacagctggaacagctccatgcgcgctggcaagaagcgaagtctgcgtag

SEQ ID NO: 96908 - DNA, 828 bp, Enterobacter aerogenes
gtgcggttcagcaacaataagcttacgcgcgacgagctcttgtcgcgcttctttcctcgctattcacctgtcgccgccttgactgaaaacggtcttagcggcggcagttgcgttatcagcgatggcgtccgtcggctggtgttgcgccagcctcacgatccgctggcgccgctcagccattttctgcgccagtaccgtgcgcttcagcaccttccggcgtcgctttcgccggcgccggtgttcttttcgccacgctggatggtggtggagtattgcgcaggagaagtgaaaagcgcgctgccggagtgcccttcgcttgccgggttattgtatcatctgcaccaacagccgcgttttggctggcgcatcgagctggcgccgttgcttgagttgtactggcagcagtgcgatccgaccaggcgcaccgttttctggctgcgctggcataaacggttattgcgccagcgtgaaccgcggccgttgcgtttagcgcctctgcatatggacgtccacgctggtaatattattcatagccgcgacggtctgcgcttgattgactgggagtatgcgggagatggcgatatcgcgcttgaactggcggcggtatggtgcaatgccaatacgcgttgccagctgctcaatgagtattcgcgctttgcccgaattgataagcagcaactgcggcggcaaatacagcgttggcggccgtgggtacttatattgatggcgggctggtatgagcggcgctggcagcagagcggcgaccggcaatttattgcactggcggatgcgacatggcgtcagttaaaaacagaaaataaaggataa

SEQ ID NO: 96909 - DNA, 648 bp, Enterobacter aerogenes
atgattaaaatgtgtcgctatgcgttaatcacagcactggcgatattcctggctggctgtgtggggcaacgtaatgaacctgcgccggtcgaggaggcgaagccgaagccggaacaacctgcgcagccgcagccgacggtgcctgccgtgccgacggtaccaacgcagccggggccgatcgaacacggcggcgaacagccatcgcagccgtctcagcctgctccgcgcgttcgtcactacaactgggacgccgccgtacaaccaatggtcggccagatgctgcaggccggcggagtgaacgctggcagcattctgttggtggatagcgtcaataaccgtaccaacggatcgctgaatgcggccgaagcgacctccgcgctgcgcaacgcgctggcgggcaacggcaagtttacgctggtatcgactcagcagcttgcggtggctaaacaacagctgggcctgtcggcgcaggatagtctcggcagccgcagcaaagcgatggggattgcgcgcaccgttggcgcacagtacgtgctgtattccaacgccaccggcaacgtgaatgcgccggagctgaaaatgcagctgatgctggtgcagtccggcgagattatctggtcaggcaaaggtgcggttcagcaacaataa

SEQ ID NO: 96910 - DNA, 375 bp, Enterobacter aerogenes
atgcgtgctgcttattcaggcgtcctggttctggcggcgctgttggccggatgtagctcgcacccggaaattccggttggcgagcagcagacgttggtgatggaatccagcgttctggcggctggcatcagcgccgatccgccgtcggtgaccgcttcggaaattcaggccaccgctacctcaagattatttaatgaacggcaagagcccattaccgtgcactaccgttttttctggtatgacgcccatgggcttgagatgcatccgctggaccctgcgcgtagcgtgacggttccagcacgctcgtccgtcgtgctctacggcagtgccaatattctcggggcgcacaaagcccgcctttatctttatctttaa

SEQ ID NO: 96911 - DNA, 357 bp, Enterobacter aerogenes
atggcagaagaaacgattttcagcaaaatcattcgccgggaaatcccgtcggatattgtgtatcaggatgaactggtcaccgcttttcgcgatatctctccgcaggcgccgacccatattctgattatcccgaatatcctgattccaaccgtaaatgacgtcaccgccgaacacgaacaggcgctaggccgaatgatgaccgtcgcggcgaagattgcccgtgatgaaggtctggctgacgacggctaccgtcttatcgttaactgcaaccgccacggcgggcaggaagtttaccatattcatatgcacctgttgggcggccgtccgttgggcccgatgctggcgtataaaggctaa

SEQ ID NO: 96912 - DNA, 1434 bp, Enterobacter aerogenes
atgtttaagaatgcatttgctaacctgcagaaggtcggtaaatcgctgatgctgccagtatccgtactgcctattgcaggtatcctgctgggcgtcggttctgccaacttcagctggctgccagccgtggtctcccacgtcatggcggaagcaggcggttcagttttcgccaatatgccgctgatcttcgcaatcggtgttgcgcttggcttcaccaataacgacggtgtatccgcactggctgcagtcgtagcttacggcatcatggtgaaaaccatggcggtagtcgcgccgctggttctgcatttacctgctgaggaaatcgcagccaaacacctggctgataccggcgtgcttggcggtattatctccggtgcgattgcagcctacatgttcaaccgcttctaccgtatcaagctgcctgaatatctgggcttcttcgcgggcaagcgttttgtgccgattatctctggtctcgccgctatcttcaccggcgtgatcctgtccttcatctggccgccgattggctccgccatccagaccttctctcagtgggctgcttaccagaacccggttgtggcgttcggtatctacggtttcatcgagcgttgcttggtaccgtttggtctgcaccatatctggaacgtacctttccagatgcaaattggtgaatacaccaacgctgcaggtcaggtgttccatggcgacatccctcgttacatggcaggcgacccgactgcgggtaaactgtctggcggcttcctgttcaaaatgtacggcctgccggctgcagctatcgcgatttggcactctgctaaaccagaaaaccgtgccaaagtcggcggtattatgatctccgcggcgctgacctcgttcctgaccggtattaccgagccgatcgagttctccttcatgttcgttgcgccgatcctgtatatcatccacgcgattcttgcaggcctggcattcccgatctgtatcctgttgggtatgcgtgacgggacgtcgttctctcacggtctgatcgactttatcgttctttccggcaacagcagcaagctgtggctgttcccgattgtcggtatttgctatgcgatcgtgtactacgtggtcttccgcgtgctgattaaagcgctgaacctgaaaactccaggccgtgaagatgcaactgaagacagcaaatccgctgcgaccagtgaaatggcgccggcgctgattgccgccttcggtggtaaagagaacatcacaaacctcgacgcatgtattactcgtctgcgcgtaagcgtggctgacgtagcgaaagttgatcaggctggcctgaaaaaactgggtgctgctggcgtagttgttgcaggttccggcgttcaggctattttcggcaccaagtccgataacctgaaaaccgagatggatgagtacatccgcaatagctaa

SEQ ID NO: 96913 - DNA, 795 bp, Enterobacter aerogenes
atgtttttagtcgattcccactgccatcttgatggcctggattatcaaacgctgcataaagatgtcgatgatgtgctggcgaaagccgccgcgcgtgatgttaagttttgcctggcagtcgccaccacgctgccgggatatcgcgggatgcgcgagttagtcggccagcgagaaaatgtcgtcttttcctgcggtgttcatccattgaaccaggatgaagcgtatgacttcgaagagctgcgttcgctggctgcggaagagggcgtagtggcgatgggggaaaccgggctcgattatttttataccccggaaacgaaactccgccagcaggagtctttccgccagcatatccgcattggccgcgaattgaataagccggtgattgtgcatacccgcgatgcgcgcgccgatacgctggcgattttacaggaagaaaaggtgacggattgcggtggcgtactacactgtttcactgaagacagggagacagcgggtaaattgctggacatggggttttatatttcgttttccggtatcgtcacgttccgtaacgcggagcagctacgagatgccgcgcgctatgttccgctcgatcgcttgctggtagagaccgattcgccttatctggcgccggtaccacatcgcggtaaagagaaccagccggcgatggtgcgcgatatcgctgaatacatggcggtgctgaagggcgtgtcgctggagcagctcgcgcaacaaaccaccgataactttgccagcttgttccacatcgaccctgccagactgcaacccgcctga

SEQ ID NO: 96914 - DNA, 1005 bp, Enterobacter aerogenes
atgaaatggtatccgtggttacgcccgtccttcgagcagctagtgtctggctatcaggcaggacggggtcaccatgcgttattactccaggcattaccggggatggggggcgatgcgcttatctacgcgttatgccgtttcctgatgtgccgccagccggaagggcataaaagctgtggccattgtcatagctgccagcttatgcaggcggggacccatcctgattactacactctggttccggagaagggcaagagcgcgctaggcatcgatgcggtgcgcggcatcactgaaaaactctatgagcgtgcgcgtctcggcggcgcgaaggtggtgtggatcaacgatgcgacgttgttaaccgatgccgccgccaatgctttgctgaagacgctggaagagccgccggaaaatacctggtttttcctggcctgcccggagccggcgcgtctgctcgccaccttgcgcagccggtgcttctcatatcaccttactccgccttctgaagcctgggcgttagggtggttagcacgtgaagtgacaatgtcacaagaagctttattggccgcgttgcgcctcagcgctaacgcacccgcggcagcgctggagttactgcaagaggctaactgggctccgcgacaacagctttgccaggcgttagccagcgcgttaaccagcggtgactggctgtcattattgccggttctgaatcacgaacaggccccggtgcgtctgcactggctggcatcgctgttgctggatgcgcagaagcggcaacaggggattacgcttctgagtaatccagatgcctggacgctggttaaccaactggcgcaaacactttcgggcccacgtcttgaagctatcacgcgcgatgttagcgcctgtcgcgagcagttgctgagcgtggtcggcgtcaaccgcgaactactactcaccgagcgcctcctgcgctgggaacattacctgcaacccggggcggttctgcccgtctcacatctctga

SEQ ID NO: 96915 - DNA, 642 bp, Enterobacter aerogenes
atgcgcagtaactatatcgttatcgaaggcctggaaggggcggggaaaaccaccgcacgcaatctggtcgttgaggctctggaacagctgggtatccgcgatatggtgtttacccgtgaaccgggcggtaccatcctggctgaaaaactgcgcagcctggtgctggatatccagtctaccggcgatgaagtcattaacgataaagcggaagtgctgatgttttacgccgcccgcgtacagctggtggaaacggtgattaagcctgctctggctcgcggtcaatgggtcattggcgaccgtcacgatctctcaactcaggcctaccagggcggggggcgcggtatcgatcaggggatgctggcgacgctacgcgatgcggtactcggtgattttcgccctgatttaacactctatcttgacgtgacgccggaagttggccttaagcgcgcccgcgcgcgaggcgatctggatcggattgagcaggagtcgatgaatttcttcaatcgtacccgcgcgcgctaccttgaactggcggcgcaggatccgactatccgcacggtggatgcgacgcagcctctggaagcggttgagcgcgacattcgcgccgttatcactcaatgggttgcggagcaacgcgcatga

SEQ ID NO: 96916 - DNA, 1023 bp, Enterobacter aerogenes
atgaagaaaatgttacgttttgtcctgctgttagtcgtggtgttcggtattgccgcagcggcaggtatgtggaaagtccgccaactggcagatagtaagttgcttattaaagaagagaccatcttcacccttgagccaggaaccgggcgagtggtgcttggccagcagctgtatggcgataaaatcattaatcgtccacgcgtattccagtggctgctgcgcgtcgaacctgaactttctcatttcaaagcgggtacctatcgcttcacaccgcaaatgacggtgcgcgagatgctgcagcttttagcgagcggtaaagaagcgcagttcccgctacggtttgttgaagggatgcgcgttagcgactatttgcgtcagctgcgcgatgcgccgtatgtgaagcacactttagaagacgacagttacgaaacggtcgccaaagcgctgggtcttgagcacgccgattgggttgaaggttggttatggccggatacctggatgtacaccgccaataccagcgatatcgccattcttaaacgcgcgcaccagaaaatggtcgctgcggtagcgaaagcctgggaagggcgggcggataatctaccctataaagatcaaaaccagttactgaccatggcctctatcgttgagaaagagaccgcggttcctgccgagcgcgatcgcgtggcgtcggtttttatcaaccgtctacgcattggcatgcgtttgcagaccgaccctaccgtaatttacggcatgggagagcgctataatggtaaactgtcgcgtaaagatctggagacgccgaccgcttataacacctatgtgattagcggtatgccgccagggccaatcgccgtgccgggcgaagcgtctctcaatgcggcatcccatccggcgaaaacgccgtacctctattttgttgccgacggcaaaggcggccatacgttcaataccaatctggccagccataaccgttcggttcaggactatttaaaagtacttaaggaaaaaaatgcgcagtaa

SEQ ID NO: 96917 - DNA, 810 bp, Enterobacter aerogenes; identical to SEQ ID NO: 88292

SEQ ID NO: 96918 - DNA, 1242 bp, Enterobacter aerogenes
gtgtctaagcgtcgtgtagttgtgaccggactgggcatgttgtctcctgtcggcaataccgtagagtctacctggaaagctctccttgccggtcagagtggcatcagcctgatcgaccatttcgatactagcgcctatgcaacgaaatttgctggcttagtaaaggattttaactgtgatgatatcatctcgcgcaaagaacagcgcaagatggatgccttcattcaatatggaattgtcgctggcgttcaggccatgcaggattctggccttgaagtgacggaagaaaacgcaacccgcatcggcgccgctatcggttccggtatcgggggcctcggcctgatcgaagaaaaccatagttcgctggtaaacggcggaccgcggaagatcagcccgttcttcgttccgtccacaattgttaacatggtggccggtcatctgaccatcatgtttggtctgcgtggaccgagtatctccatcgcgaccgcgtgtacttcaggcgtacacaatatcggccacgcggcacgtattatcgcctatggcgatgccgacgcgatggttgccggtggtgcagagaaggcgagtacgccgctgggcgtaggcggctttggcgctgcgcgcgcgctgtccacccgcaatgacaacccgcaggcggcaagccgtccgtgggataaagagcgtgatggcttcgtgctgggcgacggtgctggtatggtcgtgctggaagagtacgagcatgcgaaaaaacgcggcgcgaaaatctacgcagagatcgttggttttggtatgagcagcgatgcgtaccatatgacgtctccaccggaagatggcgctggcgctgcgctggcgatggttaacgccattcgcgacgcggcgattgaaccgggccagattggctatgtcaacgcccacggtacttcgacgccagccggtgataaagcagaagcccaggcggtgaaatccgtgtttggcgatgcggcaagccgcgtgatggtgagctccaccaaatcaatgaccggccacctgttaggcgcggctggcgcagtagagtctatctactctattctggcgctgcgcgatcaggcggttccgccgaccatcaacctggataacccggatgaaggttgcgacctcgacttcgttcctcatgaagcgcgtcaggtttccggtatggaatacaccctgtgtaactccttcggctttggcggtactaacggttcgattatcttcaaaaaagtatga

SEQ ID NO: 96919 - DNA, 237 bp, Enterobacter aerogenes; identical to SEQ ID NO: 88290

SEQ ID NO: 96920 - DNA, 735 bp, Enterobacter aerogenes
atgagttttgaaggaaaaatcgcgctggttaccggtgcgagccgcggtatcggccgcgcaatcgctgaaaccctcgccgcgcgcggcgcgaaagttatcggtactgccaccagcgaaagcggtgcgcaggcaatcagcgactatttaggtgccaacggtaaaggtctgatgttgaatgtgaccgacccggcatctattgaatctgttctggaaaatgttcgcgcagagtttggcgaagttgatatcctggtcaataatgccgggattactcgtgataacctgttaatgcgaatgaaagatgatgagtggaacgatattatcgaaaccaacctgtcatctgtattccgtctgtcaaaagcggtaatgcgcgctatgatgaaaaagcgtcatgggcgtattatcactatcggttctgtggttggtaccatgggaaatgctggtcaggctaactacgctgcggcgaaagcgggtctgattggtttcagtaagtcactggcacgtgaagttgcgtctcgcggtattactgtaaacgttgttgctccgggctttattgaaacggacatgacgcgtgcgctgaccgatgagcagcgtgcgggtacgctggctgcagttcctgcggggcgccttggctccccaaatgaaatcgccagcgcggttgcattcttagcctctgacgaagcgggttacatcactggtgaaaccctgcacgtcaatggcgggatgtatatggtctga

SEQ ID NO: 96921 - DNA, 930 bp, Enterobacter aerogenes
atgacgcaatttgcttttgtgttcccgggacagggctctcaggctgtcggtatgctggctgatatggccgcgacctggccagttattgaagagactttcggcgaagcttccgcagcgttgggttacgatctgtgggcgcttgcccaacagggcccggcagaagaattgaacaaaacctggcaaacgcagccggcgctgctgaccgcttccgtcgcgttatatcgcgtatggcagcagcagggcggtaaagcgccggcgctgttagccggtcatagccttggcgaatactctgcgctggtctgcgcgggcgtgattaatttcgctgatgccgttcgtctggttgaactgcgtggcaaattcatgcaggaagcggtaccagaaggtaccggcgcgatgtctgcaattattggcctcgacgacgcgtccatcgctaaagcctgtgaagaatctgcacaagggcaggtggtttcgccagtgaactacaattcaccgggtcaggtggttatcgccgggcacaaagaagccgttgagcgtgcaggcgctgcgtgtaaagccgcaggcgccaaacgtgcgctgccgttgccggtcagcgtaccgtctcactgcgcgctgatgaaacctgccgctgaaaaactggcggtagagctgcagaaaatcacttttaatgcgccgaccgttccggttgtgaacaacgtcgacgtgaagtgtgaaaccgcgcctgatgctatccgcgacgcgctgattcgccaactgtacagcccggttcagtggactaagaccgttgagtttatggcatctcagggcgtcgagcacctgtatgaaatgggcccgggtaaagtcctcaccggcctgaccaaacgtattgttgacaccctgactgcttctgcgctcaacgagccggctgcgatgtctgcggcgcttgagcaataa

SEQ ID NO: 96922 - DNA, 954 bp, Enterobacter aerogenes
atgtatacaaagattattggcaccggcagctacctgcctgagcaagtgcgtactaacgccgacctggaaaaaatggttgaaacgactgacgagtggattgtcacacgtacaggtattcgtgaacgccgtattgccgcagcgaacgaaacagttgctacgatgggcttcgaagccgcaaagaaagcgctggaaatggcgaatgtcaacccggaacaaattggtctgatcgttgttgcgaccacctcgggtacgcatgccttcccgagctctgcgtgccagattcaatctatgctgggtgtcaaaggctgtccggcgtttgacgtcgcagccgcctgcgcgggctttacttacgcgttgagcatcgccgaccagtatgtgaaaaacggcgccgtagattacgcgctggtgatcggcgctgacgtgctggcgcgcacctgcgatccaaccgatcgcggcacgatcattatcttcggcgacggcgcgggcgcagtggtgcttggcgcttctgaagagccaggcattatttccacgcatctgcatgccgatggccgctacggtgagctgttaacgctgccgaacgccgatcgcgtagagccggaaaatccgatttatctgacgatggccggcaacgaagtgtttaaagttgcggtcaccgaactggcgcatatcgttgacgagacgctggcggccaataatcttgagcgctcggcgctggattggctggtgccgcaccaggctaacctgcggatcatcagcgcgacggcgaaaaagctgggaatgtcgatggataatgtggtggtcacgctcgatcgtcacggtaacacttccgccgcctcggtcccttgcgcgctcgatgaagccgttcgcgatggccgtattcaacgcggtcagttgattctgctggaggccttcggtggtggtttcacctggggttccgcgctggttcgtttttag

SEQ ID NO: 96923 - DNA, 843 bp, Enterobacter aerogenes
atgcgcctggcgctggagctggtgaaagaagggcgagccgaggcctgcgttagcgcgggaaataccggcgcgctgatggggttggcgaagttattgcttaagcccattgaggggattgagcgcccggcgctggtgacggtactgccgcatcagcaaaagggcaaaacggtagtgctggatttaggcgctaacgtcgattgcgacagtacaatgctggtgcagttcgccgtaatgggcgcagtgttagctgaagaagtggtggggattaaaaacccacgcattgcattgttgaatatcggtgaagaagagatgaaaggtctcaccagcattcgcgatgcgtcggcaatgctcaaaaaactgccgtccttcaactatattggttaccttgaagctaacgaactgttgacggggaaaacggatgttctggtttgtgacggattcacaggcaacgtcacattaaagacgatggaaggtgttgtcaggatgttcctttcgctgctgaaatcacagggagagggaaaaaaacggtcgtggtggctgattttattaaagcgttggttacaaaaaagcctgagcaggcgattcagtcacctcaaccccgaccagtataatggcgcctgtctgttaggattgcgcggttctgtgatcaaaagtcatggcgctgccaaccagcgcgcattttgcgtcgcaatagagcaggcagtgcaggcggtgcagcggcaggttccacagcggatcgccgctcgcctggaatcgttatacccagcaggctttgaactgccagggagcagcagcggtaacgggagtgcccgacagcacaccgggaccaacggatacgactga

SEQ ID NO: 96924 - DNA, 174 bp, Enterobacter aerogenes; identical to SEQ ID NO: 88285

SEQ ID NO: 96925 - DNA, 522 bp, Enterobacter aerogenes
atgcaaaaggtaaaattacccctgactctcgatccggttcgcacggctcaaaaacgccttgattacgagggtatctacgcccgtgatcaggttggccgtgtcgccgattcagtcgtcagcgtggacagtgatgtggaatgcagcatgtcgttcgctatcgataaccagcgtcttgccgttattaccggtgatgcgaaggtgtcggtaaccctcgaatgtcagcgttgcgggaaaccgttccctcatcatgttcacacaacgtattgtttcagccctgtcagaaatgacgaacaggcagaagcactaccggaagcgtatgagccgattgaggttaacgaattcggtgaaatcgatctgcaggcgatggttgaggatgaaatcattctttccttgccggtagttccggtgcatgattctgaacactgtgaagtgtccgacgcggacatggtctttggcgaactgcctgaagaggcacaaaaaccaaacccatttgccgtattagccagcttaaagcataagtaa

SEQ ID NO: 96926 - DNA, 585 bp, Enterobacter aerogenes
atgtctaatcttctcctggcctcaacctcgccgtggcggcggatgctgttggaaaaactcacgctgccgtttgaatgcgcggcgccggaggttgacgaaacgcctcagcccggcgaatccgcccgccagttggttgtgcgtctggcgcaagccaaagcccaggcgctggcatcccgcttccctcagcaccttattataggttccgatcaggtttgcgtcttagacggcgaaatcaccggtaaaccgcacactgaagaaaacgctcaccgtcagctacgcaaagccagcggcacgattgtcactttttataccgggcttgcgctctacaattccgccaacggacacctgcaaacggaatgcgaacccttcgatgtccattttcgtcatttaagcgatcaggagatcgaggcctatatccgtaaagagaaccctctgcagtgtgccggcagttttaaaagcgaaggcttaggcatcacgctatttgagcgactggaaggacgcgatcctaattcgctggttggattaccgctgatagcgctatgccagatgttgcgccgggaaggctttaacccgctgcttagctag

SEQ ID NO: 96927 - DNA, 996 bp, Enterobacter aerogenes
atgagtggcgctaatgccctcggctatttagaatcgccgaccatgaaaactgagactccaaccgtaaaaatggttgccatttccgccgatgaagcggggcaacgtatcgacaactttttgcgtacgcaacttaagggcgtaccgaagagcatgatttatcgcatcctgcgtaaaggcgaggtgcgggtgaacaaaaaacgcgtcaagccggaatataaactggaagatggcgatgaagtgcgtatcccgccggtgcgggtcgccgagcgcgaagaagaggccgtttcgccgcatctgcaaaaagtggcggcgttgtcggatgttatcctctatgaagacgatcatatcctggtgctgaataaaccttccggtaccgcggtgcacggtggtagcggtctgagcttcggcgtgattgaagggctgcgggcgctacgccctgaggcccgtttcctggaactggtccaccgtctcgatcgtgatacctcaggcgttctgctggtagcgaaaaaacgttcggcgcttcgctcgcttcatgagcaactgcgtgagaaagggatgcagaaggattatctggcgctggtccgcggtcagtggcagtcgcacacgaaggtggtacaagcgccgctgctgaaaaatattctgcagagcggcgagcgcatcgtgcgcgtgagccaggaaggtaagccttccgaaacgcgctttaaagtggaagagcgttacgcgtttgccacgttggtacgctgtagcccggttaccgggcgtacgcatcagattcgcgttcacacccagtatgcgggacatcctattgcttttgacgatcgttatggcgatcgcgagtttgacaagcagctttcagggacagggttaaaccgtctgtttttgcatgcggcagcgctgaaattcactcatccaggcaccggtgaagtgatgcgtattgaagcgtcgttggataaccaactgaaacactgcttgcaggttttgcgcaatagcaaataa

SEQ ID NO: 96928 - DNA, 3213 bp, Enterobacter aerogenes
atgaaaagaatgttaatcaacgcaactcagcaggaagagttgcgcgtcgctcttgttgatgggcagcgcctgtacgacctggatatcgaaagccccgggcacgagcagaaaaaagcgaacatctacaaaggcaaaatcactcgtattgaacctagccttgaagccgcgtttgtcgattacggcgctgagcgtcatggtttcctccccctcaaagaaattgcccgcgaatacttcccagccaattacagcgctcatggccgccctaacattaaggacgttctgcgcgaaggtcaggaagtcattgttcagattgataaagaagagcgcggtaataaaggcgccgcgctgaccacctttatcagcctggcaggcagctacctggtactgatgccgaacaaccctcgcgccggcggcatttcgcgccgtatcgaaggtgacgatcgtaccgagctgaaagaagcgctggcgagccttcagctgccggacggcatgggtcttatcgtgcgtaccgcgggcgttggcaaatccgctgaagcgctgcagtgggatctgagcttccgcctgaagcactgggaagcgattcagaaagccgctgagagccgccctgctccgttcctgatccaccaggaaagtaacgttatcgtgcgtgccttccgcgactatctgcgccaggacatcggcgaaatcctaatcgataatccgaaagtgcttgagctggcgcgccagcatatcgccgccctcggtcgtccggatttcagcagcaaaatcaaactgtacaccggtgaaattccgctgttcagccactaccaaattgaatcccagattgaatccgcgttccagcgtgaagtgcgtctgccgtccggtggttctatcgttatcgatagcaccgaagcgctgaccgctatcgacatcaactccgctcgcgcgacccgcggcggcgatatcgaagaaacggcgttcaacactaacctcgaggcggctgacgaaatcgcacgccagttgcgtctgcgcgaccttggcggcctgatcgttatcgacttcatcgatatgaccccggtccgccaccagcgtgcggttgaaaaccgcctgcgtgaagccgtccgccaggaccgcgcgcgtatccagatcagccatatctcgcgcttcggcctactggagatgtcccgccagcgtctgagcccgtcgctgggcgaatccagccaccacgtgtgcccacgctgtagcggcaccggtaccgtgcgtgacaacgaatcgctgtcgctctctatcctgcgcctgattgaagaagaagcgctgaaagagaacaccaaagaagtccacgcgatcgttccggtacctatcgcttcttacctgcttaacgaaaaacgtgccgcagtcagcgcgattgaaacccgccagagcgacattcgcgtcatcatcgtccctaacgatgagatgcaaaccccgcactactccgtactgcgcgtgcgtaaaggcgaagaaacctccacgctgagctatttgctgccgaaactgcacgaagaagagatggcgatgccgtctgacgaagaaccggctgaacgcaaacgccgcgaagagccagcgctggctgctttcgtgatgccggatgcgccgcctgcgccggtacaggaagaaaccgcagccgcgccgaccgcagcgaaagccgccgctgctccggcagcgaaggtagcaacgcctgcccagcctggtctgctgtcccgcttcttcggcgcgttgaaaaacatcttctccggcgcagaagaagctaaaccggctgaagtcaaagccgagcaaaaaactgaagagaaacctgagcgtcagcaagagcgccgtaaaccgcgttctaataatcgccgcgaccgtaacgaccgtcgtgataaccgcgataatcgtgacaaccgtgataatcgtgataatcgcggagaaaacacagaaggtcgcgaacctcgtgaatcacgcgaggagaaccgccgtaatcgtcgtgacaaacaatcacagaacgctgaactgcgcgaatctcgccaaaacgcgggcgatgagtctgataaaggcaaatcacgcgatgagcaacagcaaccgcgccgtgaacgcaaccgccgtcgtaatgatgacaagcgtcaggcacagcaggaagcgaaaactcagacccgcgaagaaccggtagtacagcaggaaaccgagcaggaagagcgcgttcagagcatgccgcgtcgtaagccgcgtcagctggcgcagaaagtccgctttgaatccgcagaaaccgagcaggttgtcgaagccgttgctgagcagcaggcggaatccactacgccgcgtacggaactggcaaaagtcgatctgccggccgtcgttgaaactgccgctgagcaggatgaaaacggcgacgctcgtgaatctaacggtatgccgcgtcgctctcgtcgttctccgcgccacctgcgcgtaagcggccaacgtcgccgtcgttaccgcgatgagcgttatccgacccagtcgccgatgccgctggccatcgcctgcgcgtcgcctgagctggcgtcaggtaaagcgtggatccgctatccaattgcccgtgcgcatgatcagcagcaggaagagttaccggtacaggaaaccgccaacgttgagcctatcattacgccagtcgtcgcggagactatcgctccggttgtcgttgcggaaaccgtcgcagctgaaactgtcgtaccggcagtggccagcgaaccgaccgtagttgaagctccggtcgtcgaagaaacggcggtggttgaagagaccgcaattgttgcggaaagcgttgcgccgcaggcagaagtcagtgagccagcagagccggtagtcgaagaaactgagaccgcacctgctccagctactgaagaaaccgtcactgcgcagccaacgattgccgaagaagaaaccgctgttgtcgaagaaacgaccgttgcctccgttgaagaagccgcgccggttgttgaaccgacgccggtcatcagcaccgcgccagtggtgaaagcgcaaccggcgaccaccgctactcgccatgcgaccgcgccgatgacccgcgcaccggctccggaatacgtgccggaagcgccgcgccaaagcgattgggttcgtcctccgtttgcctttgagggtaaagggtctgcaggcggccatagcgccactcatcaagccacggcggaagctacccgtccgcagcctgtagagtaa

SEQ ID NO: 96929 - DNA, 939 bp, Enterobacter aerogenes
atgaagaaacaagagcgtatagatcggattgagctgatgcggacctttattcgcatcgtcgaagcgggttcgctctcggcggcggctctgcagatgagtacgactcaggcgaccgtcagccgacgtttgcagtcgctggagacgttacttggcgcgaggcttattctgcgcacgacccatgcgatgaaactgaccgatgacggcgagcgctgttatcaacatgcgcggcggctggtggacagctggctggcgctggaagatgatttgcgcatcgaggaggaccggccggttggcgtgctgcgggtgcgggcgccgcacgcttttggccaacagcagttgctgggtccgctggtgagttttctgcagcgatatcccgagctctccgttgagtggatgctgaatgataaaaccgtcgattttcttagcgataatattgattgcgcgatccgcgttggcgcggaagtcgatccatcaacggtatcggtactgttggctgtggttcctcgcagcctggtggttgcgcctgagctattggcgcgccatccggaactcagcgaaccgcaggcgctctccgcgctgccatgggtcgctatcagcaccttttatcagcatgaagtcacgctacagcatcaggtggacgggcagttggtgagtttcccgattgtcccttgtctgagtaccgatagcgtctacgttgcgcgtaacaccgccctggcggggctgggggcggcaattgtttccagttgggcggtggaggaggatattgcggcaggcaggctgattgagccgtttgcgcagtggcgggcttcgccgctgccggtgcatctggtttatccctgggcgcgctattatccgacgcggctacgcaagtttctcgatttgatgcgcgaagtgatgccacaggtggcggggatgcagcgcccggacgagaagaaataa

SEQ ID NO: 96930 - DNA, 1215 bp, Enterobacter aerogenes
atgacaccgcttcctttatccccccgccaggccggctgggttatttttattctcgcgctcggcgctggcttcagcgtcgcatccatctactacgcccagccgctgctgccgttaatcggcgccaacctgcatctcagcgttgaaggaatggggctggtgcccaccctgacccaggctggctatgcattgggaatattatttctgctgccgctcggcgatcgccacgatcgccgaacgcttatcctgctgaaaagcgccgtgctggcggtactgttgctactctgcagcctgaccggtcagcttacctcgctactggtcgtcagcctgctgattggcatggcggcgaccatggcgcaggatattgtcccggcggcggcgattctggcgccggcgggcaaacaggggaagatggtcggtacggtgatgaccggcctgctactggggatcctgctttcacgtaccgtcagcgggctggtcggcgcgctatttggctggcgggtcatgtaccaggctgcggcagtcagtatcgcctttatcggcctgttaatgtggcgtgttgtgccgcgttttgagatccactctaccctcagttatccgcagttgctgaagtcaatggcccatttgtggcagcgctatcccgcgctgcgccgcgcggcattcgcccagggctttttgtctatcgcctttagcgcgttctggtcgacgctggcggtgatgctcgccgaacattaccagatgggtagcgcggtcgccggcggcttcggtatcgctggcgcagcaggcgccctggcggcaccgctggcaggcggtttggcggataaagttggcgcggggagagtcacccagctcggcgcggcgttagtcaccgtctcctttgccctgatgttgctactgcccgcgttgccggtacacggccaactggcgctgattgcgttatcggctatcggttttgaccttggtctgcagtcgagcctggtggcgcatcaaaacctggtttacagcctggagccccaggcccgcggcaggcttaacgccttgctatttaccgtggtcttcatcggaatggctctgggatcggtgctgggaagtaaactgtacgtgctggctggctggaacggtgtggtgattctggcggtgagcagcggcgcgattgctctgattatccgcctgctggaaaatgctcgtctacaggccgcagaacgcgccgtgagataa

SEQ ID NO: 96931 - DNA, 1536 bp, Enterobacter aerogenes
atgaatctattaaaatcattagcggcagtcagctcgatgaccatgttctcgcgcgtactggggttcgcccgcgatgctatcgtcgcgcgtatttttggcgccgggatggcgaccgacgccttttttgtggccttcaaactgccaaacctcttgcggcgtatttttgccgaaggcgccttttctcaggcctttgtgccgatcctcgctgaatataaaagcaagcagggcgaagacgcgacgcgggtgttcgtctcctatgtttccgggctgttgacgctggttctggcgctggtcacggtggcagggatgctggctgcgccgtgggtgattaccgttactgctccgggctttgccgatacgccagataaatttgccttaaccacccagctgctgcgcatcaccttcccctacattttattgatctcgctggcgtcgctggtgggggcgatccttaacacctggaaccgcttctcggttcccgccttcgcgccgaccttcctcaacgtcagcatgattggttttgccctgtttgccgcgccttattttcatccgccaatgctggcgatggcctgggcggtcacggttggcggtatcctgcaactggcgtatcaactgccgcatctgaaaaaaataggtatgctggtgctgccgcgggttaacctgaaagatgcaggggcgattcgcgtggttaagcagatggggccggcgatcctcggcgtctctgttagccagatctcgctgattatcaataccattttcgcttccttcctggtttcaggttcggtctcctggatgtattatgccgaccgtctgatggagttcccctccggcgtgctgggcgtggcgctgggcaccatcctgttgccatcgttatcaaaaagtttcgccagcggcaatcacgatgagtactgccgactgatggattgggggctgcgtctgtgcttcctgctggccttgccaagcgcggttgccttaggcattctcgccaaaccgctgacggtatcgctattccagtacggtaagtttaacgctttcgatgcggcgatgacgcaacgcgctctggtggcttattcggttggactgatggggcttatcgtcgtgaaggtgcttgcgccgggcttttactcgcgccaggatatcaagacgccggttaaaatcgccattgttactctgataatgacccaggtgatgaacctggcgtttattggcccgttgaagcatgccggcttgtcgctgtctattggtctggctgcctgtctgaacgccgcgctgctttactggcaactgcgtaagcagaaaatcttcacgccgcagccgggctggttcgtcttcctgctgcgtctggtcatcgcggtgctggtcatggccgcagcgctcgtcggcgtgatgtatctgatgccggaatggtcgcaggggacgatgccgttccgcctgatgcgtctgatggtagtagtggtcgccggcgtagtcgcctatttcgcgacattgctgctgctcggctttcgcctgaaagagtttgcccgccgcacgatttaa

SEQ ID NO: 96932 - DNA, 924 bp, Enterobacter aerogenes
gtgacggcgaaattacgtgttggcgtggttggacttggcggcattgcgcaaaaggcatggctgccggtgctgggcgccgctgatggctggacgctgcaggccgcctggtcgccaggaaaagagaaagcgttacgcatctgcgaaacctggcgtctgccctatgccgagtctctggatgcgctggcggcgcaatgtgatgcggtatttgtccatacctcaaccgcttcacattatgaagtggttcatcatctgctgaatgcaggcgttcatgtttgcgtggataaaccgctggcggacaagctcagcgaagccgaatcattggttgaactggcggcacgtcggcgtttaacgttaatggtgggcttcaatcgccgctttgcgccgttgtatcgtgaattgaaagcgcatctcaatgacgcagcgtcattgcgcatggataagcaccgtagcgatagcgtgggcaaagagctgcgctttaccctgctggatgattatctgcatgttgtcgataccgcgctgtggctggcgggagataaaacgcgggtggacggcggggtcctgcaaaccacttctcaaggggaaatgctctacgccgagcatcacttcagcgcggggcaactgcagatcaccaccagtatgcatcgtcgcgcgggaagccagcgtgagtgggtgcaggcggtgaccgatggcggactgtatgaggtgtgcgatatgcgcgagtggcgtgaagagcggggcagcggtatcctgcagcgcccggcgcccggctggcaaacgacacttgaacagcgcggattcgacggctgcgctcgccactttatcgaatgcgtgcaaaatcagacggttccggaaaccgccggcgagcaggcgcttttagcccagcggatcgtggaaaagctctggcgcgaggcgatgagcgaataa

SEQ ID NO: 96933 - DNA, 648 bp, Enterobacter aerogenes
atgaaatatcagctaaccgcgcatgaagcgcgcatcattggttgcctgctggagaagcaggtgaccacgccggaacaatatccgctatcagtgaatgctgtggttaccgcctgtaaccagaaaaccaaccgtgagccggtaatgtcgctggcggaaagcgacgtccaggatttgctggatgagctggtcaaacgccactacctgcgtacggtaagcggttttggcaaccgggtgaccaaatatgaacagcgcttctgcaattcggaatttggcgatctcaaattaacggcggcggaagtcgccattgtcacgacgctgctgctgcgcggtgcgcaaacgccaggcgagctgcgtagccgcgcgcagcggatgtatgaattccgcgacatggccgaggtggaaagcacgctcgacaatttggccagtcgtgaagacggtccttacgtcgcgcgccttccgcgcgaaccgggtaaacgcgaaagccgctatatgcacctgttttgtgatgacatggattcgctcatcaccgtggtcgaggcggtgtcgccgccgaatgacgatttgcaggcgcgcgttgaggcgctggaaagtgaagtcgctgagctcaaagtacgccttgattcactactggctcatttaggagagtaa

SEQ ID NO: 96934 - DNA, 585 bp, Enterobacter aerogenes
atgtttggctatcgcagtaacgtacccaaggtgcgtttgacgacggaccggctggtggtgcggctggttcacgatcgtgacgcctggcgtctggccgattattacgcggaaaacaaggggttcctgaaaccctgggagccggtgcgcgatgaaagccactgttatccttccggctggcaggcgcgattatcgatgattacggagtttcataaacagggttcggccttttatttcgcgctactcgatcctgatgagaaagagattattggcgtagcgaatttctcaaatgtggtgcgtggttcatttcatgcctgttatctcggctattccattggtgaaaagtggcaagggcaggggctgatgtttgaagcgctgaccgcggcgattcgctatatgcaacgtacgcagcatattcaccgtatcatggccaattatatgccgcataacaaacgcagcggcgatctgcttgcccggctcgggttcgaaaaagagggttacgcaaaggactacctcctcattgatgggcaatggcgagaccacgtattgacggcgttaacggccactgactggacaccagggcgctaa

SEQ ID NO: 96935 - DNA, 1209 bp, Enterobacter aerogenes
atgtcccgcgtatcgcaggcaaggagcctgggtaaatatttcctgttagtcgataacatgctggttgtgctcggcttttttgtcgtattcccactgatatcgatccgttttgtcgaccaaatgggttgggcggcgctgatggtcggtatcgccctcggtctacgtcagctggtgcaacaaggtttaggcatcttcggtggggcgattgccgatcgtttcggcgccaaaccgatgatcgtcaccggcatgctgatgcgcgccggcggtttcgcggcgatggccgtcgcccatgagccctgggtgctctggctctcatgcattttgtctggtctcggcggcaccctgttcgacccgccgcgagcggcgctggtggtcaaactggtgcgcccgcatcaacgtggtcgtttcttctctatcctgatgatgcaggatagcgccggcgcggtcatcggtgccctgctcggcagttggctattacagtacgatttccgtctggtgtgcagcgcaggggcagcgctctttattgcctgtgccgcatttaacgcctggtatctgccggcatggaaactctcgacggtcaaaacaccgatccgcgaaggactggggctggtgttacgcgataagcgctttgtcacttacgtgttgaccctgaccggttactacatgctggccgtgcaggtgatgctcatgctgccgattatggttaacgatattgcgggctctccggcggcggtgaaatggatgtatgccatcgaggcgacaatctccctgacgctgctgtatcccatcgcccgctggagcgagaaacgttttcgtcttgagcatcgtctgatggcgggtttgctggtgatgacggcggcgatgctgccgattggcttaaccagcacgctacagcagctgtttaccttaatctgtattttctatatcggctcgatcattgccgaacctgcgcgcgaaacgctgggcgcttcactggctgatgcccgcgctcgcggcagctatatgggtttcagccgccttggtctggcatttggcggcgcgctggggtatgccggcggcggctggctgtttgatgcaggtaaagtgcttaatcaacctgaactaccgtggctgatgctgggcattatcggctttgcaactttcattgcgctatggtggcagtttagccagaaacggtcggcttccggcatgctggaaccgcgcacctga

SEQ ID NO: 96936 - DNA, 561 bp, Enterobacter aerogenes
atgaaaaagatgttgatcgcggccgcgctgattgtcagcggccttctgagcggatgtaaccagcttacgcaatactccgttagcgagcaggagattaaccaggcgctgcagaaacgtaaccacttcgctaaagatatcggcctgcctggcgtagcggatgcgcacattgagctgcaaaacctgaccagcgccatcggtcgtgaagagccgaataaagtggcgctgagcggaaccgctaatctggatctgaattcgctgtttggcaatcagaaagcgaccatcgacctgaagctcaaagcgctgccggtgttcaataaagaacaaggcgcaatttatctgcgtgaaatggaagtcgtcgatgcgaaagttaagccggaaaagctcacctccgtggtacagacgctgatcccttatctgaatcagtcgctgcgcagctatttcaatcagcaaccagcctacgttctgcgtgaagatgccagcaccggtgaagccttagcgaagaaatacgctaaaggcattgaagtgaaaccgggcgagatcatcatccccttcactgattaa

SEQ ID NO: 96937 - DNA, 1047 bp, Enterobacter aerogenes
atgacagcacaaccccaggtattgaaaatccgccgccctgacgactggcatatccatctacgcgatgatgatatgttgcaaaccgtcgtgccttacaccagtgagttttatggccgggcgatcgtgatgccgaatctggtaccgccggtaacgaccgtcgctgctgccattgcttaccgccagcgcatcatcgatgcgattcccgccgggcatgatttcactccgctgatgacctgctacctgaccgacacgctcgatccggacgaactggagcgcggattccgtgaaggcgtatttaccgcagccaaactctacccggcaaacgccaccaccaactccagtcacggcgtgaccagcaccgatgccattatgccggtgctggaacggatggaaaaactgggcatgccgctactggtacacggcgaagttacccatgctgatatcgatatcttcgatcgcgaagcgcgctttattgagacggtgatggaaccgctgcgcaaacggctgcaggggttaaaagtggtcttcgaacatatcaccaccaaagatgccgctgaatacgtgcgcgacggcaacgaactgctggccgccaccatcacgccgcagcatctgatgtttaaccgcaaccatatgctggttggcggtattcgcccacatctatattgcctgccgatcctcaagcgcaatatccaccagcaggcgctgcgtgaactggtcgccagcgggttcagtcgcgcgttcctcggcaccgactccgctccgcatgcacgccaccgtaaagaggccagttgcggctgtgcgggctgtttcaatgccccgaccgcgcttggtagttacgccaccgtctttgaagagatgaatgcgctggaacattttgaggctttctgctcgttgaatggcccgcgtttctacggcctgccggtgaatgaaagctacgttgaactggtacgcgaagagagtactgtcgccgaaagcatcgcccttcctggcgatacgctgataccgttcctggccggcgaaaccgtgcgctggacgatgaaaaaataa

SEQ ID NO: 96938 - DNA, 297 bp, Enterobacter aerogenes
atgtgcaagcgttactgtataaataaccagtacattacccagggggccattatgcgcatcgaagtgtcaattgccaaaaccacagccttacccaacggcgcgctggaagcgctgaataacgaactcgctaagcgtatcgctcactattaccctgaacgtgaaaaccaggtcacggtacgttatgccgccggcaataatttatctgtcatcggtggcctgaaagaagacaaagaccggattagcgaaatcctgcaggaaacctgggaaagcgccgacgactggtttatccacgactaa

SEQ ID NO: 96939 - DNA, 255 bp, Enterobacter aerogenes; identical to SEQ ID NO: 88270

SEQ ID NO: 96940 - DNA, 1119 bp, Enterobacter aerogenes
atgcaatacgacctcatcattatcggtagcggctccgttggcgctgccgctggctattacgcccgccgcgccggtctgaatgtcctgatgaccgatgcccacaaaccgccgcatcaggaaggcagccaccatggcaacacgcgtctgattcgtcacgcttatggcgagggcgaaaaatacgtaccgttggtgctacgtgcccagcagctatgggacgaattcgcgcaagacagcggcgaggccgtattcgaaaaaaccggcgtcattaacctgggcccgaccagctccgattttctcaataacgtggcccacagcgcgcgtcagtttaagcttaacgtagaggaactggacgctgaagctgtcatgaagcgttggccggagattcgtatcccacaagattatcgggcaatttttgagccggcttccggtgtattacgcagcgaactggcggttgaaacctggatccggctggcgcgtgaggcgggttgtgcccagctcttcaactgtccggtgaccgcgatccatcatcatgccgatggcgtgaccatcgataccgctgacggcagttacaatggcaaaaaactgctgatcagcgccggaacctgggtaacgaaattattgccggaactgcccattcaaccggtacgtaaagtcttcgcctggttccaggccgatggtcgctatagcacgaaaaataacttccctgctttcaccggcgaactaccgaatggcgatcagtattatggcttcccggcggaagacaacgaattgaagatcggcaaacacaatggcggccagctgatttccgaaccgggcgagcggaaaccgtttggcgctgtcgccagcgatgggtctgagtcgttcaacttcctgcgcaacgtgctgcccggaattggcggctgcctgcacggcgcctcctgtacgtacgataatacggtagatgaagatttcatcattgatacgcttcccggtcacgacaacacattactcattaccggtttaagcggccacggtttcaaatttgccccggtacttggcgaaattgcgacgcaatttgcgcaaggtgaaacgacggagtttgatttgactcccttctcgctggcgcgattttcacaataa

SEQ ID NO: 96941 - DNA, 1065 bp, Enterobacter aerogenes
atgccagtgttacacaaccgcatttcaaatgagacgttaaaggcgcagatgctggctgagaccgagccgcgcacgacgatctcgttctataaatatttcactatcgttgacccgaaagcgacccgcgacgctctgtggctggcgttgactaagctgaacgtctttggccgcatctatctggcccatgaaggtatcaatgcgcagatcagcgtgccggaaagcaaggtcgcagcgctgcgtgaatttctcgatagcttcgatccggcgctaaaggggttacgtctgaacatcgcgctggatgatgacggtaaatccttttgggtcctgcgcctcaaggtccgcgaccgcattgtggccgacggtattgatgacccaacctttgatccctctgatgtgggcgagtatctgaaagcggcggaagtgaacgcgatgctggacgatccggacgcggtattcatcgatatgcgtaaccattatgagtacgaagtcggtcattttgagaacgcgatggaaattccggcggataccttccgcgatcaattgccgaaagcggttgagatgatgcaggagtacaaagacaagaagattgtcatgtactgtaccggcggtattcgctgtgagaaagccagcgcctggatgaagcatagcggtttcaataaggtatggcacatcgaaggcgggattatcgagtatgcgcgccgcgcccgtgaacagggattgccggtacgctttatcggtaagaactttgtctttgacgaaagaatgggcgagcgtatttctgatgatgtgattgcccactgccatcaatgcggcgcaccatgcgacagccacaccaattgcctgaacgacggctgccatttgctgtttattcagtgtccggcttgtgccgagaaatttgccggttgctgcagcgaagcctgtatggaagagcataaactgccggaagaggagcagcgcaaactgcgggcgggacgagagaatggcaataagatttttaataaatcccgtggtcgtcttaataccaaattaggtatcccggatcccgacccgtcagtaaaaccataa

SEQ ID NO: 96942 - DNA, 921 bp, Enterobacter aerogenes
atgacccatttaccgaaattttccgccgcgctgctccacccgcgctactggctgctttggctgggcataggcctgttgtggttagttgtccaactcccttatccggttatctaccgtctcggtaatgccattggtcgtctggcgatgcgttttatgaaacgccgcgcaaaaatcgcttatcgtaatcttgagctctgctttcctgagaagagcgaacaagagcgtcatcaactggtagtacaaaactttgagtccgtcggcatgggcctgatggaaaccgggatggcatggttctggccaacccgacgcattgcgcgctggacagacaccatcggctttgaacatgtccgcgacgtgcaggcacaaaaccgcggtatcctgctgattggcattcatttcctgacgctggaaatgggtgcgcgcatgtttggcatgaaccaacccggtatcggcgtctatcgcccgaatgacaacccggttatcgactggctgcagacctggggccgcctgcgttccaacaaagatatgattgaccgtaaagatctcaaaggcatgatccgcgcgctgaaaaaaggcgaagtggtctggtatgccccggaccatgactacggcccgaccgccagcgtcttcgcccccctgttcgccgtcgagcaggccgccaccacttccgggacctggatgctggcgaaaatgtctaaagcgtgcattgtgccattcgtcccacggcgcaaaccgaatggcaaaggctatgagctcatcatgctgccgccggaatgcgatccgcctctggaaaacgcagaaaccaccgccgcgtggatgaacaaaatcgtcgaacagtgcattttgatggcgccagagcaatatatgtggctgcatcgccgctttaaaacccgtccggaaggcgtgccttcgcgctactga

SEQ ID NO: 96943 - DNA, 1251 bp, Enterobacter aerogenes
atgtcgtctgctgatacacctattaactggaaacgaaatcttaccgtcacctggcttggctgctttttaaccggcgccgcctttagcctcgttatgccttttttgccgctctacgtcgaacagttgggcgtcaccggccatagcgcgctgaatatgtggtcagggctggtctttagcataaccttcctcttttccgccgttgcctcgccgttctggggcggattagccgaccgtaaagggcgtaagattatgttgctgcgttcggcgctggggatggctatcgtcatgatgctgatgggcatggcgcagaacatttggcaattcctgatcctgcgcgcgttgctgggtttactgggcgggtttattcccaatgccaatgcgctgatcgccatccagatcccccgtcagaaaagcggctgggcgctaggaacgctttcaaccggcgcggtaagcggcgccctgctcggcccgctggctggcggtttccttgccgaccactgggggttgcgcaccgtcttctttatgaccgccacggtgctgtttatctgcttcctgttcaccctgtttttaatccgcgaaaactttgttccggtgaacaaaaaagagatgctcaatgccagggacgttttcggttcgcttaagaatcctaaactggtgctgagcttgttcgtcacctcattgattatccaggtcgctaccggctccattgcgccgatcctgacgctctacgtgcgcgacctggcaggtaacgtcagtaatatcgcctttattagcggcatgattgcttccgtacccggcattgccgccctattgagcgcgccacgtttaggcaagctcggcgatcgcattggaccggaaaagattctgatagttgctctggttatctccgtgctattactgatcccgatgtcattcgttcagacgccgctgcagctaggcattctgcgctttttgcttggtgccgccgacggcgcgctgttacccgccgtacaaaccctgctggtgtacaactccaccagccagatttcgggacgtatcttcagctataaccagtcgtttcgcgatatcggcaacgtcaccggcccgttaatcggcgcctcggtctcggccaactacggcttccgcgccgtgttcctcgtcaccgcctgcgtcgtcctgtttaacgctttttactcgaccatcagtctgcgccgcccacggcacgacgcttcagcggatgacgggggctcgggtaaacgttcggtaaattaa

SEQ ID NO: 96944 - DNA, 387 bp, Enterobacter aerogenes
atgtcaacggaatcagttttctacgccacgctcgaagaggccatcgacgccgcccgggaagagtttttggccgataatcccgacagcgatgaagaaactgccaacatcgaacagttcaatatgcagaagtatattctccaggatggcgatatcgcctggcgggctgaattcttcgccagcgaagatgaagaagtcgagtgcctggccatgctcagtggcgaagcggcacagagcgtatttgacggcgattatgacgaaatcgagctacgccaggaatgggtggaagaaaatacgctacacgaatgggatgaaggcgagtttcagctggagccttccctggataccgaagaggggcagaccgcagccgatgagtgggacgagcgttaa

SEQ ID NO: 96945 - DNA, 228 bp, Enterobacter aerogenes
atgagaatatttgtgcttatcgccatgacgctggtactcagcggctgcggcagcattattagccgtacggtaccggggcagggccatggcaaccaatattaccccggcgtacagtgggatgttcgtgattcagcctggcgctatctgaccattctcgatctgccattctcgctggtatttgatacgctgttgctaccgctagacgccagccacggcccctatgagtaa

SEQ ID NO: 96946 - DNA, 2529 bp, Enterobacter aerogenes
atgaataagataacgaattatatcgacgcattgccgctgtcggatgctgaaaaggccgcattacctgatgcgagcctgcaagccgtacatgaagcgcttgacgcagagcatcatcattttccgcgcgatgaagattccccgttaggatcggttaaagcgcggctggagcatagctggccagactctctggctggcgatcagctggtgaaagatgatgaagggcgcacgcagcttcatgcgatgccgaaagcgaaacgttcctcgatgatccccgacccgtggcgcaccaacccggtaggccgcttctgggatcgcctgcgtggccgtgacgtgactccgcgctatctctctcgcctcacgcaagaagagcgtgaaagtgaacagaaatggcgtaccgtcggcaccattcgtcgctacattttgctgctgctgacgctggcgcaaacggtagtggccacctggtatatgaagaccatcctcccttatcagggatgggcgttgatcaatccatccgatatggttggccaggatctgtgggtctccttcatgcagctactcccttacgtgttgcagaccggcatcctgatcctctttgcggtacttttctgttgggtctcggccggtttctggaccgcgctgatgggcttcctgcaattgctgatcgggcgtgataagtacagtatttcggcatccaccgttggcgacgagccgctgaacccggaacaccgtacagcgcttatcatgcctatctgtaatgaagatgttgaccgcgtgtttgccggcctgcgcgccacctgggaatcggttaaagcgacgggtaacgctgcgcattttgacgtttacgtgctcagcgacagctacgacccggatatttgcgttgccgagcaaaaagcgtggatggaattgattgcagaagtgcagggtgaaggccagatcttctatcgtcgccgtcgtcgtcgcgtgaagcgtaaaagcggcaacatcgatgatttctgccgtcgctggggtagccagtatagctacatggtggtgctcgacgctgactcagtgatgaccggcgagtgcctgagcgggctggtgcgcctgatggaagcgaatccgaatgccgggatcatccagtcttcgccgcgcgcttccggtatggataccctttatgcgcgctgccagcagttcgccacccgcgtgtacggcccgctgtttaccgccgggctgcacttctggcagttaggtgaatcgcactactggggtcacaacgccattatccgcgtgaagccgttcatcgaacactgcgcgctggcgccgctgccgggcgaaggtaactttgccggctcgattctttcgcatgacttcgtggaagctgcgctgatgcgccgtgcggggtggggcgtttggatcgcctacgatctgcctggctcctatgaagagctgccgccgaacctgctggatgaactgaagcgtgaccgccgctggtgtcagggtaacctgatgaacttccgcctgttcctggtgaaagggatgcacccggtacaccgtgcggtgttcctgaccggcgtcatgtcctatctgtcggcgccgctgtggtttatgttcctcgcgctgtcgacggcgctacaggtcgtgcacgctctgaccgagccgcaatacttcctgcagccgcgtcagctgttcccggtatggccacagtggcgtccggaactggctatcgcgctgtttgcttcgaccatggtgctgctgttcctgccaaaactgctgagtatcattctggtgtggtgcaaagggccgaaagagtacggcggcttcttccgcgtgacgctctccctgttgctggaggtactgttctcggtgctgctggctccggtgcgcatgctgttccataccgtgttcgtggtcagcgcgttcctcggttgggaggtggtgtggaactcaccgcagcgcgatgatgactcaacaccgtggggcgaggcctttatgcgtcacggttcgcagctgctgctggggctggtatgggcggttggcatggcgtggctggatctgcgtttcctgttctggctggcgcctatcgtcgtgtcgctgatcctctctccgtttgtctcggcgatttccagccgcgcgacggtaggtctgcgcactaaacgctggaaattgttcctgatcccggaagagtattcgccgccgcaggtactgaaagataccgatgcttacctgactttgaaccgtcagcgttcgctgggcgatggctttatgcacgcggtgtttaacccatcgttcaatgctctggcgacggcaatggctacggcgcgtcaccgccacggtcatattctggatatcgcccgtgaacgccacgttgagcaggcgctgaatgaaacgcctgataaactcaaccgcgatcgtcggctggtgctgttaagcgatccggtaacgatgtcgcgtctgcactatcgcgtgtggaacgccccggagaaatactcctcctgggtgggggcgtatcagcagctcacgctgaacccgctggcgttgaaaacgaagtaa

SEQ ID NO: 96947 - DNA, 1554 bp, Enterobacter aerogenes
atgaaacataaaccacagatgatgaaaatgcgttggttaagcgcagccgtaatgttgtccctgtgtacttcatctgcatgggcattcagcattgatgacgtagcaaaacaggcgaaaacgttagccgggaaaggctatgaagcgccgaaaagtaacctgccctccgccttccgcgatatgaaatacgcggattaccagcaaatccagttcaatcacgacaaagcgtactggaataacctgaaaaccccgttcaagctggaattttaccaccagggcatgtatttcgacacgccggttactattaatgaagtgaccagcaccagcgtacgtaaaattaaatatagcccggattattttaattttggcaatgtgcaacacgataaagacacggtgaaagaccttggtttcgccggttttaaagtactgtatccgatcaatagcaaagacaagaatgacgaaatcgtcagcatgctcggagccagctacttccgcgttcttggccagggtcaggtatacgggctttccgcccgcggcctggctatcgataccgcgctgccgtcaggtgaagagtttcctcgtttccgcgagttctggattgagcgcccgaaagcgaccgataagcgcttaactatctatgcgctgttggattccccgcgtgcgaccggcgcctatcgttttgtggttatgcctgggcgcgacaccgtggttgatgtgcagtcgaaggtctatctgcgtgacaaagtcggtaaactcggcgtggcaccgttgaccagtatgttcctgtttgggccgaaccaaccgtcgccgacgactaactatcgtccggaactacatgactccaacggtctgtcgattcttgccggtaacggcgagtggatctggcgtccgctgaataacccgaaacacctggccgtcagcagttatgcgatggagaacccgcaagggtttggcctgctgcagcgtggccgccagttctcccgctttgaagatctcgacgatcgttacgaccagcgcccgagcgcgtggatcaccccgaaaggcgactggggtaaaggtaaagtcgaactggttgaaattccgaccaacgatgaaaccaacgacaatatcgtcacctactggaccccggatcagctgccagaaccgggcaaagagatgaacttcaaatactccattaccttcagccgcgatgaagacaagctgcatgcgccagatagcgcttatgtggtgcagactcgccgctcaaccggtgatgtgaagcagtctaacctcattcgccagccagatggcactatcgctttcatcgttgatttcaccggcgctgacatgaaaaaaatggcggcggacacgccggtaacggcgcaggcgagcatcggcgataatgccgaaatcgtggaaaactccgtgcgctataacccggttatcaaaggttggcgtatgaccctgcgcgtgaaagtgaaagatccgaagaaaaccacggaaatgcgtgcggcgctggtcaatggcgatcagacgctgagcgaaacctggagctatcagctgcctgccaatgaataa

SEQ ID NO: 96948 - DNA, 1161 bp, Enterobacter aerogenes
atgaataaaacaccagtagagcgtgaatatttcttcgacagcatccgcgcctggctgatgctgctggggataccctttcacatttcgcttatctactccagccacagctggcatgtgaatagcctggaaccctcctgggggttaacgctgttcaacgactttatccatgctttccgcatgcaggtcttctttgttatttccggctacttctcttacatgctgtttttacgctatcccctaaagaaatggtggaaagtacgcgtagagcgcgttggcattccgatgctcaccgcgattccacttctgactttgccgcagttcttgatgctgcaatacgtcaatggtaaagcgcaaaactggcacacgctctccggctatgacaaattcaacaccctggcatgggagcttatctctcatctgtggttcctgctggtgctggtcgtgctgaccactctcggcgtggtgctgtttaagtggctggccaatcgagggaaaacgcagaccgccagctttggtgacactgtcacatttggtcaattatcgcttattttccttggacttggcgtgttgtatgcggtaattcgtcgcactatttttatcgtttacccgccgattctcagcaacggactgtttaacttcatcgttatgcagaccctgttctatctgccgttctttgttctcggcgcgcagacgttcatcaacccgcggctaaaagcgatgttcaccacctcatcaccctggtgttttgtcggcgcactgctgggctttatcgcctatcgtcttaaccagcagtatggttccggcgatggctggatgtatgaaaccgaatcggtgattaccatggtgctggggctgtggatggtgaacgtggtattctcgctgggccaccgcctgctcaacttccagtccgctcgggtgacttacttcgtcaacgcctcgctgtttatctacctggtgcatcatcccctcaccctgctgtacggggcgtggattacgccaataatcaaatcgaatctgttaggttttatcaccgggctggtgtttgtggtgggtattgcgctggtgctgtacgaaatccatctacgtattccgctgctgcgcttcctgttctcaggcaaaccgcagcaaaaaccggcgaaagcgccggtgtcggttaactaa

SEQ ID NO: 96949 - DNA, 525 bp, Enterobacter aerogenes
atggttgttcaacctgaggtggttctcggcgatattacgacgttgcaggtagatgttattgtcaacgcggccaacccatcgttactgggcggcggcggcgttgatggcgccattcatcgcgcagcgggcccggaactactggcggcctgcaaaatagtccgtcagcagcagggcgaatgtccgcccgggcatgcggttatcaccagcgccggtaatctaccggccagcgcggtgattcatgcagtcggccccgtctggcgcggcggtgacgagcaagaggccgaattactgacggatgcctatcgcaatagtctgttgctggcggcagccaataattatcgatctattgcttttccggctatcagcaccggcgtatatggctatccgaaacaggcggcggcggaaattgcggtgaaaacggtgaaggctttcctcacccgatataatccactggaacgagtgtgcttcgtctgctttgataacgaaacggcggagatctatcagcgattattgcaggcagaatga

SEQ ID NO: 96950 - DNA, 303 bp, Enterobacter aerogenes
gtgataaaaaaaatccacgccttagcgatgccatgtctgatgttgtcgtgcttgtctggggcagtgcacgccgcgccgaccgacggcgttgtcgccatttatgggcaggtcgtcgatccgtcctgtgaagccaatagtgtgggcgaaaagattgaaatggcctgcccgcagctgcctacccgggcgctttcgccgcaggtgctgacgacgggaaattacagcaatgacgccgtccgctcagcacaattaaagtatattgatccgcaacatacccgcgctatcctagaagtgaattatcgctaa

SEQ ID NO: 96951 - DNA, 306 bp, Enterobacter aerogenes
gtgaaaaaaatgactggcgtactacttgctacagtttgtttccttcccgctttattgactttttcaactacctctaacgccgcaagcggcgtgattcgtttccacggcggcgttgtcgaaccgccttgtaaaattcgttcttcagaagatcaggtctcgatggcttgcgctaagcagaagtcagtcactttttctgcccagcaggtagcccggggagatctgcaacatgccaatatcaaatcaacacagttcacctttatcaatccccagcacaccaacgctattctcgaagtgagttatcggtaa

SEQ ID NO: 96952 - DNA, 495 bp, Enterobacter aerogenes
atgatacgcggcatgaacatactcttcgcaatcgcactcacgacgggcattctctccggtatttggggatgggtggcggtctcacttggcctgctgagctgggccggtttcctcggctgtacggcctatttcgcttgcccacagggcggcctgaaagggctgttgatttccgcctgcacggtcatgagcggcgtgatatgggcgctggtgattatttacggtagcgcgctggcgccgcagctggaaatcctcagctatgtgatgaccggaatagtcgccttcctgatgtgtattcaggcgcgtcagctgctgctctcttttgttcccggaacctttatcggcgcctgcgcgacctttgccgcgagcggcgactggcgcattgtcgtgccatcactggcgctgggattggtctttggctatgccatgaaaaacagcggactgtggctggcggcgcgagcggcaaagaataagtctctggctaacgataacgtctga

SEQ ID NO: 96953 - DNA, 555 bp, Enterobacter aerogenes
atgaatgaattttcaatcctctgtcgcgtgctgggctcgctgtactatcgtcagccgcaggacccgctgttggtgccgctgttcacgctgattcgcgatggcaagctggccgccagttggccgctggaacaggatgaattactggagcgtctgcagaagagttgtgatacccagccgttaaccgctgattacaacgcccttttcgttggtgacgaatgtgcggtctcgccttatcgcagcgcgtgggttgaaggcgccacggaagcggaaatccgcggttttcttactcaacacggtattcccactggcgatgggccaaccgatcatattggatccctactgctggccgcatcctggcttgaagatcatgcctcagatgacgaaagcgaaacgttggaaacgttgtttgccgattacctcttaccgtggtgcggcaccttcctcggtaaagtcgaggcgcatgcgcaaaccgcattctggcgtaccatggcgctactcacgcgtgaagctttatccgccatgtgggatgagctgcaggaagaaaacgacgaataa

SEQ ID NO: 96954 - DNA, 738 bp, Enterobacter aerogenes
atgtatcctgttgacctgcacatgcataccgtcgccagcacccacgcctatagcaccctgcatgactatattgccgaggccaaacgtaaaggcattaaactttttgccatcaccgatcacggcccggatatggccgatgccccgcactactggcatttcgtcaatatgcgtatctggccgcgtctggtagatggcgtcggcatcctgcgcggcattgaagcgaatattaaaaatacccagggtgaaattgactgtaccggaccaatgctgacttcgctggatctgattattgccggttttcatgagccggtattcccgcctcaggataaagccacccacactgaagcgatgattgccgcgattgccagtggcgcagtccacatgattagccatccaggcaatccgaaattcccgatcgatattccggcagtagccgaagcagcggcaaagcatcatgtggcgctggaaattaataattcctctttcctttcatcgcgtatcggtagtgaagataattgccgggcaatcgccgccgccgtgcgtgatgcgggtggttgggtggcgctgggttcggactcccataccgcctttacgcttggcgaatttaccgaatgtcgcaaaatcctcgacgcggtgaatttcccggaagagcggatccttaacgtcagtccgcgtcgactactgaatttcctcgaatcacgcggaatgccggcgattgcggaatttgcagacctttaa

SEQ ID NO: 96955 - DNA, 939 bp, Enterobacter aerogenes
atggagattattttttaccacccgacgttcgataccccctactggatcgcagagctggaaaaacatctgccgggagcgcgagttcgtgagtggaaacctggcgacaatcaaccagccgactatgcgctggtctggcatccaccggtagaaatgttgcaaggccgcaaattgaaggcggtttttgccctcggcgcaggcgtggattctattcttagcaagctgcgggagcatccggaaatgctgccgctttcgatcccgctgttccgcctcgaagataccggtatgggcctgcagatgcaggaatatgcggtaagccaggtactgcactggttccgccgctttgatgattatcaggcgctgaagctgcaatcccactggcagccgttgccggaataccgtcgcgaagattttactatcggcattatgggggcaggggtgttgggcggcaaagtcgcggaaagcctgttgcgctggggtttcccagtgcgctgctggagccgtagccacaaatcctggccgcaagttgagagttttgccggtcaggaagaactgggcgcatttttacggcaaacccgcgtgctgatcaacctgttgccaaatacggctgaaaccgtcggcatcattaatgaaactttactctctcaacttccggataacagctatgttctgaacctcgcccgcggcgtacatatcgttgagccggatttactggccgcgcttgacagcggtaaggtgaaaggggcgatgctggatgtctttagccgcgaaccgctgccgaaagagagcccgctgtgggcgcatccgcgtgtggccatgacgccgcatattgccgccgttacccgtccacaggaagcgatcgcttatattgccagtaccattagccgcctggagcgtggtgaaacggtcagcgggcaggtcgatcgccaacgcggctactaa

SEQ ID NO: 96956 - DNA, 297 bp, Enterobacter aerogenes; identical to SEQ ID NO: 96728

SEQ ID NO: 96957 - DNA, 324 bp, Enterobacter aerogenes
gtggagatcctgcgtcagcgcggggtgacctacagcgcgctggtggcgagcaatgacgatatggcgatcggagcgatgaagcagcttcaccagctgggcgttaaggttccggatcaggtctcggtggtggggtttgacgatattgtgctggcgccgtatatggtgccgtcgctcgccagcgttcgggtaccggtgacggagatgattaaagagagcatcaatcggctgatatttatgctggatggtggggaattcaactttcagcagagcttccccggggcgttaattgagcgtgattcactggtgtcgggtccctgtgcctga

SEQ ID NO: 96958 - DNA, 150 bp, Enterobacter aerogenes
atgccatctgaatatgatgaacaactggattcgactgatacgcagcttcccgccgaatatgacctttttgatttaatggcgaaggttactgaagagaacctgcatgcccctgtggattctgggccgcctgtcggccgggaagcgttatag

SEQ ID NO: 96959 - DNA, 219 bp, Enterobacter aerogenes
atggatgttccggcgacggcgatgtttctgcccgccccccataaacagtccggtgccgatagcgccgcccagcgcaatcatctgaatgtgccgggcgccaaggccgcgtttgagctgcgacgggcactccccgtcggtggcaggatgaacctgcccctcacgttgatgttcagtcatgttgattccttcaagcaggcatggaaaggcttggcgcggtag

SEQ ID NO: 96960 - DNA, 330 bp, Enterobacter aerogenes
atggggtttccctcgccggcgaatgattatgtagaacgcagattagacatcaacacattgtgtagattgggtgctaatacgcgagcgattgttacggatagtggttatgcggttgttgatttagcgagaaaggctaagcagggtaatactgtcctaatcagaagcgaaggaaggatcgagtttgcaaagatcttgggccgggcttttatcacggcagatggggagtcaatagaaggtgaggcacttgatgaaactgaagtgattggagtcgttactttcctaattacagacgtacattcagagacttcagaaggttgccctgtcatctag

SEQ ID NO: 96961 - DNA, 651 bp, Enterobacter aerogenes
atgaatcagcctgaaaaatttttgtatacacacctgggtgagctggcaaaactgctggggcacggttcaaggatagaaatacttgagcatctggctgcgggtgagctgtcggttgagatgctttctgccctgacaggcatgtcggcagcaagcacctcacagcatctgcaaaacctccgcagaggcaactttgtcatgtcccgccgggaagggaagcatattatttaccgtctgggtgacggtccggtcagaagcgtgattgccagcctgcgatgctttgctgaatttaacaatgatgtaatccgcaatatcactgcggattaccagagtaatcatcattgtctggaagccgtcagccgggaggagctgctgagtcgtcttgaggccggtagcgttacccttctggatgtacggccggaaaatgaatttatcggcggtcacttgcccggggcattaaatatcccgctaaaagagcttgagtccaggctggcagaactgccgaaggacagtgagatagtggcttactgtcgaggtccgcactgcattctgtccgtggaagctgtggaatatcttcgccgacagggttatcgtattcgccgttttgatgaaggttacccggaatgggccgcatcgggcctgcataccgaatag

SEQ ID NO: 96962 - DNA, 1209 bp, Enterobacter aerogenes
atgtcgaataaaaatatgtaccggcaggtgctcatactggcaagcgcacaggccattttccagaccgtttctgtccttgtcatgaccattggtggtcttgccggcgggcttctggctccctccccgggtttagcaacagcgccaatagctgccatgtttctcggaacggcgtcagccacgtttccggcttcaatgtggatgagcagggtaggacgtaaaacggggttttgtgccggtgctgtagctggtattaccggtggtgctatcgccggcgtagggattattacttcttcatttgttctgctctgtatcgggactttcatggtcggggtctatcagtcgtttgcgcagttttaccgctttgcggccagcgaagtctccagcgatgcgttccggccccgtgccatctcgctagtcatggctggcggaatcgtcgccgcgcttgccggcccgttactggcacggatgggcagcaacatactgacgcctcagtatctgggctcgttcatcatccttgctgcaatatcagcagttgccgtattcattctctcccggcttcgcgtgccggtcagtgttgaagaagctgttgaacaggttcctgcccgcccctggcaaaaggtcgtcactcagcctgcctatcttaccgccctgtttggagctgccactggctacggtattatgatcctcgccatgacggccacaccgcttgctatgtcgcatcatgctcactcactttcagagacgtccaccgtaattcaattgcacgttctggggatgttcctgccatccttctttacagggaagctcattggacgttttggcagcatccggataatgctgacgggtattcttctctatatatgccacatcggtctggccctgaccggtaccggattctactcttttgccggtgcgctcattttcgttggtctgggatggaacttcctctatataggcggcacagccctggtcacaacaacatttcgcccttcagaaaaaggcgtggctcaggccatcaatgatatgaccatttttgcggtaggactggcctgttcgttaagcgcgggagcgctgctagagagactggggtgggaaaagcttaatgagatgcttattccgtggcttgcagtcgctgccttagcgctgctctggcttgctatccgtaaacggtctctggagggtaaaaaggccagtacgagagaatgttaa

SEQ ID NO: 96963 - DNA, 225 bp, Enterobacter aerogenes
atgaaagaagaattcgtacctgttgaaaatgaagtagatacctccagtctggaggcattaggagaagagctgaaagctatgcgccatgcgtacgccattctgtttacacagctcagcccacaaattaaaaacggtattatctatcagcttaatgggttatctacagatgcggccaagagaatgggacgctatctctcccagtttacaaagtttgaaaagagttag

SEQ ID NO: 96964 - DNA, 255 bp, Enterobacter aerogenes
atgctcaagcccaaaccgctgcagcgcgtgctgctgccgctaatctctctggcactgttaaccagctgcgccagcaggcaaaacaccttgccacgcgcctggacgccgcaaagcacaccgcaagtctcgccgctgccgtcagaagcaaaacaaccggcaccaccgccggaatgctcgccgacatgcttggaaaccttgcagaagaggctcgacgctatgctgcaattgctgacgaacgctacactgcaggactga

SEQ ID NO: 96965 - DNA, 408 bp, Enterobacter aerogenes
atgcgatacccggtaatttttgagcatgacgaaaccggctgggcggtattctttccggatatcccagaggcaatgacgggcggggagaccagggaggaagcgttagaaatggcgcaggatgccctggtaacggcgtttgatttctacttcgacgatcgccgggagattcccgcgccatcagctgacggtgaggcatttgttgaggtaccgtccagcgtagcggcgaaggtattgctgctaaatcgtctggtaagcaccaacaccagcaatgctgaacttgctcgcatgattaatacgcgtccgcaggaagtacagcgcatcgtatcgcttggtcacagcaccaaaattgatacgatacaaaaagcgctggcagcgctgggacagcatatggaaattgtcgttcgttaa

SEQ ID NO: 96966 - DNA, 177 bp, Enterobacter aerogenes
gtgaagcaaagcgagttgaggcgttggcttgcagctcaaggggcagagtttaaagatggtactaaccacctgaaaatctacctcaacggcaagcaaacggtaatgccgagacatccgggtaaggaaataccggaaccgctgaggaaggcaattcttaagcaactcggcatcaaataa

SEQ ID NO: 96967 - DNA, 822 bp, Enterobacter aerogenes
atgaatttttcttacaaaaaacaagatggacacactaagaagtgtctcgttagaggttttaaagttaacacctcatcgactgatattctttataatcaaatagccaaatctcaggcttttaaagtcaactctgttattaagattagtacagataagcatctcattctgaaagctttcgaaacaaacaataattgccactatcttcatttggctttgtttaacccgaaagcgcaagtttcgattactcctttaaaaaaaatgacaagtgatttgcttgacgtagaaaatctggatgatctgcatgcatttttgatggtaaaagacaatcgaatagcttcgctgatgcaaatttcaacaaattggtgcgaagttaaaattgcaaaaatgttgaatcagtttggcatatcagtgacaccaactcctatcttaaaaaataatgtcatccaaaaaatcaaggaggacaaattaaaagccctccacctcaacattgatgtagatgagtctgatttcgttaaggctccgggtttgatagaatcaatttttaaaaaagagccaaccgttggagctaaaggtatttctggacatttgactatagatgcaaaaggtaatgctgaattagcccaatcgattgaaaataatcctgcaacatgggtaagtgatttagaccaagatttttatattgaaactaaaaagggtgagaaattttatagtgacgatatgaaagtaactaaaacgtactttacggtgccttatggttctaagtctataaatgctaaatacgcaaaagaaatcctagaggattttgtagcaaaagagctataa

SEQ ID NO: 96968 - DNA, 486 bp, Enterobacter aerogenes
atgctaaaaaacattaacacaacgggactacttgtctcagcgctaaacatcatagcctctttgagtttctctgtttttttgactggaagcttaactaataacacagacgcattaaacttggtggctaatgttttttcgattctgtcaggctttttactattagtaattactatgtcaggtgagaactcaacacttcttaacaatatgagtgcattagatgctgcgaatcaagaaagaaggttcctgatgcgttttaacaagtattatgcacttttcttactgtacattctcacattagcgctaatctttattttttatttaataaccaaagacaaaaccaactcttcaatacctttgagctatataaaatccgctattggtcactcaattgccttcctaacatgtttctcctttatacagtccacttttatacccctaaaaataaaagaactgtttaaagagaagcgagagtttaacaggaagtaa

SEQ ID NO: 96969 - DNA, 342 bp, Enterobacter aerogenes
atgcgtaatatgtacgaattgttagactgttggggggcttgggctgctgctgaaagtagcggtgttgactggcaaccaattgcagcaggatttaagggactgctgccacacggcaagaaatcacgtatccaatgtgatgatgaccaagggattatgattgacgcttgcgttgctagactgcgtaaatataaacaagaagaatatgaactgattattgctcacttcgtgatgggcatctcgttgcgtagtatcgctaagaagagaaaatgctctgatggaactataaggaaggaattgcatactgctttagggtttattgacggtatgctatgtatgttctga

SEQ ID NO: 96970 - DNA, 471 bp, Enterobacter aerogenes
atgacccgagaatcaacgttattcaatattcgctactcgtttcatatcgaaacaatgcaagcgactttgtacaatcgtgcagataaatttctaacgtttgcgcagattctgctcgggtctgcaatttttgccgactatggcagccttcctttatttggtgcatgcgtggcatctatctcgatcgctagctttgtctggcaacccggaaagatggccctattacatgaaatacaggcaaaaaagatgaaggcactaacgacaatgccagccagtatttctgatgacgatttatatgcttcctatcaaagagcggaggagacagataatccaacgcttggtctgctaagagacgctgcatataaacgggcatggatagccatggggcacccagaagaatcgaaaaaagtcaccttaaccattgctgaaaaaattactgcttggttagcgggtgatttgcctaaagatcactga

SEQ ID NO: 96971 - DNA, 465 bp, Enterobacter aerogenes
ttgaacccggatccgggctgggttagttcccgactccggcggtgctctttcctgttgtgtaaaaaaagggcccatcggggagactgggcaaagactacacacagcaatttgagttgtggcggtggtgcctccacctgccggaacggccaggcccggcgacgacacttaacaaaacgatcattcatttcaaaagttgaattaatggccacgccgcgagcgctgagccgcattaccacaacggaaaggggccgcgtaacctggcgccgatctggccgctgctcggtttgtaccggattcgtccccggccactggcgcagacaacaaagcttctatgcgcgttccaaccagcccctttcctgttgtgtcccggactcttcccgggcgtcacaccttttcgccgcgctggtggggcgcacgtcgtgcctgaaacacctagcttgcacattccggtgttctgagagttga

SEQ ID NO: 96972 - DNA, 207 bp, Enterobacter aerogenes
atgattaccgggactgcgaactacgatgatgttcctgatgttcgctgcactttgtgcggcagctattacaaatccgatgatccggaaagtcacgaatgcgaggaagaagtgcaactccatgacgaaattgaatgtgatatctgtggtttcaaaagcacagacccggacggtgctcactattgctgcgaggataactctgatgactga

SEQ ID NO: 96973 - DNA, 618 bp, Enterobacter aerogenes
atgtcccgggctttgttgtttttgcaacatttccccggcggcgctgcgcctggacgggctactcgttggtggtgcggcctgcgggtttcccggcggcgctgcgcttggccgggctactggctggtggtgcggcctgtgggattcccggcggcgctgcgcctggacgggctacttgttgatggtgcggcctgtgggatgggtagcccgggcgaggcatttatgccgaccccgggaaagtttacaggggccagatgcgaaaagagcccgtactttcgtacgagctcttatctcgaatatggcggtgagggggggattgactcgcttcgctcgcccctgcggggcagcccgcttactgcgttcgcggtctgtccaactggctgcgccagttgtcgaaccccggtcgggggttctcatcccccctgtacggagaatataaaagaaaagagcccgtactttcgtacgagctctcatctcgaatatggcggtgagggggggattgactcgcttcgctcgcccctgcggggcagcccgcttactgcgttcgcggtctgtccaactggctgcgccagttgtcgaaccccggtcgggggttctcatcccccccaacggagaatataa

SEQ ID NO: 96974 - DNA, 696 bp, Enterobacter aerogenes
atgaaaggattatgtactgctctggcggtgaacactacgctgctagcatccgtttgccaggctcaggagccgccgacgcagattatttatcggtttgatgatcgtcgttatcttgagctgaaaggctgggactgcgaaggtgaactttggtatacggatactcaacgaggtattcatactcagccagctagccagttttatcgaattttcacgcggacattcattcatccttctgagaaatatatagcgattaccaattgggaagtggatggatttcttgtatcgaaagactatgggaaaacctgggcaaccgcacgtttttcccctggccctaatgaaccgaatggtgatgattacgcgcctgcagaggacgtgctctctttcaccgtcgtgaacgatcaaggttttctgcagaccaaacaccggctttatatgtcatcaaagccgtttgatgacccacgcgttatagctggtggtcctggtatcacctacaaacttgacgatggaaccgtacagtcaattagcccgaaatctccaggctggaagtggggtatggtgtatttcactaaggaatggctggaaggcaaagttgtaagtcatgaaaaaaactaccaggggcttcccgacaacgtgcccgaagtaaaaggctacaccggctgggatcgtatgcgttgtgatatggatgcagggagatag

SEQ ID NO: 96975 - DNA, 273 bp, Enterobacter aerogenes
atgaataagcttaaattgcacgccgtttctcgcagcgattttatcgctaaaaattatgctgacttccagacgctgctcgataaccgggtcgatcccaacaccattccagagcgtttttattgcggaggacgcggtggctggacattccagacgacgctggccctcaattattattatggcgacgcgatagaatgctctttcggctctgaatgccgccccgatgctatcaatctgatgcataacgatgatttcggttctcgcgtcaagccctag

SEQ ID NO: 96976 - DNA, 1611 bp, Enterobacter aerogenes
atgatgactttacaccgcaatcttatacgtacattactgctgacggtcgcttttgccgtgctgttcgcgctgccagaaatcattatcctgttaaaggaccacgtctatagcccgaaggctggagacctctcgctttatctgattatttcgctgctggcggcggtaagtatacgcttcttaatcacccgcttgctgttggcgattaccttcatcgtgcaaattagcgaagcgatttactatcagttttatggccagttctatggcccaagcgaggtatggctggcgttcgtcgaaaccaaagatatcgccagcggcattaccgacagcctcggcacgttgggaatttacttcgttatcatgtttatcgctgttgtttttgccctgttctttacgcgccgttttgcgccgcagtggcctaagctgctggccgtgccatgtctggtagcgattctggtgatgtttgtcggccagttttacaaagcgatcaacggccagatgtataagttcaacccggatctgcgtcactcgcttctgcgtaacggcctttcggccatgagctacagcgctattcgcctgataccagaggcgatttccggtgataaccagaaactaacaacctacgagccgtataaagtcacgccgatcccgcaaagccaggtcggccgctactctattattctcgctatcggtgaaagcctgaacccgcaccacattagcgcgttgggttatgaacgagataccacccctgaattgaaagcgcttatggagcaatatcagggaaccggacggctaatcgtctccaatgccgtctctactcgcgtggctattccgatgttggtcaataacctgcgcgagcctgacaactacgccgcctacaagaataaatcagcgaacatttttgttaatgcgcagaagcgtggttatcaaacggcatttatctctgcccaagggctggaaggcttaagtaactggattggcatccacgcgctcaacctgtgggaagatacacaggtgcgaccggcgccagaaatcggcgctgatgtggttcttaccccctcagtagaaaaagccgatattaactgggcgaaaccgttcctgatggttcttaacagtcgggcgccacatatcccttacgaccgcaacattccgcagggatttgcccgcttctcaacaccggaagccggcgatgaagtcacccagaagaaaaacgagtatgatgacgcggttcgcctttacgatcgtgaactggcctcggcgattcgcgcggttatggccaagtcgaaattacccgtcctggtcttcgtcacctccgatcacggtgaacgcgtcggcgatggcggcttatttggccactctatcgtttcaatgccaatcgcgcaggttccgttcctctactttagtaacgacccggcctattcaatgcacaatattgcgcctcagatgccgttgaaccactatcaactggcaacgctgatcaacaaaatgttagggtacaccattgaaaaccctaatcagaaagatgacagttactttattactggcggcgatattcgcggtctttctgagcgtgtaacctatcatttgaatgcactccctcctgcggaacaataa

SEQ ID NO: 96977 - DNA, 645 bp, Enterobacter aerogenes
atgcaatacatcaaaatccattcgcaggataacgtcgcggtggcgctggcggatatgacgtcaggcagcgtggtgacgattgataacgataccgtcacccttagccaggatgttgtccgcggtcataagttcgcgctgcgggccattgcgaaaggtgaaaacgtcattaagtacgggttgccgattggtcatgcgctggcggatatcgcgccgggcgagcatgttcatgcgcacaatacgcgtaccaatctgagcgatcttgacgcgtatcgctatcaaccagacctggttgaacaaccggcgcaacctgcggatcgcgacgtcgagatttatcgtcgcgccagcggtgaagtcggcgtgcgtaacgaattatggatcctgccgaccgtgggctgtgttaacggcatcgcccggcagatccagaatcgtttcctgaaagagaccaacgacgcggaaggcaccgacggcgtcttccttttcagccacacctacggctgctcgcagttgggagatgaccatatcaacacccgtaccatgctgcaaaacatggtccgccacccgaatgccggggcggtgttggtgattggtcttggctgcgagaacaaccaggttgatgccttccgtgaaacgctggggggattttga

SEQ ID NO: 96978 - DNA, 1110 bp, Enterobacter aerogenes
atgttcaaggaaaaaaatgccgcggtaatgaccgtagcggctaccgcgaccctgtgtcttgccgtctggacaattgtggtcctgctgagcggtctgggatggtggaactggcacgccaaccgcacgctgcagtggacggcgatccgcgagatagtgaccgtctgtggcctgatttgggcgtatggtctctgtctctggatactgggctttattgctttccacctgtttatcaggcaaaaagccgatgggcaacagcgtcagacgcagacttttattagccagcagacaaaaccggcgcagccgtttgcgtccttaaagcactttctccgtcgccgctacggccgattgtggcgcaataaggtccgcctgctgtgggtcgctggcgaggcggcgcagattgccgccatcgctccaggccttgcgcaacagcaatggctggagggccgcggtacggtgctaattcacggcggtagcctgtcggcgacggtggatatcgagcggctcagcgccctgcgtcggctgcgcggccgccggccgctggatggtatcgtgctggcgctggacaatgctcaggccaccgccgcgaccctggacgggtatttgcgaacgctggagctggttgcgcaggttttgcgctaccagccgccggtctatctgtggcaactccacgacagcgactggccgcaggatacgcgcattacccagacgctgggggcgttgttcccgccgcgggccgtcccgcaggatgttgaacggcagcttcgcgccattctgcccgccatgctggcgcaggggacccagcagttgtgcgctgattcgtcccacgattacctgctgcgtgtcgctaaatggctgaaggagggtggtatcagcggctggaagacgctactgacgctgtggcttaccgggcatctgcaacagatcccgctccgtggtctgctgttcagcccctcgttaaaggcggaagaagcggtggacaatgggctctatccccaccgttggccggccccggccgtctggcaggggatcatcgcagactgcggccgcgcgcgcggcgtgccggtgggggggcgtggcgccgctccctcggcgtcggcctgctggcgctga

SEQ ID NO: 96979 - DNA, 720 bp, Enterobacter aerogenes
atgttccaaaaaacatctcaagcaataagtatcatttacaaaaaaatagacaagatccaagaaaaaaacaaaacaaaaataatatcagcctgttttctggttatagctcttgttgcactctcaagctttcataaaaaatccttagacaactggattattgcaattagtaatttagtcatggctttctgtgctttttcggccttaataaaagccactgattatttttcaagttttgcagccaaagatgcctatgacgcaactaagaaaataaaatttgaaatcctgccaggaatagtgagtgaaaattacatcttccctacatgcctagacattaaaagtaaattagaattattaatccaatacccagaaaaggtagatttagctgatgtagtggaacaaataaagacatcaaacatagaacttcatcgtgcaaatagcttactggcgcaatacattactaatctaaaaaaccaaagcgagataataaaagactcccacaaacatttagaaaacacatcgacaaaagaataccaagaaattcaccagaaaggagtttatgtctggcgtttaactaataaacttaacaaccacctcacacatgccctaaacgatatttttcacgggaacttcgattatacgtcaacgctcaatcaaataaatggaatcttagatgcctcgggacttctaaccaccactatcaccgaggaacttaacaaataa

SEQ ID NO: 96980 - DNA, 273 bp, Enterobacter aerogenes
atggcgatgactggtagctttactaagaatggtatttcactggcgaatgcgtttgccgtggtaggtggattaaacgggactatggggggagagtcctggtcttttaacgttaatgtctgggcttcaaaagaaggatatgaacagcgtgaaaatgggggttctccgtttgccagcattcctttagcgctggactctgagagtattccaactatttcagaacttgagagtgctgctattgaatctggcatttttcatagctttgatatcgtttaa

SEQ ID NO: 96981 - DNA, 2190 bp, Enterobacter aerogenes
atgtcggtacctaaccaaatcccttacaacatctatacggccaacggacagacaaccgtatttacttacgaattctacatcatcagcgccagtgatttagaggtaagtatcaatggttccgttgttaccagcggctataccgtatccggtgttggtaacaaagacggcggcgatattacgtttctgacccccccagcaaacggcgctgtcgttatgctcgaacgtgtggtaccgacgtaccgtcttactgattaccaggacaacggcgacctgctggcggataccgtcaataaggatttcgaccgcatctggatggctatccagcgcgcttttattgatcttggctttgcacttacccgcccgtacttcggtggcccatttgacgcgaaagggtaccggatcgctaacctggctaatccagtaaatggacaggacgcagcaacaaaaagttatgtcgattcaaccggtgcggcgaacctgcgttataccgtgcgctttcctgaaatggtcgaaccgatgcccggggtacaatttcgggctaattcgttgcaaggttacaacgcacagggtaagcctgtccccgtcttttccatgacagataccgctgaccttgctcttaaactggcatcatttacaggtgccggattggttgggtataaactcggtcttccgtaccccgcggataccgttggcagaaaactcaataactgggtattcgttgaagaattcgcggatgaaaatagcgcggcgggtgattggtcaactgcggtgaaaaaagcaattaaatacgcctgtgataataatattaaacgcgtattcggattcggtgagtatactttttctcagacctgcgatcttgtccatgctgatatggttggtctgaatatcgatttgaacagcgtatcagcgtcggacaactggccttctaactctactgcgtgggacgcgaaacccttaattacttttggggacgcgaatacacaatgtacgggctttaccctgcacattaatgaattaaacggtattggtaaagctgatggtgtgcagccggtggggatgggcttttcactttgttctatcgatatcgaccggccatataattgcatccgcgtaatgtccaatggcaagcaaacatggccgaatgcttcggtatggatttccgggcatacatggcgggataactggatcggcattcatgaagagcgtggcgtttccggcacatcgccgattagtgaaggctggaatatccagattaaattcctctggtcaaaccgttacgccggcgctttgatgaggaacggttctcagtacgctaaattcttcggttgcgatatggactataacggccgttggatatctttgttgggtgtagcttcgcttacgggtattagccgtgggatgaagctaaccaatggggttacagaatgcgaggtaatgtctttctattcgcttcgcgggcagagttatgtcgcattgatggagttaaaatcagtccagggtggcaatagctcttatgctgtaggtgacacattaacgggagctggcgtatccacgacggtaacctcggttacaactaccgcaacaaatagctcacaaaataacttttttgatttattccacgattttcagggctcgccttttgggaagatttctgtatttggtggatattgcggcggtatggtcggtgggttacagcacacgtctgattcattttttgttaactcattcgacgggaatacattgaatctgcgtgggttaggtgtgtctgagtccggtaccacactggctttgtaccgcaaggctgaaagtaattccgcttttgcgaacgtaacggaagactacgttaactttaaccggcgtttgtatatgcgtaaccggttatttgagggaacgcctgtttctactacgctgcctatgagttcatcagcattcaagacggtttatacctttgccgattctgcgacggataaatatctgaatgaaggttctatgtatgaggttaccgtaaagggtaactatcctgatgcctgggctcggtttgttatttttgtcatggggaatagtatccgtatggttagcgatgatcatgatacgaacgttttcgcatggcagttcagcggcctgtcgctacagatgagacagaatgcgcaaagcgttatccagatagctctaaacatccggaggatttaa

SEQ ID NO: 96982 - DNA, 1224 bp, Enterobacter aerogenes
atgataaaatggtatcgcttcaaaaacttccactcgttcaaagacgagcagctcgtagatctcactcttaaggcaaactcttcagagtcgtcactggacaaacaatgggtggatacgaggataactaaagtattagccgtaatgggtgccaatggttctggcaaatcaaatatgcttaaaccactggcttttttaagctggttttgcagtgaatcatttaaatcaatggataattccgaatcactgcctatgtatccacacatttgcaatatggatgaaccttcggaaattgagatttgctttgttgatagcaggctcattgatggcgaaatgaatcatgtcgaatttaaatattttttgaaactcgacaaaaaaacggtattacatgaagagctaaaatacaaatcaagccgtttattctcatctattttttatagaaaatatgatgcaaccacaaatgaatataaagtaaaaagtaacacaaatgacttccctgtatcagaactaagaactgtgcctaaaaatgcatcagctatatcatacttcagaaggaaagatgataatataacagccggtgcaatgcattacattttctatagcattgagaataatttaaatgtatttggaaaatcaaactttaattatggtaaagtcttgagtgcagcagaatattaccaccatgagcctgagttatttgaaaaggcaaaaaaatacttaacaagaatggattttggcctaaaagatataataataaaagaagatgaaatcatggataaaaagacaggagagttagagcagaagtttatgccctatggcgtacatgagcataatggtgaaacatttaaaatcccattcatcatggagtccactggaactcaagcatgcttctattttatttataaattaatatctgcattacattttggtggagttgctgttattgacgaactagatagcgacctccatccttatatgattcgcgaattacttgatatgttcgcaaatgagggtatcaaccagcattcttcacaactaatatttagctgccacactgcagaaatacttaaatacgtaaataaacataacatttacttggttgaaaaaaatgatagcgttagtgaagcttggagacttgatgaaattcaaggcttgagaagtcaagacaatctttactctaaatacattactggcgcattaggcggcgtaccaaacattgaaatttaa

SEQ ID NO: 96983 - DNA, 228 bp, Enterobacter aerogenes
atgctctcgccgtcctcgtctatgcagctcttttcccggatgtggcaagactttagcgcaagctctgtcccgccaatcgatttccgccacccaggggctttatcttcttgctttgcagtcagtgattttgctgccgcctcaatggggatcgccggctggcgtcatattggttttcagccagcgccaggccgcataatcgtccagcccagcagctttgggatccattag

SEQ ID NO: 96984 - DNA, 1680 bp, Enterobacter aerogenes
atgtcccttatccaaaaccctatattacgtggttttaatgccgaccctagtattatccgtgttgaggacacctactatatcgccaactcgacatttgagtggtttcctggcgttcgtttacatgaatcaaaagatctgcaacactggaatcttctgccgtcaccattgtcgaccactaccctcttagatatgaaggggaatccgtcttcaggcggtatttgggctccggcgctctcttatgcggatggtaaattctggttagtgtataccgatgtgaaagtcaccgaaggtgcctttaaagacatgacaaactacctgaccaccgcaacagatattcgcggcccgtggagtgcgccgataaaactgaatggcgtgggtttcgatgcttcacttttccatgacgatgatggccgtaaatatattgtgcaacagacgtgggatcatcgggagtaccaccatccttttgatgggattaccttaacagagcttgatacaacaactttaaaattaatgccagaaaccgcacggaccatctatcgcggtaccacagtagcgctcgttgaggggccgcatctctataaactgaacggttattactatctctttgccgctcaaggggggacggtatttactcatcaggaggtggtggcccgttccaccactttaaatgccgacagctttgaaactgaaccaggagaagtattcttaactaacgttgatacccctgacagctatatccagaagcaaggacacggcgctttggtttcgacgcccgaaggcgaatggtattatgcttcgctgtgcgctcgtccgtggaatcgtcccggagaatcaatctatgatcctcgcggctggtccacgcttggccgggaaacggctatccaaaaagtgtactgggatgacgatggttggccgcgcattgtgggcggtcacggcggtaaaacgtttgttgagggcccaaaagacgccatatataccgaaagcgcgaaagataatagccagcacgatgaatttactacgccaacgcttaatctcaactggaataccctgcgggtaccgtttaccgaaaagatgggtaccacaggcgagggaaagcttaccttaatcggccaggggtcattagcgaatacgcatgatctgtcgttgattgcccgccgctggcaagccttttactttaatgcccaggttaaagtcgcttttaatcctttcagctaccaacagatggccggattaaccaattactacaacgatcgccactggagctttgcttttgttacctggaatgaaattaacggcagagtcatcgaggtcgccgagaacaatcgtggaaaatatacttcgtacctgaaagataacgcaattaagattcctgacgacgtcgaatacgtgtggttacggacgaaagtcaggaagcagacctatagctatgagtatagttttgacggcgccgagtttattgaaattccggtagttttcgatgccgcagtcctttccgatgactatgttctgcaaagctatggcgggttctttaccggtgcatttgtaggtcttgcggcagtagactactcaggctacggcgccagcgctgaattttatcatttcgattatcaagagtttggcgactcgttaattggcacggatgtttatagttgggaggctggcgagctacgtgctgattag

SEQ ID NO: 96985 - DNA, 1152 bp, Enterobacter aerogenes
atgagcaacacggcaggagatgctataactccacctaagcggtggtcgcaagaacttgagggactaagggggttggcctcgctatgggtcgtcttgggccacatttctatcctgatcaactttcactttccaatcctctcggatccctcgatgggggtcgacctattcattttgttatcaggatacttgatggcaaaaaattacatggaacgtaaagacatcgagccatggacatcctccagtactttcaaaaagttttggctacgccgtttcttccgtattgccccactttattatgtgttgctaatcttagccatatgcctgggtagctattttggcgaagctagagatgctatcgctaattattatccggcaacacaaacgaataccagtcgctacagcgatggttcgttcatgaacattttcacgcatgttacttttttattcggatttctgccttattattctttcaatacggtacttcctgactggagtattggattagaaatgcagttttatattctatttccattcataatgctgggggttcttaagtttggctttgctcgtacctgcatcactgttgtgcttgtttgcctatttgctcgattttcacttcctgagtatttcgcatcattccctatgccatcaatgatattaataaaacttaatgtattcattgcgggtatgctcattgcaattggtgtacgcagccaaaatgtcgcttatattgttttagcaatatttgctaccataattagcctgtatcaacacgacagtataaacaagcttagatatgcagcccaaataggtatgatacttatgatggcaacaatattatgggcacgaccagaaaatagcatcattgcaaaaactttacgcatccctcgctggattcttaccaataagttgagtgtatttttgggcgatgtgtcttactctgtatacttactacatttaatgattgtactgccggttatctcatacttgttgaataacccagcattttcacagcatccatcagccttgcgatttgttatagcaacactcatcattcttcctattacatacatcattagttatttcctgtataaatcagttgagaagccaggtattaaacttggtaagcgaatagtatctaaggttagataa

SEQ ID NO: 96986 - DNA, 729 bp, Enterobacter aerogenes
atggctggcgttcgtattctttgcaatcaagttattcctgtcaccgactggaaccacgactatgtgaccatcaaatcaaaactggaaagcaaatcaccgctcccgaccgttgccagttttgacctgctgaacccactggacaacagcgggcacggctataccgtcaaaccaaatggggggcaaatccgcgactggggacttcattatcctgatggagcgaaaccttctgtgactgatttaactaaacctggtttgggagctatttccttcgtcgttgcttttcggctggattctaaaaaccgttatatcaatattttcaataaccgtttgtcaggaattggttttaatttttattacagcggtggattttatatgtcttttatctacccaagtggaacgccgggaacgattgcaggtgcaggcgaaatcactgccgaagttggtaagtggtatgtggctgcaggagtgtttgattcagtaaatagaacggcaagtgtcagaatcggtgatgcaggattgcaatatggcactataggaaatactttcccagtcaataccgttcttgatgcagcattatgtattggtggtgaccctaatggtttgactacttcgtcaatgcatggcgacattgcttttaactccttttatgatggtgctttcacatccgagcagagggatgctatggtcaatgttggaatggagatattaaaagaacgagggttggtttga

SEQ ID NO: 96987 - DNA, 2958 bp, Enterobacter aerogenes
atggcctttaatccgccgcagggaactaccaacgccgatgtttttataggcaacgttcgacgtttagatgaactggttaacggtcctgcagccgacgttcccgaccgtgctggtgatccgctgtactcatggcgccagatgatggcgaagaatgatgaaattcgtcaaaacctgataccgctcagcaggcagtacatgacacttgaggctgcacaggcggatattgctaatatccccgaagggagcacaacgtatgtgcgcagccctgacgacagcgcactggccattgaataccaaaatgtcggcggaacgttggtcgctaccgggcgaaaaatgccgtcctccgcacttgttgatgagatcgacaagcgtacccgatcattacaggaatcacctgattcgctgtttgatatcgtatccagcaatggtattcgccctttccgcctcagaagcacagacggcgtcactgagtttgagtcagtcgcgcggttgttgaccggcgactcaggtctcaacttcaacgggagcgtgattgacaacaacgcgccggacggctggctgttcctgatttattcgcgcaacggtttggtgattgccggtgttaaggaagacgggacgaaagtcggctggggcgggagcgacagcggcggcgggcaggcgggcgggattacccccggtgatactgcggtgggttatgacgatatccgtaattacactggcgacgccactgtacgcgatgttgtgggcgagcgtatcaatggccggtttgtggtcgacgcttccgatacgacttcgccagatgatggcggtggagtactggtcggtaatgatgggcgccgctggatccgccagtgtgactttgtctcttatgacatgtttggcgcgccccggatccctgagtcggtctatcagaattatgccacgctgtctgcgcagggtaatgagtccgcggcgcaggcgttactggctgatatcgagccggcggatcaggccattgcccgttgccatgccttcgcggctaagcacgctatcccggtagtccagaatgtcgggcggttcctttgggtgagcggcgaaattgtggtaaggacgtctgcttatctgggcggctctacgatcgtaacctgcaatcgcagcggaacggatgaaacccgctgggggaaagtggatggtgtggatgatggtgcccccgacccgatgtatatgttccgcatccagggccaggctcgcgtcaacttcaccgcggctgaattgaacgaactcaatacctcatactcgtcctatctgaagcgcgggagcatggatatcccgatgccgaagttaagccagtaccggggcggtctgtttggctttatttcttcttctgtcgagatgtaccgcagcgggaataaaacgaacgcccgtaaccaggtccatttccgggactttacccgcattggtcgtaatggcgcggtttctgatgtactggtgaaaaatatcccggcgggcaccattacggaagcctggatccagccgaaagaaaattcctggcttaactttgagcccccggcgttctttgaagcaggcaacggtcgcaaattcgtgaacattcaggttgagcgctcgcaggtcaacattgaaaatctggtgatggataactgggcgacgggcgatttggagtcaagagtcgtaattggttcttatggtattacagatctttattgcagaaatggtacagctgagtgcataccttcaatatcaggtggaggctatgtaatttattgcaagaattgcattgatatacatgtttatggctattacggcttaaatgggtgggggtttcaggggcatcatggtctgaagcgggtatttattaccgagtcggtcatgaaccgctttgatttccattcattcggctatgacgtctacatcagcaggacgaaattcaaggggcgccagatattcctgcagggcggtgggcagttcgtacttcgtgactgtgactttaacattacgcagtacagcctggggcaaactgggcatatcgaagaccgactgaatttcttcatcaatatgcgggaagactacgccggggactgcgagtgtaacctgactatcgacgggctggtggtgcgctttgaccgcaatatcacgaatgcctgggcgtctgacgtacagtcgtttgatatcgtccgcatgaacagcggagaatcggttgattatggtgtttcgaccaaaacaccgcatgttatttccgggaaagatatcgtatttgatctggatggcgtaccggcttccctgcctgataatttcgctttcaccttctgccgtccgttccgtaacctttacaactcagcgcagaaaacttatctgccggatatggttaaagtgcagggcatgactgcaattaacgtgcctgacggtaagaatgcagttatggcggtgtttcgttgcggagccgacatggcacagaacccgtttgccagccggactaaaatccgcccgaacgggactaacgctgagatcatcgccgaggacgtcatcagcatcatcaataatccggtcatcgcgcagaacgcgtgcccgacggtgtacatgccaggcgcggcctcttcctgggataccgttgtcggcggcacgacgtaccgcaccagtgaatactcatatcgcccgaaagtgacgctgcgtaactgctatccgtcgattatcaacgctgccggggtaaaagccgaattcgatattgccggtggcttactggcgcgctacagcgtcggtgatacggggaaccgctgccgggtaaccggcgcggatattcagcttatccctgactcaacagggactctttatttcgatacatccaatgtcagggcgacgggctgtgactggttcgatccgatgaacggagcgacctataccggcaccctggacggtaccggcaacgaaaaccgcggcaccccggaacactcacccaatatttaa

SEQ ID NO: 96988 - DNA, 2949 bp, Enterobacter aerogenes
atgatagaacaaacctcacgcctcgcaatcattatcgacagctctggggcagaaaagcaggccgataatctcgcaactgcactggttaaaatgacccaagcaggggaccgtgcagctatgagcgctggcaaggtgacaaaggctacggacgaagaaaagcaggctctatctgaacttctcgatcgtattgacccggtgaatgccgccctgaataagctggacaaacaacaacaggatttggcgaaattcaaatctaaagggatggtagatacagatacatttgagctttattcaaagcgaatcgaagagactcgtagcaaattaactggttttcgtgacgacttgaaaaaaactgggcagtctgccgcccaaacagcttttgcaatgcgcatgatccccgctcagatgacggatatcgtagtcggactctctacaggccagtccccttttatggtgcttatgcagcagggtgggcagttaaaagatatgtttggcggtattgggccagctattaagggagttggtacctatgttatggggttggttaacccttttacgattactgccgcagctgttggtgttcttggtcttgcttactataaaggcgctcaagagcaggacgagttttataaatccctcgtattaactggtaatcaggtagggaaaacatccggtcaacttgctgatatggctgctcgtgcaggaactgttgctgattcaaccaccgggaaagccgcttcaacgttaaatcagttagtttcatctggaaaagtcgcaggcgattcactggaacgtgtaacaactgcagtcataaaaatcagtgatgcgacaggaatagccactgaaaaacttgtgagtgacttcaacgatattgcagctgatccggttgcggccattactaaactaaacgaccaataccattttttaactctggcaacctacaaccagattaaggccttgcaggatgaagggaatcagcaagaggcggcacgcgtagcgaccgatgcgtacgccaataccatgcagcagcgtgcaaatgatattcatcagaatctaggccttcttgaaagcgcctgggactcgttggggaaagcagctaaaggtgcatgggatgcgatgctcaacattgggcgcgagcataccctacaagacaagttaactaccttaaatgaaaacattgccgaggcgcagaaaggtcaggcggaaggaggtttttggaacgggttaaatgctcggtttagtaaccttccggagatgctcaaacaacgggatgctattcagtcgcaaattacagcggaagatacactaaatgatattttgtcagatcatgacaaagcagaacaaaagcgcattaaaactcagcaggaagcggatcgagttaaccttcaatacttgagcaatgctgataagcgaaataaagctattaagcagcagagtgagttcttgaaggctggcgctctcacggcagaccagtacgctaaaaatgtttctcgtattaacgagatgtataaagatccaaaagcaccaaagatcgcgaagacgcctcaaggaaaagcctacgcagaggacgcagcaactcggcttcttgaccagatacaccagcagactgccgcgatgcagtcccagttggatgccagcgataaacttaatagcgctacgcaggcacgggttaagttcgaacagcagatcgctgacctcaaatctaaaacgcaactaaccgccgaccagaagtcgattctttcccgttctgacgaaatattgcaggcctataagcagcaggaggctttgcagagttcagttaaaacgctggatgactaccggaaaatgcaggagcaaattgcaccaaaggaattgcgccaaaatgagacgttgcaaaaacgcctcgaaattcttcagaagatggttgagctgaagaaactgacgccggaggctgctgggaagcaggcgagcgacctgattggtaaatcagtgctgcctgattccgttatatcaggtgtgaacaaggccggtggtacgctgacgtctggagcaaccaatagtgacctgtcagggcagggattgaacatgatagggctgcaaatagatccgcagcttgaggttatcgaaaagctgaagcaagcccagactgattatgcttcctggctgaaccagcagcagcaggcgatcacacaaagtactttactgaatgagcagcagaagcagcagcaattgctggctctccaacagcaaggacaacagaaccagcaagcactaagcaccgcagtttatgccgcacagatgcaatcagcgcaaaattctttctccagtatcaccgatttgatgggggcgatgttcggcgagcaatctgtaatgtataaagcggcatttgttacgcaaaaagcttttgcgcttgctcaggcggctgttcaattgccaatggcaatggcgcaggcgctttcaagccagccattcccatacaacttagcagcaatggctactgttgcaggcctcatggctacaataacgtccagcatctccagtgctgccgccgtcggctttgcttctggtggatatactggctcaggcggaaagtatcagccagcgggtattgttcataaaggggagtacgttttcgaccaagagtctacaaatcgaatcggcgtgtcacaacttgaggcgttacggaacggcaagccacttgatgccacattggggcgttcggggtttgggactggcgttcagaacgttagcaacagccagcaaacgaccatcatccgccccacagtcacggttcctccaataaccatcaatggaaatccttctgacgcgactgtgctgcttgtacagcaggctactcgtgaaggagcaaaacaaggttaccagcaggttgctaacgatctggcacaaggggttggccaagtgcacaaggcattaactggggggtataacactggacggagaacagggtaa

SEQ ID NO: 96989 - DNA, 201 bp, Enterobacter aerogenes
atgactccattaattcttaccgcagagcaaatcaaagctctggcagacttcgccgaacaggatggtcaacccgcttatacgatcactcaggcctgcatccccgaatttgaagctgatgacggcagcactgtgccgggttatgagggcattgtcgcctactccgagtcagaagagcacggtgtacttcagttggaagattaa

SEQ ID NO: 96990 - DNA, 654 bp, Enterobacter aerogenes
atggggcgctggcttgctggcagactcatgaaagagctggggctggtcagttgccagcagccgactcaccggtataagcgtggcggtcatgagcacgttgctatcccgaatcatcttgagcgacagttcgccgtaacggaaccaaatcaggtgtggtgcggtgatgtgacctatatctggacgggtaagcgctgggcgtacctcgccgttgttctcgacctgttcgcaagaaaaccagtgggctgggccatgtcgttctcgccggacagcaggctcaccatgaaagcactggaaatggcatgggaaacccgtggtaagcccgtcggggtgatgttccacagcgatcaaggcagccattatacgagcaggcagttccggcagttactgtggcgataccggatcaggcagagtatgagtcggcgtggaaactgctgggataacagcccaatggagcgcttcttcaggagtctgaagaacgaatgggtgccggcgacgggctatgtaagcttcagcgatgcagctcacgcaataacggactatatcgttggatattacagcgcactaagaccgcacgaatataatggtgggttaccgccaaacgaatcagaaaaccgatactggaaaaactctaacgcggtggccagtttttgttga

SEQ ID NO: 96991 - DNA, 303 bp, Enterobacter aerogenes
atgaaaaaaagaaatttcagcgcagagtttaaacgcgaatccgctcaactggtcgttgaccagaactacaccgtggcagatgcagccagcgctatggatgtcggcctttccacaatgacgcgatgggtgaaacaattacgtgatgaacggcagggcaaaacaccaaaagcctcccccattaccccggaacaaattgaaatccgtgagctcaggaaaaagctacaacgtattgaaatggaaaatgaaatattaaaaaaggctaccgcgctcttgatgtcagactccctgaacagttctcgataa

SEQ ID NO: 96992 - DNA, 882 bp, Enterobacter aerogenes
atgcttgatttcattaaagatatatttgcggcatttaaacaatcatcggttgaaagagtaaaaaacccattcataggtgcatttgccttttcatggattggttttaactggcaggttatcgccattctcctattcagcaatgttgatgtaattgaaagagttaagtacatcaaaaacaactatgacgtcggtggatttgttctcgcccctgccttaacagcaattgtaatatgtataattttgccggaggcaaataaactattcactaaattacagaacaaaccaataaatgaaacagttgaaattttaatgcagtccaaaatagatattgctggaaaacaattggaaatcgctgatattgaagcaaagaaacaacttgctcataaaagagaagagaggaacatagaagaaaacattgaggctataaggcgtgaattacaagaaacaaaagacctaaacgaaagtcttaaaattgaaaacattagttctaaggatgccatcaagtctgaaagggaaaacgtgtcaaaactcacaaaaaatttaacggatatacaaatctctcttagcgaggaaaagattgcaagagaaaaattactagatgaaataaatatcaaacaaagagaaataaatgatatcaaacatattaaatctcaatgggatagaatggaacctacatatctagcaaatatggacttggcaaaagaaacacttgaggataaaaatagacaaatcgcagaaataacaaagcgaggtgatgatattataaaaaaataccccaatttattccaaccggacgaggcaggggtaattatggttagacaatacgcggatgaaaaactacaagaacttgatgacgaaatgtacaaaagactatacggttaa

SEQ ID NO: 96993 - DNA, 402 bp, Enterobacter aerogenes
atgaaaaactacaagaacttgatgacgaaatgtacaaaagactatacggttaacttgcaggcggaagcattgcccggcatccagcaatggctgaatctgctgacagacagccgcaaagttaccgcgatggggcttgatgccgcccactggaagagtcatatgtccaccttaacggaaaccgctgaatgcagaaaatcgctgttgcatttctgcatctatgacgcattcaaaggctttctgattgtcgctggtactttgcagtcacctcaaagcgcagaagtcaccggagttgttaaggctccgatgacatcattatggctggttgataacgggaaattaaagttaacttatgccaaaatcaacatcagtaaaacccaggaaatgagcgttagggttccataa

SEQ ID NO: 96994 - DNA, 480 bp, Enterobacter aerogenes
atgagacctgaaacttggagtgctatagctggtggtgcgtcagcaattactgctgcgctgagcctgattgttacttttgttggtctgagatatcagagaaaaaacttgctggaagcaatgagaaaaaatgttattgatgcacttacttatcaagcagaaagggctaatgcatcttgctcagggaaaagtgattctgaatggtcatttcctgaatttgcaaacattatgttcgctattgatgcagcaagaaacatggtcgcgcggatcaatgaaagtgatggcatcagtcgtgatgaggcaaggttgtattttgttggactcctcaaccagcccatcctatcctcacttaaaaacggggagcctcccggtggtgcttataaaaataaaggcgcaatacatgaggggctcgatgttattcatttatggaaccctaacgctcatttcctgggttttactgatgttgattttggcataagttaa

SEQ ID NO: 96995 - DNA, 258 bp, Enterobacter aerogenes
atgtcacagtggaacattgcagctaaaccgaaagatgagcaggacaaggttaacgtcgacctggcagccagcggcgtcgcgtacaaagagcgcctgaatatgccagttgttgccgaagtcgtcgccagagagcagcctgaacacctacgcgactattttatggagcgagtgcgtttctatcgggagcaaagcttacaacttccgcgcgcatccgatccgcgctacatcgaaatggcagagcagaatgctaaaaaatag

SEQ ID NO: 96996 - DNA, 258 bp, Enterobacter aerogenes
atgcaaactcaagtgaagattcacggttcaaatgctaactacttctttgcatcaattgaggtttctcaaagagcgtcgaatggtggtttagtagttgtaagagatgtcaaaattccgattacaagcactacgcatcagcttctgaacaactatgcacaaggacaagtattaacacttgaccaaaaaaatggagaggttattgatgtatatttcatcgaaaatgatgaaacaaattatgtattctccagtcatccgtaa

SEQ ID NO: 96997 - DNA, 543 bp, Enterobacter aerogenes
atgagcatcactatcgaaaaaatggatgttctgtctttcaccattaccggcgctgaacgcttagaccctgtacgggtaatgattgaaaattatgagccaggaaagggaagaatcactgtcacctgctacggccaggcatggactggcgcatggtttgcgatgggcggtgacactgtacaagcgttcataaagcgcgtcagtaatgattaccttatcgggtgtttagctccccggcttgaaagctcggtagacgatgataacgacgccaaccttgaattcgttaaatcgcaaatcatcaagcttcgccgcgaacaggaaattgataggggtgatgcccgtgaaatgtggacagaggccgaaaatgcggaggatgtgaaggcgaactgctgtgattttatcgttggggacaagcttttgaatttgtttggcgacgacccttggtatgcaggatggccgtctgtacctaatccgaaatatcaatatctcgatcgcatcctgaatgcagttcgtatcggactagtagaaatggagcgtgcagcatga

SEQ ID NO: 96998 - DNA, 522 bp, Enterobacter aerogenes
atgtgctttgtgttaattcaaagcctattgcgctcccggtatttcttctgcgttatggtactcatggcgcagggagcgcacagggggcggccagtcgccgccgccccctgtacccccgggctctggccgccaaaatcgccacttcgtggtaccttcgacttatcccggcaggcttcgggtcgggccgaggcagcgtccgtgcaaaacacggccctcagcccgcatccatgcgggctgccccgaccggccgggaacgtctcagcgattttgaggccgccaacaccggcagtttcagccagcatggtgaataaattaaagacaggccgcacggaccgtggatactgttatcggtttgcaacttttttaaggttttttcccggaggcggcgcgctgcgccttctccgggctactaaatcgcacagcgctgtagccccggtaagcggcagcgccaccggcgtaacaagctttgactcagaagcgcgtgacgaacggcgcggtatccgggcgcgtaaacgtggttga

SEQ ID NO: 96999 - DNA, 783 bp, Enterobacter aerogenes
atgtccagcatatttctgagtcataattctaaagataaaccttttgtcagaaagcttgccgattcactaagaagtgaaggtcatgttgtttggattgatgaggcagaaattaatatcggtgactctcttgtagaaaaaattagagatggtctcgataaagtagattacgtagctgcgattttgtcagaaaattctatcgcaagtgcctgggttcaacgggaactggatataagttcaaaccgtgaaatagcagaaaaacgagtcatcttactccctctgatgctacaacacgtagatttacccgggtttctcatggggaaaaagtatggtgacttcaccactgatgaaaattacgagcaatcgttgaaagaattgttaaaagtgcttggcccagtggataaacatctccctattgagcctgaagatattgaagagttaaaagcacaactgcaagctgcaaaagattatgctgaagccattgcccgattacaggaacaccaaaacagctctttttcctctacctggacacctgcactcaaagcaaaggttgaagagaaaaacaagaaatttcctcaacataaagttatcaatgatgcatatgcatttaacgcaataaatgataatgttccggttacactcgattatttgctctgggcaatatcaaaaaccatgcgcaatggagctcatccattagatgctctaatgcaaatgggcaacacttatgataaagccgaagccatgattgaagcttatatggcatacttgggaaatccaaaacattga

SEQ ID NO: 97000 - DNA, 318 bp, Enterobacter aerogenes
atgatatttcagatcacgaagctctatcgctgtggccgatttattggttacgggattgctgtagaaggccaccttcttgatggtcaggtatcaacaacaatttcgactgaagtaaactgctttgccaccgttaccgctgtttttaatttgagtaacgagcaggccgaaaatcaaattaccatttgtctggacggagaaggttccgcaggagaagttgatatgatcaagcaggaagtagctgaggccaccgatcgcaatcgcaatttccgtgaagttgtggagcagttatctaagcctcagagcgatacatgcgggtaa

SEQ ID NO: 97001 - DNA, 429 bp, Enterobacter aerogenes
atggattatatacagcgaacttttgctttagcgattaaagataaaaaagattccttatttgaaaaatataactttcttaaggatgaaataattaaacactgcaaagtgtcttccttgaacggcattattattgctaatgaagccgaaggttatttaaagttagacttcccagatttagcatacagctcttatgctaagcctcgaatcgcgtttgatgaccaattgctacccggactaagaattaacttttacgacgaccgtaatgaatgggcgatgtctttaatcctcaaccacgaggggttattttctttagacgtaaagcatggcggcccttatttgacatatgagtatgatgacgaagaattgccgctggtcatcattcacgccttgttaacttctgctcaccaatcaggccgcttaggactgtaa

SEQ ID NO: 97002 - DNA, 216 bp, Enterobacter aerogenes
atgttcagcagactattagccgtatgcctgatgacgatgttaaccgcgagctgcgcgaatcgtggaagcgtcccggtggtggttgataccgcctgtgattgggtagagccaatctacctgacggatcacgacatcgacgttctggaccgccagacgaagaaagacatcctggcgcataacaaagcgtggcaggcgaactgcgagaaacaggagtga

SEQ ID NO: 97003 - DNA, 786 bp, Enterobacter aerogenes
atggcagaaccgagttggatcggaattggtggattcatagctagtgcgtgctcagcccttgctgcttatctagctattagacagactataaaccaaagaaaaacatctattaaaccgcagctgattttaaataactttgaaataaagttaaacaagctaagcaaaaataattataccgctaggccatttgaagaagtagacaattcagaacttggcccggcaattataaatgctggcttgggctctgcactcaacataaaaattgagtggtcataccctcaattagaaaaactaaactggctaaaagaaaatttaaataaaataaacaatgcattttcaataacaatttcatcatcacacggcatagataaaagccacttcaacatttctggtggtggctatacagtaatatggactcaagaaaatatccacaacatgaactacatattacctttaaatattgcaaaaaaaccagtaattgcaaacatgccattgctcattttaaacacaatgttaaatgaaacaaacttcctcgccttaattaatggaatattagacaaagacgttcaaggaccatcattaaaaataacatactatgatgttgagggaacaaaattttcaatcaaatataatagtaagttaatagtaaaggagatttctccacatctttatcataataactacagtggtacagttatttttgatgttgtagaccagagtatgactaggcaagtactacaaaggatacgtaaaagctacgcacggttcattaaagaaaataattaa

SEQ ID NO: 97004 - DNA, 693 bp, Enterobacter aerogenes
atgaaattaactagtttcgaaaatgataatgagaatgtcttgcactcatatattttctctcagcaggctaaaccccatgctgcgattgatgccttattttctgcactcctgccatttggcaagcctttcatcgtgcagccgggtgaagaattttcgctgtatacagagcagagcacccgaattgtgttactggagtccgggatcttctctatttgccgcagcgacagagggttgaatgtgctatcggtctttgccccttcgcttgcagggctgatagatagctatggcgtgacatacgatgttcccacccgcccggagcattttttgattgctgaaacagaatgccgtggtcgtgcggtctcgctggcggattttattaaagtgacggatgagtgcaatctttggcacgacgttgcccgtttccttgcctatcgtctgatggtgatgaacgttcgcgaccgggagctggttggcgttgattcttatcttaaggttcgcgcgttattaatcgaaattgccgcctacaacgacgaatatcgccagagcatcaatgttctcaattttattcaacggcgtactggaatatcgaggagtcgtaccatgaagcttctttcggaattgcgaaaaggcggttatatcaatattgatggtggacgtctgttaggggttaaaaaactaccgttggcttactaa

SEQ ID NO: 97005 - DNA, 618 bp, Enterobacter aerogenes
atgggtgggaacgaatggagccatggtgagaaagccagagagcatggcgcagatgttctctcatgcgcagataacccgtctggtgaagcctgtcagcgaggaattgctgagaataaagcttatgcaggtgcgttggcttcagcggggctaatctacctgccggggggaatgcagattactggcgcgataggcggaacggcatatgctggtattcagtatcttattaatggagaagttaatccaacggatgtgctcattgcgacgtatgttggagcttttaccagaaatacaggattaaagggaacaatgagctggaatgcggcaggtggtgcaacatccagctatctgaaaggggataatccttttacaggtggcttaattaatggtttggcctctggggtgggttatggtgcaggaaaactcattgaactgcctatggataaaatttacaacccgatgaagccatggaaagattggctgtggactgatgtcggaatggggatatcgaagccattgtcattagatccaataccaggagttgctggtaatataacaagctcaataataacagaatatagtaatgatcaggcaggtaaaaatttagggggtaagaaatga

SEQ ID NO: 97006 - DNA, 966 bp, Enterobacter aerogenes
atgacatttcccggacaattttcaaaagctctacctgattatggctttgcccgaagtttaggccttgtcagcggcgctgaaattgatttcaaagctcttgctaaccagttggactgttatcgaaactttagccaagttgggattatttattcagatggttctcgtcagtggttagtcaggccatcaagacggatcgcaacgccaaatgaaagctcggtaagccacgttgttgtaacgaaagtaaccacttcagcaaataatccagcccagctaacgacgaatgcaattcagtcatcttccttagttactgaaatcggttcaacagccatttcctgcggagcagcaattctcactatcatactttctgttggtgcaaacatggcgattcctctcaccgcaggcacctcaagtgcagttgctgctgtaattatcgctggtggcgtagcaacaggaatccaatgtgcaaatggcctcgggcgcctttcattaattgccatgaaccatgatgactatgtagcatggcttgactctcatgagtggtatacggcaaccaataccgcacttgatatgatctcgcttgccggggcaggtgctggtttaaaaagcgccatgctaacatatcgattacttaatcggtctacgtcggaaagtttactttctttattaaaaaaaatgaaccgagccgaccgtacacgattgacggaggaaattattcgaattagaaacccaggaatctctaattctggtatcaaagtggcaatgaaagctggcatctaccccaagcgttatccttcggaagcattacagatgctcttgcaacgagaattaatgaatgccattaccaactcttcggcatttgttggtagcgcgatctcgggcaccatcaggaaccctcagaatatgacacaatctgggaagtatatttttggcttaattcagtcgttttcattcactggaccccattga

SEQ ID NO: 97007 - DNA, 381 bp, Enterobacter aerogenes
ttgaccacagcgctgttgccgctctgctttttactgggcctcaacgccgcctcgctaagctggaccgttggcggtttcgttttcgcctacggggccattaacggcctgacgacggtatttaaagcaacattaccgttgcagctattcgcggcggaagattacgcgcggcgtaccggacggctgttgatcccagcgcaactactggccgccgtctcgccatttgcctatgcctggctaaatcaacatctggggatagaaaggagccttgctatttcgggtctattatcgctggtcgtactggggctggcgctgagaatcggctggctgcagcggcggcaggttgtgcggataactcagggacaaagtgaagagagggtatga

SEQ ID NO: 97008 - DNA, 1851 bp, Enterobacter aerogenes
atgcaaacttggttaaaaaaccatttcaaagatgcctacattgcccaatacaacgggcaaagtaagccgatgatggactggctcaaaggcacctctgttcgcaatatttctgggctcggtgacagtcaaattggcagcctcaaggatatttttgaatccgttgccagtcatatcttggctaatcactttgtttcattagcacccgagtatcccacttttagtcagtggatcacctatgaaaacatagaaagcgcagccaaagatgcgttaagtgttgtctccggtggcgctgcgaccaaacgagcgaatgccgtccttgacgcacttgagttactggatggcgataaaatttccccgctacaatcacgatatgcccaagctgttttatctgttttgcaaagcaagccacatggccaagtggtcaatcaggtagaactgctggaagccatcaattcccgactttattttaaaccagaaagctaccgactagagccggaatggctgctagtcctgatcgcctgtttggtttatagcggcgagcttgaattagtagtagtcggtcatacactgacagccagtgatgtcgtcaaattcaaatccatttcatttgatgtcttgaaagattttaaacatattcaagcgcccaaggattttaatgtcactgcgttaaaatccctgctcactctgttagacatgaatgacggtttagctaccacgatccagcaaggtgatgaaagcgttgtgcgcgaaatgcttaaacgtacagacctgctgatcaacgaactagtcaaggggcagcagaatgttaaagaacgtttgccgttatggggacaattagttctggaagaaagtgaagagcaaacactatcaacacaactagctgagcttaagaactttttggaaacaatccagcgctatgacaaaccaggtaaactgaaaaacctcaatgtaacggcttcagaaattacctgtttccagcaaatgcttgtggcatggcgaaattttggtctactcaaggcggcagttaacgatctgacccctttatgcacttacctcaaagaggctcagttagttctgcctgaggagcacatgtggcaagaacaagtgaaattggctcgaaatgggctaagacaaggttttgcggatccattattacgatgtgatgaaaacttcaaagcaaagcagatcactattctatctgggctaaaaacagagtatgcgaaacactatattgaactctatatccgggctcatctcaacaacagtgaagagaaaactaaatccaaactgctaagcgacgatcgtcttacagaactggatatactgagtggcattaccttactccctgcccaacagttggttgattggcgtaaagacgcagcacaattacaagcggctaagcccattgatcccaaacaattggcgatgaatgccaatccggtagatttcaatgctcgccaagaaagcagcaaggctccagcgagtcagcaattaaaaaatctggaacaacgactagagagtttacaaaacgattggcttagtaatctgaatagtctgcttgatgatccgtttattaacctcggcctgctcaagcccaatcaggcacagctaattcgcgattttattcagaacagtcagctccctgagccacttgatgcaacctttatacaagcggtaaaccaagtgctagctgggttggaagagttaataattaactcgaccgaacttattaatgccctaggaagaggcctgcctcagagccgtgacgaagtagctgagcgatttaatcgtcttctcgacaggctttgtcagggtaaagacattaataaagttcgtatcattatcgattaa

SEQ ID NO: 97009 - DNA, 2823 bp, Enterobacter aerogenes
atgaaacaagacgcattattttccagtgaaaacacactactgtcacaaacagccggtccagtaatctgtttgggaaagacctttactagcgaccaagaacgccgtgaatattttttggcattgctggctgaaaagctcaaagatccagagtttcgaaaaatagaaggttttcccatcgggaatgataaggatatattaaatctaagtgatcctccttattacactgcatgcccaaatccttggattaaggattttgttgcagaatgggagtcacaaaaatcaaaatgtattgatgaatatcaccgagagccttttgcggcagatgtcagtgaaggaaaaaatgatccaatttacaatgctcattcctaccacaccaaggtaccgcataaggcaattatgcgttatatccttcattataccagtcctggagatatagttttcgacggtttttgtgggactgggatgactgcagtcgcagcacagatgtgtggggaccgggaagttgttgtttctctgggtttccaggttaatgctgatggttctatattggaggaagcatttgacgaaaatggaaaaaaaacatggaaaccattctctaaacttggcgttcgaaaaaccattctcaatgatttatcaacagcagccacttttatttcgtacaattacaacacacctatagacattgatgaatttcataatgaagttatgaactctataaatatagtggagaatgaacttggttggatgtatgaaacaaagcacacagatggtcgcatagctaaaataaattatacaatttggtcagatgtttttatctgccctgaatgtgcgaaagaggtcattttttggaatgaatcagtagacccgcaagctgataaggttaaagaagaatttccatgtccacattgctcaattcttttgagcaaaaaaattatggcccgttcatttaacacagtctttgataagaagatgaacgtaacatctaagcaagcaaagattgtacctacattgatcaattattccattgatggaaagagatttgataagaaaccagacagagctgacattgaactaattgataagatcaatgaactcgatacaatcataaaatatcctactgcaagaatgccagaaggaaaagagtctcgtagaaatgattcagcagggatgactcgggttcatcattattttacaagaagaaatctcttagtcttctcacgtttttgggaactggcaaagagcaatcccttttactttatgcttacatccatgatgtttaaatcatctcttctttgcgctcccttaatgtcaaattattttgcagcaatgaaaggcaataatagaggcggatgggtagggaaagatagaagtggaacactctataacccatcaattcatagtgaagtatcaatattttcgcagattaaaagtcgttctaactccacggctttgaatgtgggtgcttttggtaatactgtaatttcggcatcctctacgacatcaatcgaaatggaaaacaatagtttagattatatttttattgatcctccattcggtgcaaatataaattactctgaaatgaattttttatgggaatcatggcttggtgtttgtactaacaatattgacgaagcaattgagaactcaacccaaagtaaagggattaatgaatacagagttctgatgacaaaatgttttaggagagcctatgagttattaaagccaggccgatggatgactgttgaattttctaatactaagtcctcagtttggaataacatacaaactgctttaaccgatgcaggatttattgttgcaaatgtatctgctcttgataaaaaacaaggaagtatcaatgcatatactactccaactgcagtaaagcaagatcttgtaatctctgcttataaaccaagcaatggtttcgaagaacgctttgctattgaggcagcaactgaagaaggtgtttgggatttcacccgcactcatttaaaataccttccaattataaaaaaacaaggtcaaacattaattagagtgccagaacgagatcctagaattattttcgatcaagttatctcctattatgtaagaaaaggtcatcaattacctcctttagatagtaaggaatttcaaattgggctcgttcaacgtttttcagagcgagacgggatgtttttcctcccagaacaagcagcagaatatgataagaacaaagttatatatggagcaatggggcaagtgtcactttttgttaaagatgaaacttctgctattgattggcttcgccaacaattaagagataagccacagggattttctgatttaaacccgtacttcatgcaacagctgagtgggtggagtaaaaatgaagtaatgctagatctacgtgaattacttaaccaaaattttctctgctttgatgggaaagatgatgttccacaacagatccacacttacctctctagtaattggaaagaacttcgcaatctgccgaaaaaacatcctgcattagtcgccaaagcaaaggaccgctggtatatacctgatccaaataagacaggagacctggaaaagctgcgcgaaaaatcgctgcttaaggagtttgaagaatacaaagcagctaagaaaaagctcaagcttttccgcatcgaagcagtacgcatcggctttaagaaactttgggaacagcaggagtatcttgcattgattgccgtggccgataaattgccaagtaatgtactggaagaagatcctattctgctgatgtattacgatcaagcagtaaccttgagccaaatcgatagcgatgatgagtggtga

SEQ ID NO: 97010 - DNA, 2799 bp, Enterobacter aerogenes
atgtggcaggtaggagactgggcctggagtcaggcccatcagcaatatgtcaaagtgattgatactgctggcctatggggtcagcagttttaccgtgtctggctgcagcaacaggatgtagtactcaaggtattagacactgatctccataaccagccagtacagaccattgtgacggctgatgcgttaagctacctggccactgcagccaaaattgccaacgtccagcaggaggataccctcctggcaccaatagaatcaaatgtgattcctttgccgcaccagttgaaggcgctcaccaaggcgatgagcaaaaaacaggtgcgctatctgtttgcggatgaagtaggtctgggcaaaaccatcgaggctggactggtcatgcgtgaattgaagttgcgcgggctggcaaagcgaattctagtttgtgcacctaaagggttggttagccagtgggtaagtgaaatgcatacccactttaacgagtcattccaactgatgctgcccggtgaacaaaaaccacagaatgaacatgacaatatctggtcacgttatgatcaagttgtctgtcctgtcgacagtatcaagcccattgaaagccgcaaaggatggtcactcaaacaacttaatgagtacaacaagcttcgttttgatgacttgcttgctgcgagttgggaccttatcatcattgatgaagcccatcggctcggtggtagcaccgaccaggtcgcccgttacaaactaggccaaggtttggcagaagcagctccctttctattgttattatccgctacaccacatcaaggcaaaagtgatgctttccgccgtttgatggcactgcttgatgcagaagcctttccggatgtaagctcggtcacacaagagcgggtccagccatttgtggtgcgtactgaaaaacggatcgccatcgatggtgaaggtaagccacttttttgtcctcggcaaacagaaatggttgccgttgcctggcaagcccagcatggattacagcgtcacctctatgaagaggtgactgagtacattaaagaaggctacaaccaagcacaagccaaacaacaaaatgctattggctttttgatgatattaatgcagcgtttggtgagttctagcagtgctgccatctcccgcaccctcgctcgtcgatcaaatgtattagaaaataagagggtagaagaagagttgcctttggcgtttaccgatgagtgggcggaactagatggtcaagcccaactggacgaattattagctcaatgccaaacctcattagagaatgaaaaaaacgaagtgcgccgtttgttagcgttagcggagcaatgcgtaagtgccgaaaatgatgccaaagctgaagccttactcgattggctataccgcttacagcaagaagagggagatccatacctgaagatgctggtgttcactgagtttgtgccgacccaagagatgttggcgcagttcttttttgaacgaggcatcagtgccgttcttctaaacggctcaatggatctgtcagaacgtaaaaaagtacaagcagcctttgctagtgatgcacgcattttgatttcaaccgatgccgggggagaaggtctaaaccttcagttctgccatgtgattgttaattacgatatgccctggaatccaatgcgcatggaacaacgtatgggccgcgtcgatcgtatcggccaacagcatatggttcgcgcactaaactttgtgctcgaagataccgttgagcacagagttcgcgaagtgctcgaagcgaagttacagattatcctcaacgagtttggcgttgataagaccagcgatgtattggattcctctgctgctaatcatctgtttgatgaattgtttattacatctatcactgatcctgctttgatggatcaggagttagctagagccctggccaccttaagagacggtgcagtggacaagcggcaacaggatgcactatttggtggcggagatcccctatctgctgaggactatcgccaaaccttgaaccacccactcccctattgggtacagagcatggtcgctagttacttgcgctggcaacgtagtatgcagcatccagctgattttagtgacgaaattgatgggagccatactctaacttggccagatggtgcaacatggagtggaataacctttattgggaaaatcgcccagcaacagccaagtttcacgcatctaacgctcgaaaaccccaagataaaagggctgtgtagtcaattacctgtttggagtcaagcacaacccatccccagtattgctgttaaaccactaccagccggagcgaatggttattgggcattatggagtatccgccttgtggctggccatgagcgacgctgccaatatatgccagtatatattaagcccaacggccaatattacgcaacagcatcccaaagagtctgggacgctgtctgtagtaaagaatttgagattttacctcaagacttagcagtcgattcttctttacatcagtcgatctatgctcttatgcataaggtggcacaagaggaaggaaaagctatcttcgaaagcatgttgacagccaatcagaccgatttagataaccagtttgaaaaaggtgaatactcatttaatgcaagaaaaaaagcaatagaacgagttggattaccagaggttcgccaatttcgcttacgtcaattaagtagtgaatatgctctgtggctccgggatatagataaaaaacgcagagtgattcctgacatggttttacacgccattattgaaattaaaggataa

SEQ ID NO: 97011 - DNA, 1965 bp, Enterobacter aerogenes
atgacctggcaggaagacgttattcataaagtaaatttggatggggattttgtttacaccataaacgatccagatgggctactatatgagcctgttatagcaaactcatttcaagaaaaaaatgcgttcatttttgatgatgatgacccattagcattacgtctggcctatgaaacatggcgtagtggtgaggataaaatatctttcttgattcggctgacgattgagcgtgatatgtttatacctcatgatattcaacatgagtcaaaagagattgattttcatctatcagaatttttccaggatattgatacagatatactaagattactaccagccacgttatatcagtccgtcatggatgcgctgaaattattttctccgggtaggctcagccaacagtcaagtctagatttcttattgcgccatatatatagaattgcacctgagatcatccaatccagtacggaccttgttaggctattgattagaaagcattatattggcattgaaatgccaatgccaattgaaacgagactaattcatctattgagtttagtgccgaattttggtttatggaatgtcaatcaactgatttccaataaatcttatttttttgatttccttcaaaaacaatgggaaatatacttacaagatgaagaaaagagtcatatttcctttacatctcgaccaaaaactcagctaattgtcccttttgctgatggtgatgttcgtgtttttattgataatctgtttgccgaaggcattataaaaccagtggcgataaaaagcttacctcctgaacactgggcatcatttgctgtactaaaagaacaaaaaataacagaaaaagaacgaatactacacctgcttaataatgcaaaagaaacattcaaccaatactcagaagaaagtacaaatgcagatttctggcttgagcagtcacgttctcttggtatcatgaatgcccttttctatcaaaataaaaatttgccggcagttgaagttttgtttgatgacattaaaaatattaacactgatgtagatagattatttcaacattggtttctactcaactatgcaaaaatacaaaccataccaactgttcgttatccatctatgttgcataaagttcctgactggatatcacgcaggatagattctggtaataaaatttgtttgcttgttttagatggtatgggagctcgccaatggccattattacgtaagcaattgcaaatatgcgaaaatatttcaatagaagagcattcttgttttgcttgggtgccgacgataacttcaatttcacggcaaaccttgttctcagggaaacgtccatttttgtttggtgaatccctattgactacaaataaagaagaacaactatggcttaattattggatggataaaggcttaaacaaacgagaaattaagtatgcaaagaaaattgagaactattctgtcgatgaatggcaatcattagttgggtcattaccagttaaaattgccggtttagtcataaattttatcgatgaacagatgcacggcatgaaaatggggatggctggactaaatgtaatggttgatagctggctggccgaatggaaattcaaagataaaatttcagaccttctggagaatgggtttgaagttataattacttcagaccatggtaaccaagaggctatcggtatgggaaatatcaatgaaggggtaaaagcggagactcggggagaacgagtacgaatttataataaccctagtttgcgagacagctctgctgcaaactatcaagattctgtgatagtatggcccggtcctgagatgggcctgccaaaagggacataccctttactagcctgctctgataaagcctttaaaagtaaaggggatgtcgttgtagggcatggtggaatcagcctccatgaggcaatagtgcctttcattattgttaacaaaaagtag

SEQ ID NO: 97012 - DNA, 717 bp, Enterobacter aerogenes
atgattaaaactccaggtttctgccgccatatcgagaaagaatggcttgaacaaacgctccgctgggtagctagcgaagcagatagtgtgcaattaaataaaaacctggaagtattccttggtacgtatatagcgactaaagaaaatcggcgcaaagctcgaaatttattaacctcaatttggatgcgcccaaaaaataaagatattttttttgagactggcattcaattacatcaagagattgatgcattttcattacctattcactggggaatgttaatcgcaaaaaaaccattctttgctgaggttgctcgttttatcggccgacaagctaggctaaatgacgcatttaccttttctcaagtatttcgccgaatgagtatgttatatggcgagacacaaacaactagcagagcactaagtgctgttttaaggactatgatcgagttaggggtgatagatagaagtaataaactaacatcatattcgatcgttccaattcaagaaaaagttagcaaccatatcgcaaattggttaaccatcgctgctatgatttcactgaataaagttagcattagtcttgatgaagtattagctgatcaagtgttcttcccatttcaaattgatatcaacttgaatacacttgatgtatcaacatttgaatacttgcagcaaggaaactcaatagtcgttttcaaaaggaatctttactcatga

SEQ ID NO: 97013 - DNA, 708 bp, Enterobacter aerogenes
atgaaacccattattggattcaatcgtcatttagagatggattggcttgttcaaaccgcatcctggtcggcgaatgggattcacgggcaggcattaaaaaataaaattgatagtttacttgcccctagttttgacagcaaagtagcgcaagataaaactagaaatcttctttttggcatctgggattcagaatcgaaatcggtacccaaagcttttcattccgacgcctgtaaattgctcattgaacacagcgaaataaatatagctattcattggggaatgatgcttgttaaataccccttcttttataatatcgtagtacaaattggtagaatgaccaagcatgaaggtttgttcatttacaatcaattagaacaacgcattactgaaagctatggggatacttccactatcaagcgctgtatgcaatttgttgttcgaaccttaataaatttagagttattatccaaccctaaaccaggcacataccagctgcgaaaatcaattgtgattaagcacgataaggttatcgcttggctgactgaagtatcagtgagggctcaaggaaactcaagcaaaagcatgtctgctatcattaatgacccagcctggttccccttcgacataaactttaatgaaaacagattatcgtctaatatacgactagatgttcatcaccaggctaatgatgccattattttcctatga

SEQ ID NO: 97014 - DNA, 303 bp, Enterobacter aerogenes
atgaagcttcttaatacatacgaagataaagatgaagcagaaaatgcattaactaaaatatctggagagaagagattagcaagcgagcgcgatagcacaatcgttatttataatctctttggtacgccatcatgggggaatttctataaactaggaatgtttaaccttcctgagctgcagaaaatgttggaactacgtaaagcagggcaacctattgatgtagcgaagcataatgaatacattaaaacgctcgactatgttgctcgtacattttatttatccattccaaaacattggttgtaa

SEQ ID NO: 97015 - DNA, 1257 bp, Enterobacter aerogenes
atggctctgacagatatcaaagtgcgttctgcaaaaccacaggaaaaggagtatacccttgtcgatggggatggcatgtttttgctcattcaccctaacggctcaaaatactggcggttccgctttcgctttggtggtaagcagcacctgatggcatttggggtttatcctgaaacgtcactggctgatgctcgtcaaaaaagggaagaggccaggaggcttgttgctgccggtgtcgatcctcgtgagcataggcgtgcagtaaaagaagaacagactaaagaggtcatcacatttgaatctgttgccagagagtggcatgccagcaatcaaaagtggtcggagtctcacagtgggcgtgtccttaaaagcttggaagataatttgtttgctgcgattggcaaacgaaatatcgctgagctgaagacccgagatcttcttatacccatcaaagctgtagaaatgtctggacgtctagaggtggctgcacgtctacaacaacgcacgactgcgattatgcgattcgccgtacagagcggcttaatcgactacaaccccgcacaagagatcgctggggcagttgctacagctaaacgacaacaccgtgctgcgctagaacttagccgcattcctgaactacttcatcgtatcgacacatacaccggcagaccattaacacgcttagctgtcgagctgacgttattggtttttattcgatctagtgaactgcgatttgctcgttggtcagaagtcgattttgaaactgcaatgtggacgattccgggagatcgtgagccactggaaggtgtgaagcattcacatcgaggatcaaagatgcgtactccgcatcttgttccattatcgcgtcaggctcttaccattctggaaaagatcaaaagcatgaatggaaaccgagagctgattttcgttggtgatcacgatccgcgtaaaccgatgagtgagaacacggtgaataaagcactccgggtgatgggctacgatacgaaagtagaagtttgcgggcatggctttagaaccatggcatgtagttcattgattgaatcggggttgtggtcgaaagatgcggtagagcggcagatgagtcatcaggagcgtaactctgtgcgtgctgcttatattcataaggctgaacacttgggggagcgtaggctgatggtgcagtggtgggcggattatctggatgcgaatcgggataagggggttagtccgtttgattttgctaaagtaaataagtaa

SEQ ID NO: 97016 - DNA, 564 bp, Enterobacter aerogenes
atggcatggtggaaagaccttagcaaagaaactatatcaagtattattgttgcacttgtaactggcggtggtgtcttttggctatggaaatacattaagcagttcttccattggcttatgaacatcctgaccttcccggtaacaatgcccttatggatgctcctcatcttatcaatcttactactagtaattttacctactctaggatttttaatacgccgtcgtaatgcattgaaagctacaggacaggagaagagctttttggactatacttcggatactatttttgaaatgatagtttcatgggaatggactaaaggattaggggatagagggtactctttaaggaatcttcatatgagatgccctacatgtggaggccttcttagccagtactccagcgtggactactataactatgccccattccctattatcaaatgtaatttcaaagggtgtggttggaaaataacttcagatatggaacgattaagctatggagagatgaatactagattggcagaagagattgatcgacgttgttttcagaagtttggtaattaa

SEQ ID NO: 97017 - DNA, 777 bp, Enterobacter aerogenes
atgaaaggaacttgcaagctatgccttgaagaaaaagaattaatggaatcacacagtattccaaggagctatttcaaaagattaaagaaacatagtcctcaactgatgattatacaaaaaggtagtaagcccaagctagagaatattgatccaaaggagccactgttgtgtttcgaatgcgagcaatttattagtaatgaatacgaatcctatggtactagactgcttagaaaccctcataacatacgtaaaaactcagaccacataattgttaactctttcaattacaaacggttctatctattcttacttagtattctctggcgagcgtcaatttctaaaaacgtccattactcctcggttagtggtgttcctgagtttgatgatttaatgcgacactgtatccaaagaaaagaaataagaataaataaattaagcaatttgaaaattgatagttttattaagatctgtgtatttaggctcattgatagtaccaacaacattcctgatcatgtaataaaatcagtgctaagtaattttgcatttaggcgagttgagcaagtcaatggggtctcttggttctttattgctgagggctttgctattttctacattttgtcagctggaaaagacatacacgatatccgtagaataagattgctatctcagttaactagcgggagtcatcaaaaaatttataagatagatatacccaaggattctatctttacaggcatctttaatgatctaatttcctctgctaaagaaaattcataa

SEQ ID NO: 97018 - DNA, 183 bp, Enterobacter aerogenes
atgattcaaaaattattttcagaattcagcaagtgtaacttagagtgcacggagctgaaaatccacactgacggtgccgttggggggcaagttttgacagatgcatccaacgagctgtatctgaagttttccaaagggggagcggttgacactttctccctagtttcccctagtaaggcataa

SEQ ID NO: 97019 - DNA, 645 bp, Enterobacter aerogenes
atgaacaagcgcttatctacattattaagttggttgttaggactgattttagcggtaatcgctgcaatagcatttggtaagttgataagggtcatcggtatttctaattctaccgttatatctatcactggaacttttgcaggcatgatatgcagcggattctatagaaatacgctgaaatatataaaatctgaggaatatagattaaaaataaaggaatacaaaaataagcttgatgctcaggcaagaaaagaacgcgaggaatttaaaaagaaaacaattgttgagctctatcttttaaatgaaagaaaaacctttgttaaggtaaagttactcgctgtaatgatgattttttccggagctatccttacttacttgtttaatttcaatggcgtgattatccttgtaggagcggttatcttcacattaatagaagtaaaagaaaggattttgacatatcgaatatcgaagggatattatggaaataatacgactgaagctattcaaatactaaaatttattgagagcaatattgataaaattaacaatgatggaaatggaagtcgccgtagaattttgaatgacaaagttttggataatacgtctgatgagttgctagcaaagggtgggctagatgcaagataa

SEQ ID NO: 97020 - DNA, 411 bp, Enterobacter aerogenes
atgcaagataaagatcttatcagcaaatattgcaatgcagcaatggatgtaatattttttttctatcctttgagaaccacttttggaattatgataggtggctttttttgggttgttcttcatgtgtttacgccatttctagcaactatgggaattattgttgattggatctacgatatcggttgttttataatcggtgtattaatcatgcatattaaaactattattgaagtgttcaatggtgatgctatcagtgaaaaattcggtagtgctcttagactaatagataagcgcaaagatctttctgaagaacaaaaacgtttatatagacatcaattgattagtcagcatatatctagcctatcagataaacaaattgacgatgtggaaaaacgtataacagagaaatag

SEQ ID NO: 97021 - DNA, 1125 bp, Enterobacter aerogenes
atggatctttttacgccaaagccgaacaatgtgttacatgataatttcaaatatctaatggaatttgacgagtttatcccggtgaggaatgttattgaagaatggggtgagggacttttaacaagacctcatgaaaaaggtaagtttatcaatgagtttcagactacgtttaattcttccttttgggagttatatttaaataaagtatttagggaaatgggatttcgtattgattattcaaaagagagcccagatttttgtgtaagtacaaatgataattatgtcttcaatgttgaagcagtagttgctgatcctccactaaatataacggaggaaataagtgaaaaatacttagagcaggatttcatagatgattgcactataaaacttttaggaagattaaaaaataaactcgagctctataaggggaccagtggaaaaaaacatccttattgttcattgtcacatgtacatggaaatccttttatagttgcagttgctccttttaatagtaaattttcattttcacagaataatatctcaatgaatcaagtgctttttggtattgatgaaccaaaactaaatcataatggtgaatggattgttaatcctaaaaaaacaataaaaaaaacatctggcgcagaattggaattaggtatatttaccaatgataaattcaaggagatcagtgccgtaatattttcgtctactggtatgatcggtaaggctattgtagaaagtagaattccagcttatatcaaggcaacacgctatcgtcagatttataaacatgattttaggaatggcgaaggtttggattgcttaggaaaaagccatcatcagttaagttctacccatgatgtattcactagtcgtttcattaatgggaattttgtgtgtggttcggatgttcatttatgcaagtctgaagagtatagtgagtcgatcttggatggtttacatatttattttaatccctacgctaccgttcctttagacccaaatatatttgaccattatgatataacacataatttttatgatatcgaattaaatgagtgtgttatggaacatcatgatatgtcattagtttctcggcaaatcctagggattgacaaagactaa

SEQ ID NO: 97022 - DNA, 192 bp, Enterobacter aerogenes
gtggcgatcagttcgctgcagcgggcggtatttgaacggacctggatgggcgatgaaggcaacatgccgaaaaccctgcaggaacataaagcgctatttgacgccattcggcatcaggatagcgacgcggcggagcaggcggcgttgacgatgatcgccagctcgacacgaaggctcaaggaaatcacatga

SEQ ID NO: 97023 - DNA, 258 bp, Enterobacter aerogenes
atgcacctttcccgggctacggggtctgtagccccggtaagcgcagcgccaccggggaagatggcggcgcgtctggccgaaaaacacaaaaacaaaaggcccggtcttccgactgagcctttcgttttatttgatgcctggcagtttatggcgggcgtcctgcccgccaccctccgggccgttgctgcgcaacgttcaaatccgctcccggcggatttgtcctgctccggagagcgctcaccgacaaacaacagataa

SEQ ID NO: 97024 - DNA, 1473 bp, Enterobacter aerogenes
atgagtttacgagaaaaaacagttaatggcgcaaagtggtcagcaattgcgacagtggcaagtataggaatatcttttttacaaatcacgcttttagctcatattattgcaccacatcaatttgggttgttaaccatatcgatgctagtaataatgatcgcggatacgatctccgattttggcatttcgaattcaatcatccagcggaaagaaatctctgaggttgagttatccacactatattggataaatgtcttaattggactaactgttttttccttggtgttcatattcagcagtacgattgcgcagttgcttaatcaaccggacattaaaccgcttattcaaactttgtcatttgcattcattataattcctcatggtcaacaatttagagcattattgcaaaaagaacttgagttttcgaaaataggattaatagaaacatcttctattataatcggttttgtaattactatttgttcagctctctattatccgtttgcgattacagcgatatggggttatttgaccatgtcaatttgcaaaactttgatgttcgcttcagttggcaggaaaatttataagccgagtttacagtttgaattcaaatccatatcttcaaatatcaaatttggtgcctatttgacagcggatgcactggttaatcaattaaattctaatattgctacagtgattctttcaaggacgttaggggccgtagtcgctggcgggtataacttggcatataatgttgctgtccttcctccatcgagattgaatccgatactgacaagagttttgtttcctgcatttgccaaaattcaggatgataaggaaaaattgagacaaaatttctataagttactatcctttgttggtttgataaactttcctgttttattaggtttgctggttgtatcaaataattttgtcataaccatttttggtcaaaagtggttgtttattacaccaattcttcaaattctatgtgtcgttggtttacttcgttctattggtaatccgattggctctcttttaatggctaaggctcgggtagacattagttttaaattcaatgtatttaagctatttttgtttattccgtcaatctgggttggggcgagttttttcggtggaattggtgccgcgttaggattcctcgttgttcaagtaataaatacctatttgagttactttgtgttaattaaacctgtattaggaagtagttatcgagaatatattcaaagtataacactgcctttagcgctgacaattccaacaataatagtggcttggttagtcggtaccatagatatgtctccgataccagtcattatgcttctagttcaagtgctttctggtgttgctacattcgcgataacaatagtgtttagtcggaacaaatttgtccgtgaaattaagcaacaagtagttaaaaatccaaaaatccgtcgacttttaagggcttaa

SEQ ID NO: 97025 - DNA, 957 bp, Enterobacter aerogenes
atgcatcatatggattcattaaagaaaaacttatctgttattgatagtgtggtacctcgtggaagtcgtatagtctatttggatattcctttgcatttgaatgtaggtgatctgcttatatacaaggggacagagcaattttttaaggagcgagaatataaagttttagcaaggcgtacagacaggaccagtttgaagtttgtgcaaaatactaagcatctcccctctgatgtcattattttgttacatggtggaggtaattttggtgatttatatcctcatcatcaaatcctaagagaaactgttgttcaaaagtttccaaacaataaaattgtttatatgccgcagacagtacattttaaaagtgctgaaaaaatggagcattctgcgagcatcatcagacagcataagaatttgacaatcttttgccgtgatacgagaagtcatcagattttgcgcgaaaatttttgtgataatgttattatgtgtccagatatggctcattctctttggggagtgttcccgacacagaagaaaaatgatattaaacgtgatactctttggatgatcagaaaagacattgaggagaccaatgtcggtactctttctggtattcctgacccctctaagtatgaggattgggaagatatttgtaccgataaggaccgagcttatatgaacttgttgtttaaatttgaacgcatcaataacttgcttggaagtaacattattccgacagttaatatgtgggcaaaacatactgacaaacttgttgatagagttaataattactttatggcacatgagcaggtcgtaacatctcgtatgcatgggcatatattatgctgtttgctctcggtcaaaactaaattattggataattcgtacgggaagaattcaacatacttcgatgcatggacgaaaggtgttccaaattgcgagttggtaaagatatga

SEQ ID NO: 97026 - DNA, 993 bp, Enterobacter aerogenes
atgaataaaaagacagacagaaccatatctgtaattattcctgtttataatgttagtcagtatgtattgcaagcggttaattcagttttagagcaaacttttcaggcattcgaagtcattattgtcaatgatggctcaacagataattctggagagttacttgagcaacattatagtaagatatctaatgtaactattattcatactgagaatcaaggcctgggggaggctcgtaatgttggcaccagagcagctactggcgactacatttattatttcgattccgatgatgtattagaaagaaatcttcttgaggattttaatacttcgttggataaatacggggatgtagatattttcgcattctctgcagaatcatttgtcgatgatattaatgtttctgatagtaagccaaaaaaactcccccagtattggcgcaatgaaaatgttctttatcctaacggtatttccgcctatacaggtctctccaagaatggtgcttttttcccaaatgcttggatctatatttataaaagagaattacaagttagtaatcaactttattttaagcctattatccatgaagatgaggaattcactccacggctattctttgtcgcaggtaaaaccgtagttacggaccgagtctattttcggcgtaggatgagacttggttcaattatgcatacaaagcgtactgaaaaaaatgctattggctatttagaaagtattcacgctcttgagtcactggtgggcaaagctgacggagttgcctcgaattatcttcgtgccaggatagtaagtcatctaattagtattcagatgataaagatgaataattcgttagttttttctcagtcagtagaggctgagttcgagcgtctttaccaaacttattacaacttttttttgatgttggccaaaaaaaatctctttgcttacaaagtttgccgatactttgttcgacgcttaggatacaaagcgctgctttaa

SEQ ID NO: 97027 - DNA, 1065 bp, Enterobacter aerogenes
atgaagatccttgttaccggtggcgctggttttatcggttctgctgttgttcgtcatatcattgaaaatacccgggatgaagtccttgtcatggactgcctgacctacgccggtaacctcgagtctctggcgccggtggctggcaacgaacgctactctttcacccagaccgatattactgattcggctgctgttacggcgcagtttaatgccttccagccggacatcgtgatgcacctggcggccgaaagccacgtcgaccgctctattgatggaccggccgcgtttatccagaccaacctgatcggtactttcacactgctcgaagccgcccgtcagcattatatgtcgctttctgatgagcagaagcaggctttccgcttccatcacatttccaccgacgaagtgtatggcgatctgcatggcaccgatgatctgttcaccgaaacgactccttacgcgccaagcagcccgtattccgcctccaaggccggcagcgaccatctggtccgcgcctggaaccgtacctatggcctgccggtggtggtgaccaactgctccaataactacggtccgtaccacttcccggaaaaactgatccccctgaccatcctcaacgccctggcgggtaaaccgctgccggtttacggcaacggcgagcagatccgcgactggttgtatgttgaggaccatgcgcgcgcgctctataaagtggcgacagaagggcggagtggtgaaacttacaatattggcggccacaacgaacgtaagaatatcgatgttgtccgcactatctgcgccattctggaccgcgtggtgacggagaaacccggcaatattaatcagtttgctgaccttatcacgttcgttaccgaccgtccgggacatgacctgcgctatgccattgatgcggcgaaaatacaacgcgatctgggatgggtgccggaagagacctttgaaagcgggattgagaaaacggtccactggtatctgaacaaccagacctggtggcagcgtgtgctggatggctcctatgccggcgaacgtcttgggctgaataaataa

SEQ ID NO: 97028 - DNA, 870 bp, Enterobacter aerogenes
atgaaaggtattgttctggccggaggctccggtacccgtctttatccaatcacgcagggtgtctccaaacagctgttgccaatttacgataagccgatgattttctatccggtgtcggtgctgatgctggcggggatccgcgatatcctgattattaccacgccggacgatatgccggcattccagcgtctgctgggtgacggttcacagttcggggtgaacttcagctatgctatccagccgtcgccggatggtctggcgcaggcctttatcattggcgagaagtttatcggcaatgatgcctgtgcgttagtgctgggtgacaatatctattttggccagagcttcggtaagaagctggaagcggcggcggcgaagacgtcgggagcgacggtcttcgggtaccaagtactggatccggaacgttttggggtggtggagtttgacgagaacttcagggcattgtcgatcgaagagaagccgctgaagccgaaatccgactgggcggtgaccgggctctatttttacgacaacaacgtggtggaaatggccaaagaggttcgcccgtccgagcgtggtgaactggagatcaccaccctgaaccagatgtatctggagcgcggggatttgcaggtggagctgctgggccggggatttgcctggctcgacacggggacgcatgacagtctgattgaagcttcacagtttattcataccattgagaagcgccaggggatgaaagtggcctgcctggaagagattgcataccggaataaatggctgtcggcggaaggtgtggctacgcaggccgagcggctcaagaagacggaatatggcgcctatctgaagcgtttgctgagcgagagctaa

SEQ ID NO: 97029 - DNA, 1140 bp, Enterobacter aerogenes
atgaagaaaataattgttagggtttcagcagtggcggtggcaatcagttttttggcaggttgtacaatagttccgggtcaggggcttaatagtctgcgcaaaaatgtagttgagcttccggatagtgattatgatctggataagttggtcaatgtgtatccgatgacacctggattagtcgagcagcttaaaccatcaccagtgatagctcgttctaacccgcagttggataatctcttaaaaagttatgaatatcatattggtattggtgatgtccttatggtaacagtctgggatcatcccgaactgactacaccagctggtcagtatcgtagtgccagtgatacaggtaactgggttaattcagacggaacaattttttatccttacataggtaaagtacaagtcgcagggaaaacgctaagtcaggtaagacaagaaataacaaatcgacttaccacttatattgaaagtccgcaggttgatgttagcgtcgcagcattccgctcacaaaaagtttatgtaactggagaggtggctaactctggtaagcagtctataacaaatataccgctgactgtaatggatgctatcaatgccgcgggtgggctggcagctgatgctgattggcgtaatgttattcttacgcataatggtaaagatacaaaaatatcactgtatgcattaatgcagaaaggtgatttatcgcaaaaccacctattatatccaggtgacatattatttgtcccacgaaatgatgatttgaaagtctttgttatgggtgaggtcggtaaacaaacgacattaaaaatggatcgtagtggcatgactcttgccgaagcacttggcaacgccgatggtatttcgcagaattcaagtgatgctacaggtatttttgttatccggcagttgaagggtgataaaaatggcaagattgcgaacatatatcaattaaatgcacaagatgcatcttcaatgatattaggtacagaattccaattagagccgtatgatattgtttatgttacgacaacaccgattgtacgttggaatagagttatctctcagctcataccaacgatcactggtgtatacaatataactgagacggctcgttatattaagagatggcctaattaa

SEQ ID NO: 97030 - DNA, 336 bp, Enterobacter aerogenes
gtgccactacacatcattaataatctggtgacgtataacagatggggatttagtctgaactggggctggcgacgggatcagttggctgacctggagcggatgctgtttttactcgatggcaaaccagtacctgacaaccgtggtgatatctctgtcagattgatggaacatattcgggataacccggctaaggatgcttacgaggatgagttcttcagtattcgttactttcaaaagggaaccgcgcatctgacgttcaagcgtttggagttgatagaaaggatgaataacattattgccaaatactatccagggatgttagctaagccctggtga

SEQ ID NO: 97031 - DNA, 303 bp, Enterobacter aerogenes; identical to SEQ ID NO: 94789

SEQ ID NO: 97032 - DNA, 792 bp, Enterobacter aerogenes
gtggtcacactctgccacgtgttcggggttcatcgcagcagctacaaatactgggtgaaaagcctcgaaaagccagacggcaagcgggctgtattacgtagtcaggttctggagctgcataacattagccatggctctgctggcgcgagaagtatcgccattatggcaaccctgagaggcttcagaatgggacgctggcttgccggcaggctcatgaaagaactgggactggtgagttgtcagcaacccacccaccggtataaacggggtggtcatgaacacatcgctatcccaaatcaccttgagcgacagttcgcagtgacagagcctaatcaggtatggtgcggcgatgtgacgtatatctggacaggcaggcgctgggcttacctcgccgtcgttctcgatttgttcgccaggaaaccggtaggctgggcaatgtcattctcaccggacagcaagctaaccatcaaagcgctggaaatggcgtgggaaacccgaggtaaaccagcgggagtgatgttccacagtgaccagggtagccactacacaagcaggcagttccggcagttactgtggcgttaccggattaggcaaagtatgagccgacgcggaaactgttgggataacagcccgatggaacgcttcttcagaagtctgaaaaacgagtgggtgccagtgacaggctatataaactttagcgaagcagctcatgcgatcacaaactatatcgtcgggtattacagctcgctaaggccgcatgactataacggtggattacctccaaacgaatag

SEQ ID NO: 97033 - DNA, 180 bp, Enterobacter aerogenes
atgatgaaaaaatacttagcgctcgcgctgattgcgccactgctcgtgtcctgttccagttccaataaaaaaggcgccgaatataacgaggcctgggtcaaggacactaacggattcgatatcctgatgggccagtttgcccataacatcgagaacattctggcgcacctggcgcggtga

SEQ ID NO: 97034 - DNA, 519 bp, Enterobacter aerogenes
atgctagcagctcttgctagcatttttcattttatcaggagcttaattaagtatgaacctgtctatgcgccctgtgccatcacctatcatggcgaatgggtcgtaccggaaacggtggtacaagaggattacgatatcctgttctgcgaatgctgcagactgaaaatcagcgttgttattgatgaacttacaggagtaaaaagctttgttcatacgccactgcgtctggagactgcaaaattacttacaacttgcccctacagcaaatctgcaaatctgcaaatctgcaaatctgcaaatctgcaaatctgcaaatctgcaaataatttagccatcgggagtaaacctccaaaacagactctacgcgtaacgttcactcctctacgacctgggaactcccgtcaccttccctgcaaaacgactaagcaaaattggcgttgttgctggtgccatatctgttggaatggtgaaaaggtatgcccgcaatgtgaagattggatctataccattagcgcgtag

SEQ ID NO: 97035 - DNA, 681 bp, Enterobacter aerogenes
atgtctaacttttttcgttttccccatactccgcatttggcatggcttagcgagcgaagcgcccgtgaggacaaagttttatcagcacatgaagcaaaaacattattaaaaggtattgtaacagttgaagagaagattgatggggcaaatttagggatatcacttaattcttctggggaaatacaatttcaaaacagaggtgaatatctttttgaaccgtattcagggcaattttcgcgcttatcaggatggttacggcaacatgaatacgcattaaagaaaatattacgaccagaaataatattatttggcgagtggtgtgctgcaaaacattcgttagaatatactcatttagaggattggttcttactattcgatgtgtacgatagaaatttaaagaaattctggagtattgaaagacgtaatttgattgccaaggatgcaggtttggcgcatgtgccaaaaatttatcaaggttgcatttcaataagttatgcgcatgacatactttcttcttcaaaaagcaagtatcgccttggtaatcctgaaggaattatcatcagaaaagactctgaacattggaatgaagtgcgagcgaaattagttagacctgacttcagtcaatctattagtgagcattggcgtaagcaatccataacttggaataagtgtattgaataa

SEQ ID NO: 97036 - DNA, 528 bp, Enterobacter aerogenes
atgagagagcgttatgttgtggacactaatgtcctaattgctgcgagcgccggagatccccaccgaaatcgtgaaattgatgccacaccagcggatgtgaatcttcgagaaatagtgtggaattggctcacagaatttgaactcagccccgcgaaaatggtattggatttcgaggggaaaattgcagatgaatatgaaaaaaatctcaactttaatgattatggtatacaggtattaatgaaaaaatatagcacctgcgctatggagcatgtgaatgtttcgtatgatatcaatggtgatggcgaattgcccgatactcttattggagctattcatgatggggcagaccgtaagatggttgcagcagcactagcatcacatgcaagtcatggggatggatgtgtggcttttgccggtgatacagattggcatgattgggaagagattctcacacaacatggtatcataatagagcctgttattgaggcgtggtcccgccagaaacatgcagaaaaacaacaaaggtag

SEQ ID NO: 97037 - DNA, 1284 bp, Enterobacter aerogenes
atgtttacacgcatcaggttacgtaacttcaaggtatggaaagatactaaagacatttcattaaaacctgtaactgttctacttggtactaattcatcaggtaaatcaacgctgattcaaagtcttttgttactaaagcaaacagtacagtcaccagaccgaacagttcatcttaatcttggtggagatgaagttaatgatttgtttgattttggtggtttcagtgatgtattgaatcaagcggcccaaacacccagacaattttcaataagttttgatttctatcgtgggaaaggccgagttgaggaaggtaagttcgattgtgtctatggacagacatcttcaggtggtgtagccatacagcagctagctttagctactcagaatcgggaatttaaagtagttcgccgtgaaaggggagcattctccgtaacggtagataatgaaagcaaaccgcgtgcgaaggggcgacattatgcaccagaacgctccgtatccttttcagcagacgctgtaactgctttagataaagacggggagttagtggaggatcttagtcttgccatccgacgcgagcttgaggaaatcagttatcttggcccccttcgacgcaaaccagaaagagattatccctggaataaaacaaaacctggagatgttgggagtgatggccgaggtgctgtagatgcattgttggcaagtgctttactgccaggaatagaaaaaaatcaaatcgttgacggtgtatctaaatggctaaaaaaaatgaaagtagccgataggcttgaggttcgacaacaaggtcgctctaatcgttacgagcttttaattcatcgagatgggttagtttgtaatttacgggacgttggaattggggtttcccaagttcttcctgtattagttatagcatattttagttcaccgggcagcacagtcatattagaggaacctgaaattcacctccaccccttggctcaagctgttctggccgaattatttatatatataagtaagcatcgtcatgttcaatttattattgaaactcactctgagcatctatttcggcgtatgcaaacacttatagcaaagcaagaagttacaccagaggagtcttctatgtatttcattgaacgtaaaaaaagttcagcagtattacgttccttagaaatggatgattatggtcgagttcagaattggccagaagggttctttggcgatgcacttggggaaacccgcgaacaagcccgcttgatgtttgaaagacttaaaaaggaaaaagcatga

SEQ ID NO: 97038 - DNA, 519 bp, Enterobacter aerogenes
atgattggtcaaaacatccatactacaatcgtatcctctacttacgatctgcttaaggaaaccgactcagcccttttgagattgtgtgacctggctagctcgctggtgctaatcgtaaactcaactgaacaaggcatatttccttctcatctgtcagaagagataacgctgctcgagctatctgaagagctatgtgaacacttgctaccgctatcacgtggtgatcgatcccgtaaggcaccagatatcctcgctaaaatgctaaattgcatagtatctgaagtagtatggattgacaggattcaaattctatttgagccatctctagaactagatcctttgcgccagctacaagagctagcgcgtatcaagcctatcatcgttatttggcctgggcagcttacagaacaatttttaaccttttcagttccgggaagggccgattatcaatcttacacagcgaatgaactggcaaatctgccgatcattcactttgttgagcagagggaatataaatga

SEQ ID NO: 97039 - DNA, 1035 bp, Enterobacter aerogenes
atgaacacggtcagggttgttggtatcgatattgccaaatctgtttttcaggtctgcgtctggatgaatgatggctccgtcgcatggaacaaaaaaatctctcgttctaaattgctggatactatccgacagtttgaacctggaacccttgttgcgatggaagcctgcgccacttcgcatttttgggggcgaaccttcgcatctatgggctattgcgtcagactcatccccgcacaacacgtaaaagctttcgtccgtagccagaaaaatgatgccaatgatgcgctggcaatttgcgagacagcatttcgcccgggtattcactttgtttctgtaaaaaccacagaacagcaggatatcaaggcgcttcggaacacacgtcaactgatggttgagcagagaacggcgctggccaaccagcttcgttctctgctcgctgaatatggtttcactattcctgtcggaatcctgcgtctccagcaacagctaccggagctgattgaagatgcctcaaacagcctgacatttactcttcgtcgactgttgtcttcgctgtgggaagatatgcaggcattaaatgaacgaattacccgtctggacagcgaaattgcggcgctgtcatcacaacaaatcgcgtaccgccatctattaacaatcccgggcgtcggtcccctgattgcggcagcgtttctcagcgaagttgatgccacacagttctcgagtgggcgagaattatcggcgtggtgtggactggttcctcgccagcacagttcgggcggaaaacaacgcctgtcttctgtgactaaaaatggcaaccggagtctgagaactctcattattcatggtgcgcggtctgtaatgcgctgtgtgaaaaagcgcgatgacagtctgagtatttggctgcaaaggctggaggcccgtcgagggttcctgaaaaccacggtcgcgctggcgaataagctgacaagaatcatctggcgtgttttgaccgatggtattgattttaatatgcagaaggccgttgcgatgaattaa

SEQ ID NO: 97040 - DNA, 195 bp, Enterobacter aerogenes
atgcgggagttgcctgccgtatgcgcaagcaactctatcgtcattaaatacagaaacaatattctctatgaatcctggttgtggaatcgcatcctgagtgagaaaaattaccacatcatactgattatttactctttctaccgcaagatttcttgttccgccatggttgaaatcatggcctgcaatagtaagtaa

SEQ ID NO: 97041 - DNA, 414 bp, Enterobacter aerogenes
gtgttcggcgactggagcgccgccagcggctggcaaaaaacctttgagttgctgcataaaaacccgaaattaagcgcgatcgtggtcgccaacgatcagatggcgctcggggtgttaagcgcgctggcgcagcttaatcggcgcggcagccaggcgatttcggtgaccggctatgacgatacggccgatagcctttactttcagccgccgcttaccaccgtcgcccaggattttgatctgttaggccgccgggcggtggaattactgatgcagcagatggcggcgccgaccggtagcctgcgcgaactgctgccggcgcggctggtggtacgccagtcgacgtggccgctcgcggcgcaggacaataccgcgccgctgatcgctgaactcaaagcgctggtagagaagctatga

SEQ ID NO: 97042 - DNA, 1110 bp, Enterobacter aerogenes; identical to SEQ ID NO: 96978

SEQ ID NO: 97043 - DNA, 804 bp, Enterobacter aerogenes
atgacaatccctgcatttggtcttggcactttccgtctgcaagacgacgtagtcatcaactctgtaaaaatggcgctggagctgggctatcgtactatcgataccgcacagatctatgaaaacgaagccgctgttggccaggctatcgcggaaagcggcgtgccgcgtgatgaactgttcatcaccaccaaaatctggatcgaaaacctgactaaagacaagctgatcgccagcctgaaagagagcctgcagaagctgcgcaccgattatgttgatctgacgctgattcactggccgtcgccgaacgatgcggttgctgttgaagagtttatggctgcgctgatggaagcgaagaagctgggtctgacccgacagatcggtatctctaacttcactattccactgatggaacgtgcgatcgctgccgttggcgctgaaaatatcgcgaccaaccaggttgaactgtctccgtacctgcagaaccgtaaagtggtcgattgggcgcgtgaacacgggatccacatcacctcttacatgacgctggcctacggtaaggcgctgaaagatgaagtgattgcccgtatcgcggcgaaacataatgcgaccccggcacaggttattctggcgtgggcgatgggagaaggttatgcggttattccatcttccaccaagcgtgaaaatctggcgagcaacctgaaagcgctggatctgaagctggatgatgaagatcgtaaagcgattgccgcgctggattgcaacgaccgtctggtaagcccggaaggtctggcgccgaagtgggattaa

SEQ ID NO: 97044 - DNA, 1197 bp, Enterobacter aerogenes
atgaaaataaaaaaaacactttttataaaaatatttatatatttaatggcattgcgaagtccattaatacttgtcagcatgttttgctacatgatctctacccgcgatttgattaaaaaatttgttattaatgcacttcctttttgtttgtttttagttgctgcgatcctatattccttagggaatttaaacgcagttgataatgttcttggtgagtcgagggatattctcttatctgtgtttgttgctgttttcttattatcctgctgtgatgtttcagatgataatagaaaacttatctacaaaactttgaaagcgacatttgtttttatcgcaattgtaaaagttttgatattgatattttccgtggtcactggtgtcccaatgccattaatcatatcgtggattcgtgactcctggaatatacaaatgatgtctttgggggtcgaagggacatttctggctcgcttacaaatcccattagattcagcggttccttttttcttgtattttgttactaaagaattaatttttaccactgaaaaaaaataccgcgtgataacggcatttgtttttctgttaatatcaatgttacttacgctatcacgagctttttgggctgagacaattttatttgttggactggctattctttttgaagcaggtataattcgggcatttagaataacattagtgtctgttattacaactacattattactgctgctgacaccgcttggcacattaatctttaagctaattgataccaggtttggcaagacaagcatggcaaactcagcttctgacttagaacgagtttggcaaaaccaaatgttatataattcctttattgattcgcctgtctttggtcatggtttaggatattttataccaaatgcaatgcgttctataactacgccatatttatatgagagtcagtcgttatcaatgcttatgacattaggcgtgctaggaacgctagtgttattcctgttatatgtctttctctgttttaaaactatctacaatgataataatggacgtttgaaaattatagtgcctgctatttttctagttatgtgggttttttctggctccgttaaccccttattattcggtgcttcaggtggtgtgataatatttttaacagcaaaaacatcatctttatacaaaagagacgatgcccaagatctctga

SEQ ID NO: 97045 - DNA, 1509 bp, Enterobacter aerogenes
atgaaagtaatagataaaaaatgctcatcatatctttcaattcttacctttttgtattgcatacctacgtttgcttatgctgatgtaaatgctgaccataaaacttatcaaattgaaatattaaaaacacgagaagaagtttcagcgaaagaagctgattatgtatataaaaaattaatgcaacgaaatttgcagcagcagatagcgaatcgggatgataatactcaatttggattgcatggaatggaaattccagcagtaaatgccaatggggatctgacaaaaataaatcaggcatattctttactcgcgcgggcaggcgtggattctttacgtagttttgagacagcatggcatcgcgtgagtgattcttctgggaatccaacaaatttcacgcaacttgattttcagttgaaagaagcaaaaaagtacaatatgtcgcatctatttgtttttggttatccgccagccaaatatacagtggcaaataataagctatcagctgtacaatcaaaatattatgataaatataaagattatctccatgtaaccttgtccagacttaaaggttataatgttaaatatgcagaattagctaatgaagttgatgcaccgagcgtatggtggatgaaatccacgcctgagcaatatgttcaggaaatgaaaatgttaaaagaatctattgctgcattggggttgccaataaagacagttgcttttgctgcaacatattcaagaaatagtctattaggtggaatcacaggcggaagaagatttattgataaaagcttccaactgggaattgatcagtacagcgatgcatattctattcatcatttctcctatgggaatgatgatttacccggttatatgagaagtgtacaagcaaaacatcacttatctaataaagaaatacttgatacagagcagctggatacagcatcaacaggtagatttcagtcaaacccttacgatctcatcaagttatttgcaagagggttttattattatgacatgaaacgagttgattattttatagctaaagatagatatttaaataataaactttactactttggtctgttcgacattgattggaacccgaagttaagattattagcatatgctatggcggtagattcaatgaaaggtcgaactcttatcggcatttatcaaccttcgaaaggagttgaggcatatgtattaaaatcaaaagaagactcgccgactaaatactccataatagcatggttgaatgatactgggactcagtcaaataaaagtgtactcctggaagggttgtccgggaacgctgatattgagcattggaacttggatatagctaaaaatattgatttgaccaaaggtgttcaaattgataatcgacctatcgcgatttatacgaatcagttaccttcgtgggttaataataataaaatgaagaatgcactttacgctgacgaaagtcgggcacttaaaagtcatgctcctatgcctactgataaatga

SEQ ID NO: 97046 - DNA, 840 bp, Enterobacter aerogenes
atgtctcactcatgtgtcgtaatcattgttacatataatagccaaaagcatatacagtgggctcttgatgggcttgaaacatcaataaataaactcttagtaagaatagttgattctggctctactgatacttcttatttagatgctttaaagacaaaacatgaactgatcatagagaaacatgataatgtagggtttgtagcaggcaataacttagcgattgaaagatcaggaaactctgaatggatattgctattgaatcctgatgcaagaattgaagggtctgatttagataaattactcgacattgcaggcgataaacgaaataaagaagtcgcattattttccgtgcccttggttcgatttgatataaatacaatgaaatcattatctgtttatgattcattgggtatacgatgcaattcctacggtaagtggtacgatattggcactaatgaaactatcaaatctcccccatcggagttgcacagtaacaatatcgatgccatttgtggtgcttttatgcttttacgtactaaggctcttatccaatgtactgacaaacagggaaatgttggctttgaaagtagctacttcatgtataaagaagatattgagttatctatgcgtttacaaaagaacaactggggtattaagctcatagacaacttaaatgcatatcattgtcgaggttggaatccttcaagaagtaaaataccttattgggctcgatatcattcagccataaatgatctcgatctctcaataagatataaaaaaagagcctttccttatgcgctaactaaatacttatgggtcaaattcatcgagaataagtaa

SEQ ID NO: 97047 - DNA, 858 bp, Enterobacter aerogenes
atgcatagcagaacgccactggtaagtgtttatataacaacctgtaaccgcctggaaaaactaaaacgcgcacttcgttcggttaaagaccaaagttatcaaaacattgagataatcatttgcgatgatgcttctgctgatggtacccaagcatatgtagaaggactgattcgagaagacgctcgtattcactatttccgcaacgacacaagtaaaggtgcttgtgctgcgaggaatctaggtatttttcacgcgcaaggtgagtatattaccggcttagatgatgatgatgagtttttgcctgagcgtatatctcagtttattgaagcttgggataacaagtattcattcatctgttgtgactttattgaacgattttctgatgggaaaaccaaaaaatattataacacgaacagtgttgaaaaattaacatatgtcgatatgttattcgataatgtcgcatcaaaccagatattcacattaacagaaagattgaaagctataggtggatttgacattagagctagaaggctgcaggattgggatacttggctaaggctttcgcataaatttggtgagtttattcggttgccaatagcaacatatataatgcaccatgatcatggtatagatgaaaaaagagtctccaaaagttaccccttgagttcatcgcttattgatttaagagatcgaaataaagatatatatattgatgaacatttgaaatttatgaactttataatttcaaccgaggagaaaaaggcaaagcctatcgattctattatatggagtattaaaagaaaaacacctaagtatatgattaagtatgcgcttcagtctttttctggtaataaataa

SEQ ID NO: 97048 - DNA, 909 bp, Enterobacter aerogenes
atgaaatattatatagcaataccaacatacaatggtggcgaactttggcaacaggttgtcgataaccttagaaaaaatgcccctgaaaatttattagtgcaagtaattgattcaagtagtaaagataatacgccacaaattgcggaagaagcgggatttgatttacttactattgcaggccatgatttcaaccatggcggaacaagaaatcttgcggtagaaagagtaaataatcagtatgatgtggtaatttttctcactcaggatgcgattccacaaccaggattcatagagaatattgtttctgtatttaatgacgatagagttgcttgcgcatacggcaggcaactcccgcatgataatgctaatcctttagcaacacatgccagaatgttcaattatccttccaaaggatatgtttgtagtgcagaagatatacctgagatgggattgaagacagttttcatgtctaattccttttcagcatatagattatcaatttttaattcgctgggaggttttccttccgacacaatcctttgtgaagatatgtattttacagcaaaagctattctgaatggatacagagttgcctatgtagcaaatgcgatagttaaacactctcacaattacaatgcgattgaagagtttaaacgctattttgatataggcgtgtttcataaggatgaagcatggataagaaataaaataggcggcgctgggggcgagggtaaaaaatttattttatctgagttttcgtttttattgaaaaaagcccctttgtggattccgatagcttgcattaataacttaatgaaaataataggttataaaattggcttgcagtatactcggttgccgaaaaatctaatcaagtccctcagtatgcataaacgttactgggggtaa

SEQ ID NO: 97049 - DNA, 1065 bp, Enterobacter aerogenes
atgaagatccttgttaccggtggcgctggttttatcggttctgctgttgttcgtcatatcattgaaaatacccgggatgaagtccttgtcatggactgcctgacctacgccggtaacctcgagtctctggcgccggtggctggcaacgaacgctactctttcacccagaccgatattactgattcggctgctgttacggcgcagttcaatgccttccagccggatatcgtgatgcacctggcggccgagagccacgtcgaccgctctattgatggaccggccgcgtttatccagaccaacctgatcggtactttcacactgctcgaagccgcccgtcagcattatgtgtcgctttctgatgagcggaagcaggctttccgcttccatcacatttccaccgacgaagtgtatggcgatctgcatggcaccgatgatctgttcaccgaaacgactccttacgcaccaagcagcccgtattccgcctccaaggccggcagcgaccatctggtccgcgcctggaaccgtacctatggcctgccggtggtggtgaccaactgctccaataactacggtccgtaccacttcccggaaaaactgatccccctgaccatcctcaacgccctggcgggtaaaccgctgccggtttacggcaacggcgagcagatccgcgactggttgtatgttgaggaccatgcgcgcgcgctctataaagtggcgacagaagggctgagtggtgaaacttacaatattggcggccacaacgaacgtaagaatatcgatgttgtccgcactatctgcgccattctggaccgcgtggtgacggagaaacccggcaatattaatcagtttgctgaccttatcacgttcgttaccgaccgtccgggacatgacctgcgctatgccattgatgcggcgaaaatacaacgcgatctgggatgggtgccggaagagacctttgaaagcgggattgagaaaacggtccactggtatctgaacaaccagacctggtggcagcgcgtgctggatggctcctatgccggcgaacgtcttgggctgaataaataa

SEQ ID NO: 97050 - DNA, 468 bp, Enterobacter aerogenes
atgtccgaagtcagtgcaaattttcatggcgataaacgcctgccggttaccgtactttcgggatttttgggagcagggaaaacgacactgcttaaccatattctgaacaaccgggaaggccgtcgtgttgctgtcattgttaatgatatgtctgaggtgaatattgatgctgcccttgtgagggaaggtggtgcagaactctcccggactgatgaaaaactggtagaaatgagcaacggttgcatttgctgcacattgcgcgaagatcttcttctcgaagttaatcgtctggcaaaagaagggcgttttgatcagcttgtcattgagtccaccggtatatctgagcctctgcctgttgctgaaacatttacctttgcgggcgatgacggtgaaagcctttcgacggtggcccgccttgacaccatggacgcccttctaagagtcaagctgttatcgggatactgttga

SEQ ID NO: 97051 - DNA, 1077 bp, Enterobacter aerogenes
atggttgataaagttaccgaagctgccgttgtgggtggcgtggatacacataaagatttgcacgttgccgctgtcgtagatcagaacaataaagtccttgggactcagtatttctccacaacacgacaaggttaccggcagatgctggcatggatgacctcgtttgggacattaaagcgaattggtgttgagtgcacaggtacctatggttccggtttgcttcgttattttcagaacgccgggttagaagttcttgaggtgactgctccagaccggatggagcgacgcaaacggggtaaaagtgacacaattgatgctgaatgtgccgctcatgcagcattctcaggcatcaggacagttactcccaaaacgcgtgatggcatgattgagtccctgcgggtattaaaaacttgccgaaaaacagcaatatcagcccgcagagtcgctctccagattatccattcaaatattatctctgccccggatgaattacgtgaacagctcagaaatatgacgcgcatgcagctcatcaggaccctgggttcctggagacctgatgccagtgaataccgcaatgtaaccaacgtttatcgcatttcattaaagtcccttgcccgacgctatctcgagttacatgacgaaatcgctgatctggatgtcatgattgcggcaattgtcgacgagttggcacctgagctgattaaacgtaatgctatcggatacgaaagcgcttcacagttgctgatcactgccggagacaatcctcaacggttaagatcagaatcaggatttgcggcactgtgtggtgtcagcccggtccccgtttcttctggaaaaacgaaccgttaccgacttaatcgtggtggagatcgtgctgcaaatagtgcacttcacatcatcgccatcggacgcttacgaactgacgcaaaaacaaaggaatatgtcgccaggcgtgtagccgaaggacatacaaaaatggaagcgatacgctgtctaaagcgatatatctcccgcgaagtttacacgttactgcgcaatcaaaacaggcggatcaacagtatcccgataacagcttga

SEQ ID NO: 97052 - DNA, 1383 bp, Enterobacter aerogenes; identical to SEQ ID NO: 74989

SEQ ID NO: 97053 - DNA, 918 bp, Enterobacter aerogenes; identical to SEQ ID NO: 89555

SEQ ID NO: 97054 - DNA, 447 bp, Enterobacter aerogenes
gtgagcgacaaagatatcgagcaacaaattcagtccaaaggcttaaccgcgccgcgcgttacgctgagcgattttaaagaaaatatcgtcaacacagagatcgttaaacacgtttctgttacaggtcaggtactccgttgggccgttctgaccacgaaaaacggttttgctgttactggcaggccatcatgttcagcttcttcagaaaacgataatgctgtaattggtgaacagatcgcgatagaaaacgccgaaaatgaattgtggccgcttatgggctatgccctgaaacagcgtctgcatgattcaggcggtcatatcgaagaggaaaactttgaacatttccttgcttattctggtttccacaatgaaagcgctgaagtgattgagaagttgcgaaaagcatattgcgatggcggctacgcgcttcagtggaaatctgaataa

SEQ ID NO: 97055 - DNA, 1251 bp, Enterobacter aerogenes
atgaataaatcgtataaaattatttggaacgaatcattgcaggactgggtcgttgcaggagaatttgccgctggaaagaagaaaaccaaaacgtcccgcctgattcgcgcctgggcggcaggcctgcttggtagtgcttcgctgatatcttcctcagcctttgctgcagatagggaggttacgccttttacccccacctctgacaccattgttatttccggcaacgataatctgatccagggaagcggaaaagggtttgctgagctgctggggaatgatatcggatttcgaaatatctccgttaaagacgcctttgaacaaggaattttgaccaaaggtactgaatttgtgaatgcgtttaatgtccagcagggtgggctaagcgatactacaacagttatcgaccctgttacgggtaataaacgaacgattaacgtgttcgataatgatgacatgtttacaacttctcttgccgattttacttttgctaaccactatgatgttggtccagagggtcagtatgtcgataaatttatttacgatatttcctctgattcgacgctaaatgtcgatgtcggagacaaatcttcagagtgggtcaataatccggctaactttgtcaatatcatcatgaagagcagcggtaccgagtcaaaatttacctcggcggtttataaagttgaagatggcgggacgttaaattacaacgggaaaacgattgtctcgctgggaaatatcgccagcataggtagtaccactccacgttctgtggccggttttcaggtccctgtagggggaaccattgactctaaaattggctcattcaccattaataatctggatgacattaaggcctataacactgcgctgattaaagcgctgcaggaaaatcgtctctcaccagcggattatgaatccgagttttacaaggcgctaactccagggtctattgaagcgattgacagcgtgagtgcaggtgacccggttgttcagacaattaataaaaatcgggttgcctatatttatgccactggcccgggtgctaaggtcaatatcgccgatggcgccaatattcagacgttccgctctgatgctagtttggtccgggttgagaatggggcacagctgaccaactctggggacattggggctttctacagcaatatcaccagcggcgggtatgttatttcggcggacaacagttccgtccataacatggccaccggcgtgattgatgcgggcactaactag

SEQ ID NO: 97056 - DNA, 843 bp, Enterobacter aerogenes
gtgacgcccaacagctggctcgctgtgccggtcacgttattcagattgccttctacggtatcgatagctgccgtatgcgtatcatcatttgcctgcggttcggaatctgaatcgctatcggagtccgagtcgctgtccgaatccgagtcactgtccgaatcggagtcactgtccgaatcggagtcactgtcggagtcgctgtccgaatccgagtcgctgtcagagtccgaatcggagtcgctgtcggaatcggaatcactgtcggagtccgagtcgctgtcggaatccgagtcgctgtcggagtccgaatcgctgtcggagtccgaatcgctgtcagagtcggagtcactgtcggagtcggagtcggagtcggaatcactgtcagagtccgaatcgctgtcagagtcggagtcactatcggaatccgaatcgctgtcggagtccgaatcgctgtcagagtcggaatcactgtcagaatcggagtcactgtcagaatccgaatcgctgtcggagtccgaatcactgtcggagtccgaatcgctgtcggaatccgagtcgctgtcagagtcggagtcactgtcggagtccgaatcgctgtcagagtcagaatcactgtcagagtccgagtcgctgtcagagtcggaatcactgtcagagtcggagtcggagtcgctgtccgaatccgagtcgctgtcagagtcggagtcactgtcagaatcggaatcgctgtcggagtccgcatcagcatcactttcgtggccgccaagatcggagtcactgtcagagtccgagtcactgtcggcatcagagtcagtatcatcgttcgaagaatgcgaggagtga

SEQ ID NO: 97057 - DNA, 144 bp, Enterobacter aerogenes
atgccattgaggaagattccaaaccctaataagccaattgagttgttcttcttcttctttacggagcatagcttgggcagcgagatattcctgaattgtgagatgaaaaaatcccaattcatttggagaccgttcaatcattaa

SEQ ID NO: 97058 - DNA, 339 bp, Enterobacter aerogenes
atggcaggttataagaatgtttatgctgcgaacgctaaagtacgacactcgcataattacactccaattgaagagtttaagcgatattttgatataggagttttccatacggatcaaccatggatacgtgataattttggtggtgcaggaggagaagggactaaatttattatttctgaattaaaatttctaattgctaatggtatctcatggttgccgctggcgatgatcaacaattttatgaaaatcgtaggttacaaattggggcaaaattataaaaaattacctaaggtgatcatcaaaaaatgtagcatgcataagcgattttggaaattttaa

SEQ ID NO: 97059 - DNA, 1212 bp, Enterobacter aerogenes
atgccttcagaatctatcatgcgagtgacctcaagtatttttgtagaaactaagcccttgattcgtacttcaggtctcattgcgaggtgtattgcaattcagcattatccagatgattttttattgtttaaacagatgttgtgcaaggaattagcctcagtaggcatggtttatgaaatgcggaggcgtagcgcatttgctgctttattatttctaaaagagtacgattactgtgcggagtatctaagccgagaacaggggtcttccatgcattggttatttgatcataagcatgaagatattttatcagctcggatcttatttgaatcttgggatgccttaaaaaacaacaaatatctttctaataaagatgttaaaatatcatggtctaattttattcatgatggaactgctagaggaagtttaaatgatagttcttctagaggtcaacttgttgcctgtttgaaaaacatgtcaattaaagaacataattctcaaagcctttttttaatggccgatcttcttcctgcatcaaacgaattacgagattgtttggtcgagataatgagtcagcaaggaaatatttcttattatgttgaagaagaaaaaatagctattgctcaaagtatttatgcagaacaatttcatggtgatgctgaagcatataatgctttggaagagatctggaaatctctgaaattagatgaggatattcattcggaatatttatttaatgtgctttatgccttggctgttggatggccaaattcaaaattagttcaagcttacgttcaaataactgagcagccgaaagtatttttacatattgctttaatactttgtggtgtgacgggagatttagaaagagcacaggaatgtatagatgcgataataaaggaggctttacatgtaaatcatcctttcctctctttatacatagaggcacttaacaaatggtcatatacagagtcagctgatattcttttgcaaaaattccttaaaggggagatgtcttcacatttcattactgccttgaaattacttacatctactgggcgcgcaagcgaagaatttcgcctaaatatggttggttattttaacaatcaatttaattccgatgcgataattaatgaaggtgtcgatatttttaatggggaagttgtttcagttatccagataattgtggatgaatgtatgctaatgaccctttaa

SEQ ID NO: 97060 - DNA, 495 bp, Enterobacter aerogenes; identical to SEQ ID NO: 39180

SEQ ID NO: 97061 - DNA, 519 bp, Enterobacter aerogenes
atgtcagtcagggcacaaagagcagggaaacgtaaccagtctgaaagaagaatcgaactgataaatacattatgggaaggggaggaaattgaaacatgggatcgtaatgaccgacctcgaaacgatggcttcataacagtacctcgttatcttccattactaggtgttcttatggatgagttatcaaagggaagcccactttcaagtacctacctagcgttgtggttcagggtttcagacgaaggcctgattgagataagggataagactgtgctggctttagaatcaggctttgccagtggaaggggggtaacaacatggaccgggagaatgcggaaattaaaagagctgggattcatatcatgccgggaaggtagctccggtgagttccacaacgtgttgattgttcatccgctggttgcggtaaagaaactactggatgaagggaaaataacgaaagggaaaacctataacacttttgctgaacgggtaatcgaggtgaagtcctcatgggagtaa

SEQ ID NO: 97062 - DNA, 354 bp, Enterobacter aerogenes
atgattacccaattaaaaggccgtaaaatcgcactggtgagtttttgttggtatgaattgatatgcacacaaatgaatggcaatcaatttagccaggaaaagaaggtcaaagggtcaaaaccatccatttggagtattaccgaaggagaagtcatcatggcgaccattaatctatcactactggaacatgactgcggcgaagccgcccgcgaagctcttctcagcggcgttcctgtctattacgccgatgagacgacaccagaaaactgcgttatcaaagaatatccggatggccgaagggaactggtgagcttcatgactggtatggagaaactcgttggggctaatacatga

SEQ ID NO: 97063 - DNA, 420 bp, Enterobacter aerogenes
atgagtgaagaacagcgccggcgtggcttcatgaaggctgaggcaagcctcagactggaaggtatagatcccagtggaagcccccactacgagtcggttaaagcgagaattatttcgggtgagataacctatgatcagggacgagctgaaattctggctttccataccgggaagcgtgcggagccgacaactgcgggggaaatgctcgcagaggaatttttaaaacctctgaacatgtctcagggtgaactggcgcaggctacaggaattcctgagcatcatatcgatgatattatcagtaaccgccgtcgcctcagtgctgaggagtcttacaagctggccgaacagttccagacagataaagatttctggctcaacctgcaggctttgcatgacgcatggctgacgcaccagaaatag

SEQ ID NO: 97064 - DNA, 549 bp, Enterobacter aerogenes
atgtttaaacgcagcgcctatgaacaggccgccagtacctggcagaccatcaaaaatggcctcgatcgtcgtctggtgcagctgaaaaatcgacttggctttgtcagagactacatgcgtaagtctggcgcttatgaaatgtctacgccgggagaacggctggccgaccagctggccgcgaaagaaaatccgatcttggctgggcagataaaatcgctcaatgctcagaagaacgcggaagatatggctgcataccgtacccgcgtacagtcccgcaaacaggagaaagctgatatgaagctggaaactatcgaagaactcaaacaacgtggtgatgcccggagagataaagccgacaaagccgaacgtgcagagctggaaaaagcgtctcatcaggcttcactgcagaatgaaacgctcagcgaagagacaaaagaactggagtccggggagaaagagaaactcagcaagcgtgatcaggttctggagaagtttaaggcaaaagtcgagagggataagcagaatgaacgtggtggccgtgggcgttag

SEQ ID NO: 97065 - DNA, 279 bp, Enterobacter aerogenes
atgacaacaacagcagagcaggacatggaagcattgctccagtccctgaacgagacaaagggcgagataagcgaggagtccgcaccgctcagtcctacactggccgcgttggagccgtcccgccgcccagcgcaaggggtcgcctgcgcaacctgtccgaactcgatatggttcgcttcggagaacgaagtgagatgttattgccgggcaatgtatctcgtgacgtggagcaccagagaaccgacagaaatcagcctctgcgacgggaaaacactgtaa

SEQ ID NO: 97066 - DNA, 321 bp, Enterobacter aerogenes
atgcagttgaacagaaagaaaaccgtcgtaattcaaccgttgccagagaatttgaactcgcatttcctgcagagcttgacggaaaacagcgtctcgagctgcttcgtgatttttgttcttcgctggttgagcgtcacggaatggcagtggatgccgctatccatgctccgggtaaagagggagaccaacgtaatcatcatgctcacgttttatgcagcacccgccgactgtcggaggaaggtttcaaggataagacccgtgaacttgatgattttaagagcggcgaagtcaaccactggcgttctgcatggtcagaaatga

SEQ ID NO: 97067 - DNA, 303 bp, Enterobacter aerogenes; identical to SEQ ID NO: 39176

SEQ ID NO: 97068 - DNA, 2484 bp, Enterobacter aerogenes
gtgaaaaaaaatatactggccgggattttcttcgtcgcaatgctattgccagtatggcacgcagcggccgaaacattcacccgctgccatccaaatgagacagtctgggcaatgatccaagatgagcagctaaaaaacatcgccagactacaggaaacaaagcggtgtcaggccgttaatgacacttatgaccagtggcgccaaaatttccaggcgatgggagatgcagaaaacgccatccgcagcgcccgcgatcatcagaactggaacgccgtaaaatccacgttcgataacattgctccccagattaatagcctgcatgcactggcagaaaaaaattcatcgttactgggcgcgggtaacatcctggcgcttttcggcggtgatctgaattacctgtaccagaatgcagggctcgttgctccggccagcgctgacggactgactgataacgtcagtcaaatgctgactgaaccggataaacaggtcaaagctgcaggtatcgcgcaacagctggtttatcagactcgggttcgggcacagagctttatccaaggcgtggcacagaacgccggtaacgaagcccagaaagagtatcgtgcgcaatcagataagattgtcgaagataaagcccataatttcaaaggtgacagcgtggaaggatatttcggcggcttccttgcccggataagccaggtatatgctccagttctgctgttccttatcatcgttggtattattggtgcacttaccgcacggcgggtaaggctggatgctttcacggcatcagtgaaagcagtcatggccgcagcggtacccgcagtggcactggcgctgatgctgatattcatgcctttcctaccatcatgggtattgtacgcggcagcgctggccgtaacattcgccatttattcccgcagcaaaaaaattcttggagggctggcctctcgctgtgggcgtttccccgcactggcctccgggcttcgctggatgggcggttttgtgtctggcctcgatgctgacagaaagcaggaaaccggcgcggcatccgtcaacccggcatcacatcacactcacggctcatcacgctggggaaccgctgcagaaatgcgggaaaataaccacctgttaccaacggaaaagcaagccggattcaccctggcacgagaactgtccccaccgcccggagtggatggaaaattctgtttcaccgggcacgttgtgactgttgcccctacgggcagcggaaaagggattggcgcagtaattcccaatcttctgacttatcagggttcagcacttgtctttgatccaaaaggggaaaacgccgaggtgacaggtcgtcgccgtcgtgaaatgggtcagagcgtccatgtaatagacccattcggtataaccagcggcataaaagaatcagtgaacattctggatcgtctcgatgtgaccagcccggattgcgtcgctgaatctgcagttctggccgaaagccttgtggtatcagagaaaggcggtgacggtaatcattttgatgaatcagcccgaaccctgttacagggcctgatgctgcatgtttccggattaccggatgagtcccgacgtaatctcgcggaactacgtcgactgatcaccagtgatgaagaaaacctgttagccctactggccgatatggccgcaagtgaagacgttgctttcggcatccccgcccgagcggccaacacgctcatggggatggcagaccgggaacgtggctcagtattgtctaccgcccgtaaaaacacagcatttctggacgacccgcgtatagcagctgcgctgtcacactcagacttcaacctgtcagccatcaaagctgaaccgatgacagtttatcttgtgctaccagctaatcgcattgcagcaaatacccgatttgtaaggctgtttatcggttctgtgatctccgctgtaacagaatcgaaggcgaagccagctcataatgtcgcattcatcctcgatgagttcaacgtgctgggctatatgaaatcaatcgaggatgccgtaagcctgttacgtggctacgggctgtctttctgggtcttcctgcaggatctgtcacagctgaaaagtgcctaccctaaatggcagacgtttctggccaactcagcgaagacgttctacggcacagacgactatgacactgcaaaatacgtcagcgacaccttgggtaaatcgacggttgaatttgaaacccagaattcaggccgcaactctggcggcggagtttccgggggtggcggctcaatgaatcgtggtcgttcatctggctcaagtcagcagtttgctgggagggaattactgacacctgacgaagtaatgaggcttggaccaacccgaccaattgtgattctgaaaggggaatacccttatcagctcacacgtattaactatctgacagacccagaatacacgggtatggcagaccctaacccctactacagcgcatga

SEQ ID NO: 97069 - DNA, 264 bp, Enterobacter aerogenes
atgatgtttggaatcgttgtcggcgttctgttagctctgatgtttggccgggtcttgctcccggccttaaccgccgtcgcctttgtgataggcataccgatatacttctctttccgctttgtctgtgcctttatctgggctctggtgacgcaaaacagaaggcacagtgctatgccaatcgaggcacaaaagaccaccaagcctgaaacactaccggataacgtaatcaactttagccgcgaaaaagagaaaagggttaagtag

SEQ ID NO: 97070 - DNA, 573 bp, Enterobacter aerogenes
atgataaagcatatccgtattttgcccggcggactggtggtgctggccgtcgcttttctctgcctgctgacggcctgtcgcgaccacagtcgcgacggcatgagcggcgccgatttaaacctctacaatcacggtccggacgccatcgtttcggtgcaggcgaatggctacggcgggccaggtgctaactcctacggcggcggaggcggcttctgctgtgtgatggtgcctgatgtctggcgcccggggctgacggcaaaaatcacctggacctccgatcctaacgcatggatagacccgaagcacatccctgatgatcatgcgagtcattaccagcgccacgggccgattaccgtgcccattgaacgctgggaaaaaggtcagggatgtggctttgatgtacatattttcccctgcgataaggtgcggatagtccgttcctgcataccacctggacagccggggtatccggttccccagtcgccaccagactggaagcaaagagctcagaaaatacttatcaaacatatcagggaggaaattgtatgtccgataccgcagactccacgttaa

SEQ ID NO: 97071 - DNA, 294 bp, Enterobacter aerogenes
atgggggaaacaccttcttccaggatacgattcgccgtaaccgtgaattgtctgcagagggttttaatttcatcggaacaggtgtctcaggcggcgaagagggcgcgcttaaaggtccttcaatcatgcccggtggtcagaaagaagcttatgaattggtcgcaccaattcttgagcaaattgcggcccgggcagaagacggcgaaccgtgtgtcacatacattggtgccgatggtgctggtcactatgttaaaatggttcacaatggcatcgaatatggtgatatgcagttaa

SEQ ID NO: 97072 - DNA, 180 bp, Enterobacter aerogenes
atgaccgtttacgagatcgaaaaattcttgctcacctacaaaatgatgaaagccagcgaggttgctgatgaatacccggccgtcaggcatcctgtcgaagttaaaaggcatgagtctcattttgcaagcctgtcatctatgcttcggagaaccttgctgataatggcatcacgcaactga

SEQ ID NO: 97073 - DNA, 150 bp, Enterobacter aerogenes
atgaacaaaatttctcggatggtattaatgacggctgtcgccgcagggttctccatggcggcacaggccgctgaggttaccgccgcgccggcgccggctcaggaatcctatcgttcagcatttaaaattgagccaggatcaggtcgctaa

SEQ ID NO: 97074 - DNA, 1704 bp, Enterobacter aerogenes
atgttattaaaacccaaactaacaataagtgaaatatttttttccggtggccaaaggttaacactaaataatcatgacaaaatattgattgtaggaccaaacaatagcggtaaatctcaaaccttacgagaaataatttcaaccttagaaaactctcctcccgaaagaaaggtcacacttgatgtcacattcaataaaatcgggtccaatgccgatatggaagagtacctaactcaaaatagccactttcaaaaccatacttatcacattggtcctgcccaagttatacaacaccagattaatttttggcaaaatagtaaaactatatatagtctaacatccatgtttgtaaaaaacataacagcaaaagaccgtctaaatatttgcgagcagcaaacaagcatttcttttggtgaaccaaaaacaaagccacaacatattctttatgatgatagcgagctaatggaaaggataagcagtaccttcaaaaaagcctttaataaggatttggcttttgattatcgtggaggtagtaaacttccaatacatttaattgataaaaaagatttccctgaaaacaccgaccgtgttagtaatgaatatatagataaattaagaaaacaccctttacttgacaaacagggtgacggtatcaaaggctacgctggcatactttttgaagctatcgccttcaattatgacatttctcttattgatgagccggaagcatttctccacccgccacaaatgcgtcgattaggacaaactcttgcagaagaagttaaaggtcaacttatagttgccactcatagtagtgatattatgcgtggatttctggaggggacaaaaggagatcttaaaataataagaattcaccgagaaggtgataaaaatattatacatgaagttaaccaagaagcaataaaggagctttggtcaaaacccaacctaaggtattccaacgcactcgatagtatttttcacgaacaggtaattatatgtgaggatgatagtgactgccgtttaataaattataccgcagattatttagcagataagtcagatgttgttttccctgataccgcatttgttccatcaggagggaagcatgctatctcaggtattgcagagatactaaggctaacaggagtgcccgttaaggcaatttacgatttcgacttactttcagaacgtaatacttttatgaaagcactagattcctttgggtgcagtaagaaaaaaaaagaaaggataatgaacctctggtcacaaataaactcagaagtaatgcaaaaaaccaggcaaaaaagtgatgacgaaataaaaaacctattattaaaaacaataaatgaaacagatgcaaagaaagtttccaaaggaatgttagaagagatattcaagcaaaaaaaaccatggagtgaagtaaaaagacacggtataaatggattacctagcggtaacattagaatagtttttaaagaattaaatcaagaattgaaaaatattggaatttatttagttcctgttggcgaaatagagaatttcagtcctgaaacaggtctacacggcccagccttcgtggcaaaattgctggctgagagaaatatggatgatgcagaactggtccccttgcataattttgttgaagaagtatacacgggaataattgtgccttcagaagtagatggtgaaactattgagtga

SEQ ID NO: 97075 - DNA, 636 bp, Enterobacter aerogenes
atgggtttagcaaaaatatatctcccaattgagagatggcaaatagcctttatcgaaatgagaatagattctttaggatggagctatgttgatgtactcgatcgcatctgcagggcttatggattttcacagaaaattcaattagctaaccacttcgatattgcatcaagctcactctcaaataggtacactcgaggcgctatctcctatgacttcgaggctcactgcgctcttgagacaggcgctaatcttcggtggctacttaccggagaaggggaagcattcaccagtaatgctgcttcaactgacgcaaagaggatagaggcattcatattaagtgaagaaacactcaaatccgataatcacctgagtattgacgcccaatttttcacaaaaccgctcactcatgggatggctattcgttccgatggaaaaatttattttgtggacaagcatgcatcattgtctgatagcttatggctagtcgatattgagggagcaataaacattcgagagttaacaaaattaccgggcagaaaacttcatgttgcaggcgggaaggttccttttgaatgcggcattgatgatattaaatcgttgggtcacgtggtgggtatatacagcgaggttaactaa

SEQ ID NO: 97076 - DNA, 1824 bp, Enterobacter aerogenes
atgattggtgaaaatttaatactcacagttgatgaattgaacgaagttgattttaaattattttctcaggttcctttaacattccacgaacatgaaatatcagcatatctaagaaaaatccaagatgaagctgtaaatgaaaatgaaaaaaaggttgcggagtttttaagcatcctttttatgtttaacttgcaagtggttggtgggaattccgtatttgagcccatggcaatgtttggaaataagaggtcgttgttgccagaggattttgattctaaattaaatgactatattattgaattatccactaaaatcacaaatccttttttgctttctagaatttgtgattttatatggattaataataaagcaaaaaaagatatagcaataaaggcgatagagtcttattctgaaatgataggcgaggcaatatcacatttaaagagaataaaaaaagaaaacgataactcaagcctaagtttattcattttcattaaagaatacattgcaagagcattatttatatcatcctgcgtttacccgagaaaatcaggtggtaatgagcatattataactgccattacctctctttatgaaactcaaaatgaactgcttgtaattgagggtttcaataatttaacttgggtaatgatgcagcactccggcgataaagataaattgaaatttgcagtgaatgcagaatcaatggctaaagcccatactggcaaaacttactttgaagcagttaaggctctttatgaaacagctgcgcgcatatatgaaaaaaatagtaaaaaagatgaggcgaagcaatgtaggattagtgccgctaaaatcactattgatgtagtaaatagtcatagtgagcctatgctaaaagcaagttggcttagaacggctatatcagaactaagaaagcttggcgaaaaagagcttattgaagatttaaaaaaacaattagtcgacgcgcgggaggagagtctaaacagctatgccgccttgagctcgccgatagacataaccgatgaagttaacaattcactcgctaatttagccaatcgtaagttgtcttttatactcaagtatataatgagggaaactccgattgaaaacatttctaacatcagagaagaagtgttaaggatttcagaggttagtatattctcaaggttttttgcttcggagatcatggatgaggcggggcgcagaattcatagagataaaccgctaagtgatgttaatgaaatgactgatgatgaagcaattgatcattacatgaggaacatcactattactcatgatttattcataaaagcagtatttgaacctgctagatttgttataatccaagaacacaatctaacattaaacacctttactaaatttgctgagtgtagcccattcataaaagacgagcatgcgaatattttttcacttggtttctaccggctcttccaaggtgattatatgggggctagctatcttcttattcctcaaatggagggaattataagacatgcctatgaacttagtggcaaagattctactcgttatcttgataagggtatagaagaatcaacaagcatttctattctattagataagtgcagggaagacattgatcttattttcacgaaagacattgctttgactattgatatgttattcaacagaaaaaatggaccggtcttaagacataaactagctcatggtaatttgtatgatggtatgtgcttttctgaatcaactatctatgcatgcttcttgatattttatatatgtgctttgccattgtatgcgcattttgaacgcatattcgattaa

SEQ ID NO: 97077 - DNA, 1005 bp, Enterobacter aerogenes
atgggcgcggagattaatactttggaaactgattttaaaataaccctcgaaggtttcactactgagcaagaagcaaataatatcggtaatttcacgctagaagctattcgattcttaacaaaaaatctcaatcttgatacctcaaaattaaaatgtgtggttatttcctataatttcagcgaagcccttcaaaaagtgacctccatttaccaacacaaatcccctagttcattcaccaatagcaaacagggcgcagccgtcgggcagttagtaacaaaaattggcagcgatgggctatgtgtagaatatacccttgtgctatctattgatttttttgttgagctttttaatgatggtggctttctgaaattgaataaagaaggataccgcgcagtcatccatcgcattcatcatgagttagtgcacgtacatgaaaaaaacttactaacatgcttagcccaaaactttacggtcaacgagtatggcgacgcgctgcttatctcagctacgcgagcatggtctgaatatcttgccaactacatgtcttcggggtcagctcctcaagagactatcgatttatttctagagaatcttgatactgttgtaaatgaagtatctgacgagattggaaatctcatcctagactataaaagagacaatatttctctgaatgaaatgtatctcgaagcaaaaaaacgcttcaagctaattatcaattcctatgcttatgcgataggttacgtccattctctaaatatcaatattaatgaatacgccccaaaactagcccttacactatccgactcaaaaataagaaatcaattatctgagttaggcgcgacctttcaaagactttatgaaaaattcaatgaccaacgcattacaggttttgatgattatcgtgagataacattagtcattgatgaaatatacaagcagtttgggcttgctttagagtgccccgactggtctagtgacagtgaactctatatacatgtaaattag

SEQ ID NO: 97078 - DNA, 426 bp, Enterobacter aerogenes
atgcaaaagccgtatttactcacattactgatctcgctttgcttattacaaggctgcgtgacccgctatcagtctcaacctgaagttaacgggcaactgctggataacgccggcaaaccgatcgccggggcgaaaattacgctaaccggcagcggcgacagcgcggatacgttgtctgatagcgatgggcgattcagttttaataaagcgcataaatgggcgttctatctgccgattggccctatcgactggatgcatcgcgcggaattgcattttacaaccccgcatggggaatatgcctatctgctcacctcgcggatgggtaatgcccacgagttagacggcgcgcaatatcatgtgcgatgcaaaattccggccgcagcaatgacgccgccgccggaaatatgttatcgggtgggagattaa

SEQ ID NO: 97079 - DNA, 243 bp, Enterobacter aerogenes
atgtgtcgctacgccgggcaacatccgcggataaggagcagctttgcgccggatggcggctgcgccttatccggcctaccgttcgtggggcccgccgttaatttattcaccatggtggctgaaactgccgaggttgggggccgcaaaatccccggtggcgctaccgcttaccggggctacggcactgtgcgatttggtagcccggacaaggcgcaacgcgccgcctccggggagaggggctga

SEQ ID NO: 97080 - DNA, 630 bp, Enterobacter aerogenes
atgacagcaacctttctcgatatcgctatcaccccggatgtcatggatgtgcaacatgaaatgggcagcgaccagctgtggcaaacgccgcacagccgccgtcaggcggatcgcttcggcgccagcgaagaggggatgatcgctacccgcgacagtttttatctggcgacggtgtcgcaaagcggctggccctacattcagcatcgcggcggcccgccgggttttctgcgcctgctggatgacaccacgctggccatggccgatttcggcggtaatcgccagtacatcaccaccggcaacctgcgcggcagcgaccgggcctgcctgtttttgatggattacccgcgccgtgccaggctgaaaatctacgccaccgtcgaggtgctggtggcggaagagcagcctgagctgctggcgttagtgacgccggcaaactatcgcgcccacatcgaacgcctgtttcgttttcatctgcaggcttttgactggaactgcccgcagcacattacgccgcgctacagcgcacagcaggtcgcggaatacagccagagcctgcaagagcgtattcatgaactggagcaggagaatcagcgcctgcagcaacaattatccctaaaaggagagttttga

SEQ ID NO: 97081 - DNA, 150 bp, Enterobacter aerogenes
atgttcgttgtttcgtctggttttcagttagtaaaatacgactctgatcatgtaatgaaaaaaaacgacattttttctcgtcattcctcaccgcttctgattgcggaggggtatattcttgctaaaacgcctgatgatttcacccattaa

SEQ ID NO: 97082 - DNA, 942 bp, Enterobacter aerogenes
atgaaaatctctcttattgttccagttttcaatgaagaagaagcaatacctattttttattcttctgtaagagaattcgctcaattcaagcagcatgaagtagaaatagttttcataaatgatggaagcactgataatacagaatttttacttaaagatcttgaggctaaggatagcaatgttaaaaacatatgctttattagaaattttggtaaggaatctgcattatttgccggactagaatttgcttctggagatgccattattccgatagatgtagatttacaggatcccatcaacatcataccggaaatgattgaaaaatggctcaatggcgccgatgtcgtcctagccaaacgcatagatagatcctccgacgggagattgaaacgtaaaacagccgaatggttttataaactacataatattattagctcacctaaaatagaagaaaatgtcggagactttagattaatgtctcgggaaatagttgaaaatatcaaaaaacttcccgaaaaaaatctatttatgaagggggtcctttcatgggtaggaggaaaaacagaaatcgttgaatatgtgcgcgccgaacgtgttatcggccaaacaaaattcaatggttggaaattatggaaccttgctcttgagggaataacttctttttcaacgtttccgttgcgtatgtggacttatatcggagcatttgttgccggaatggcattcatctacggcgtttatatgatattaaacacattaattttcggaaatgaagttcatggatacccatctattttagtatcaattttatttttaggtggggttcagttaattggaataggtattcttggcgagtatattggaagaatatacattgaagccaaaaaaagaccaagatatattttaaagcaatatcctcattcacaaaaaaaacataacgaataa

SEQ ID NO: 97083 - DNA, 1911 bp, Enterobacter aerogenes
atgtattttccatccgtaggtgcttttacagcactatccatattactgagtatatttttttggattataggcctcccgctatcctcattgttaagtaagcgctcaaatcatttcttcgctctgccagtaggattcgctcttttttcctgcgtaggtatattgtttagcttgatttttaatgtgggtgtaacacaatccatcgcgatcgcagtcacatgccctattatttcgttcctattcggtgtaagaaagtttgagtttgctcttatcagaataaactttaggaaaatagttatattaactttatgcataatactttcatttgtagtttcttctacggtctatctgaaaatgaatggcaatgactttttatattcagcacctatttttgaccatatgaagattgctataataaattcaataaaaagggatggattgccaatcaaaaacccattcatgttaacctctccgaacaacgaagaaattcattactattatctttggttcctttctgctgcgaacatatctctactcacaaacatttctggctgggcagctgatattgttttgacttttataactgctttaacttccttattcgtagtatgtggtcttatcaaagaaaatagctcagggaaattaagcacttatctcattggcatcttttcactttttggttctcaaattgtcacatatgtagacaggattacacaaggccaaatttttgaatatatttcacgcgaacactctgttgagtcgtggttaattcaagctagttgggttccacaacatttgatggcagcttctgtagtaattacgagttgttatttcattttttcgattaacaaaaatagtagatggattagttcacttgttatatcaattctaatttctactggcgttggttcatcaacttgggttggcggtgttacttttgcagttatttccttttttttattcatattcaatttaattacaaacaaatcagaatggaagtttactttatcaaaatgggcctttatcgcaagcatggctataatcatatccttgcccttgcttataaatcagatttccgcagcaaaaccaactggtgtattccccattggtctccattcttataatgcgtcgccatctggaaatttgctctcaaacattttgacattcctgaccctatttatacctctttatttaccaatggttgcgctcggcctcattcttacatgtatcccaaagaagtcatccaatggtagtcaaatatttatattatttatcattgctatatgctcaatccttacatctatgttattgaaaagtcagattgctaataacgacttgggatggagagcaattcttcccgctgttcttgtttcgtcttcactaatagcaatatcaattgaaaaattgaaaagggaagctatcacatgcataagcctcattgttgtagccattagtttaccatccgcaatagatttttctaaaaatttattgcaaggtgatttccgcaatgacaatgttgagattatttcaagcttattggatataactaataatacagagcctactgatcgaatactgataaaccctagaaaatttgaaggacgtgaggtttttgatgggaacgttcttccatccataataatagataggaatagttgctttacgaatctgtcttatgcatatgctttttctaaccagtggggtgagtccattggttattactggaatgcattaaaagaattttatgccggccatgcctcgaatgaagatctaacaaagatgaaaaagctgaaatgcactaagttagtcgttttgcctggagacggcatttgggataaattcccttataatcactcagaatgggtgctaaccattgacaaaaaagattataagatatatacgcaaagacaatga

SEQ ID NO: 97084 - DNA, 225 bp, Enterobacter aerogenes
atgcattccttgcaagacgtacacaacaagttagccgatcttgtatcagaggcgcacaaagtagcgtgtgccctcgatgttggtgacgagcgcactgaagctttcgagctatacgaggcacttcgccgacttcagcgccaaggtgcagcagctgagcttctttccgcgaccaaccctcttctggcctctccttatcacgacgaggactgggaagaagatgactaa

SEQ ID NO: 97085 - DNA, 966 bp, Enterobacter aerogenes
atgacgccagcggcttactacaacgaaatagaccccttcgccgcccaatggctgcgcaacctgatcgccgccgggcatatcgccccgggcgaagttgacgaacggagtattgaagatgtcacacctgacgacctcagaggatttacccagtgccactttttcgccggaattggcgtctggtcccattccctccgtctcgcaggatggcctgacgatcgcccggtctggactggctcctgcccgtgccagcctttcagcgcggcaggcaaaggcgatgggtttgctgacgagcggcacctttggcctcacttcttccacctcatcagcgagcgcagacctcagcatgtctttggcgaacaggttgcaagcggtaacgcaaacacatggttcgaccttgtacaagcagacctggaaggagtgggatacgccttcgggcttgtgccgtttacgtcagcgggcatcggtgcgccgcacatcagagagcgagcttattgggtggccgagtccgctggcgagcaacgtcaaaaactgttaccaggactggaaaaaggtaatggcgaggaaggaggctggccgacagccaaacctacaggactttgcagttctggcggcatgggtaactccgacatctcgggactggaaggactcggcgggaatgactgcacagcgggatggaaaggacagactcgatcagttaccgcgccaggcttacacatgcgggcccttgaggttaacggtttttggcgagatgcggactggctcttatgtcgagatggaaaatggcgtccagttgaacccggcacattcccgctggttgatggggctgccgcgcgcatgggacgagtcgagcccggggtggcacgagtggcaagcagcaaccgcatcggccgactcaaaggctatgggaacgccataaacgcacaggctgcggctgaattcgtccgggcttatatggagggtttatga

SEQ ID NO: 97086 - DNA, 285 bp, Enterobacter aerogenes
atgaacgcatttctcacatacgaccgcattgaagatcgtcgctgggttgaacaacagctcaccgaggataaagaaaagtggattgacgaccgggcgcaggaaatcatcgacgccctgccgaaagagccatcaggtctgttcctcttctcggtaccgatggacaaaagcccatacgaaggcctacgcagcgatgccgccggagaggcatataacgatttcatttcggcagttgcttactcccaggcggaatacgactgggaacaccgtaccggctgcccgttttaa

SEQ ID NO: 97087 - DNA, 324 bp, Enterobacter aerogenes
atgaataacgaaatcgaactcacagcagcactgttaactatcgagaaatgccgcgagctttcaggctgtccggctggtgtagacctgcaggactgggtgaagatgctggcggcggagaatgtggcgctgaaagaggcgctttggtggttatacgaagtcgtttcatctgattgtgtatccatcccagacgaaaaatacagttcagtgacaaatgcggcgcatgtgctgctcgaaaccaccgccaccgatcgcatcgtagccgagattaaggctgatggggtggaagagtttatttctatgctgcgtgagggggccgacaaatga

SEQ ID NO: 97088 - DNA, 207 bp, Enterobacter aerogenes
atgatcaccggcaccacaagctacgacgatgctcctgatattcgctgccctttgtgcggcggctattacaaagctgatgacccggaaaatcacgaatgcgaggaagaagcgcaactccatgacgaaattgaatgtgatatctgcggtttcaaaagcacagacccggacggtgcccaccattgctgcgaggataactctgatgactga

SEQ ID NO: 97089 - DNA, 1959 bp, Enterobacter aerogenes
atggcagataaccaaccggttcctcttacccccgcaccacctggaatggtgtcacttggtgtagatgaagatggcgtagaagtgatgactgtcattggtggagatggcagtggcacagggttttcagggaatgaagcacctattattcctggaagtggtagcctccaggccgacttaggtaaaaagtctctaacccgactacaggctgaaagttcagcagcaattcatgcgactgcaaaatggactacagagaatcttgcaaaaacgcaggctgcgcaggctgaaagggccaaggctgccatgctttctcagcaggcagcaaaagcaaaacaggccaaactcacgcaacatctgaaagatgtggtggatcgcgcgcttcagaacaacaaaacgcggcctacggttactgatcttgctcatcagaataaccaacaaatggctgcaatggccgagtttataggccgtcaaaaggcaattgaagaagctcgtaaaaaggctgaaagggaagccaaaagagctgaagaagcttatcaggctgctttgagagcgcaggaagaagaacagcgcaagcaggcagaaattgatcggaaattgcaggaggcaaggaagcaagaagcagcagcaaaagcaaaagctgaagctgacagaattgcggctgagaaagctgaagcagaggcaagagctaaagcggaagctgagcgacggaaagcagaggaggctcgaaaggcgctttttgcaaaggccgggattaaggacactcctgtttatacacaggagatgacaaaagcagccactacattgtttttaacaccgggtgttaggttactgaatcgtgcccctgcgatgattcagttatcagctttggctgcagaaattaatggcgtcttaactactgctgctagtgctgtaatgacggctactgctgaattctcaggatggattgcctcagcattatggcgaggtgtagctggtgtagcaacagccagtactgttggtcccatggttgccgcagcatcgacgctattcttttcacctcgcgcaggtggcggaagcgacagtaaggttcccggtagagatatcgagatgttggctgcacaagcccggttgttcacggcgggtaagttgagtatcgaaccgggtatgaagagcgtcaacctcccggtacgtggcttcatcgcttcggaaactgatgggcgccagtctctgatgcttgtaaaaaccggtactgatggagtgccttccactgttcctgtattagatgctgtacgtgacagtactactggtcttgataaaataacggtaccggcgatgtctggtgcgccgtcgcggaccatcctcgtgaatccggttccaattggccctgctgctccgtggcataccggcaatagcgggccagtgccagtaacacctgttcacaccggtacagaggtgaagcaggctgacagtatcgtcacgacaactttgccaattgcagacattccgccactgcaggacttcatctactggcagccggatgcttctggaacaggtgttgagccaatttatgttatgttggctagccctagagacttgcctggcaaagtcactggtaaaggcgaaaaggtgggcgatgattggttaatcaaagcaggtcaggagctaggtgctccaattccaagccagattgcagataaattgcgtggccgtaaatttgctaattttgacgcgttccgccgggccttatggtatgaggttggaaaggacacaactttggccagccagttgaataatagtaacaggaaggctattagcaaaggatattctcctttcccccctgaagctgagcaagttggtgggcgagttcgttacgaacttcaccacataacgccgattaaagatggtggggcagtctatgatattgacaatattgggattttaacgccaaaaaggcacattaacattcataaaactggtgaatag

SEQ ID NO: 97090 - DNA, 258 bp, Enterobacter aerogenes
atggacaaaaaaaatattactgaatataccgaagccgaatttttggttcttgttaagaaaatttgtgatgcagattatgaaaccgaaagtaagcatacagacgctgtattgttgttcaagaaattaactgaacaccctgatggttctgatctcatctattatccaaaaccaggtcaggatgacagcccggaaggtattgtgaaagcagtaaaagactggcgtgcaaaaaatggcaagccaggattcaaggatagctaa

SEQ ID NO: 97091 - DNA, 642 bp, Enterobacter aerogenes
atggctaagttaccgcgtcgcaagtgcgcccataaagcctgtcgccagtggttccacccggtccgcgacgggcaggtggtctgctcattcgagtgcgccagcgcgatcggcaaagaacagaccgcaaaagctcgcgaagccgctcagcagaaggaagcgcagcgccagcgcaccgaagagaaggcaggtcgccagcgccgcaaggcgcgattggcagagctcagacctaacggttactacaaggcgcaggctcagcaggctttcaacgccttcatccgtgcgcgcgatgccgatttgccatgcatcagctgcggcgagaccaacccgcctgatctgcacggcgggcaatgggactgcggccacttcaaaacggtcggcgccaacccagaactgcgctttgaagaacgcaacgcccataagcagtgcaaatcctgcaatgccggggccggcaagtacaccgccaaagaggcgacagtcgcgcagcaatacgaagctggtctgatcgctcgttacggccaggaatacgtcgactggctcaacggaactcacgaaatgaccaactaccgccgtgaagacttcatccggatccgggatgagtaccgcgccaaactcaaagcactgaaacagcgggaggccgcatga

SEQ ID NO: 97092 - DNA, 246 bp, Enterobacter aerogenes
atgagtaacgaatctatcgaattatgcccagcatgcaattcaacgcttgaacagttagcaagcagtggagattacgctattctcaattgtcctaagcatggtgagttctacgtttcaggaacggttatcacgatgttccagaaaggaagcaagacagtgctggataatttaccagaactggtggagaaacgcgcaggaaaggggatcgatgaaatgattacatcctattctttccctagcaactaa

SEQ ID NO: 97093 - DNA, 507 bp, Enterobacter aerogenes
atgagcccagattacatttcatacgaaacattagttgctgctagggaagctgctgattgggcctgttggtctatggcgggaacttgggtttctgcattagctacattattcgcagcaattatagcagcggtggcaataagaggatggagaaagcatgaggaagctaatgaattaaaagaattcagagtggcagcatatgggtaccacacttctttgattcgcgccccttatcagaattgcagcaatctctcacaagaagatgacttggctgtacaacagacctacttcatgctgcaagagttttatgtcgcgtgcgttcggatgcactcaaaatccacccgaggaaaggcagccactatctatttgaaaatggcagatgttcagacgcgatatatttctggtgagataaataaagaagaagctattgaagaagtagcacatataagaaattatgagcctctgttgggtattggcttaaagaagcccgccaaaagtttatcgcagtaa

SEQ ID NO: 97094 - DNA, 1476 bp, Enterobacter aerogenes
gtgttaactgaaaagcagaaaaagctcctgaagaacaggttatggcgactcaaccacctgtataaaatcaaagataaaaacggcaagtgcgtaacgttcaagatgactccagaacagttggagtacttcgaagggatgcacgaccgcaatgtaatactcaaggcacgccaactcggatttaccactgaggtatgcatcatccagcttgatctggcgctattccacaaaaaagaatgtgctctgatcgctcactcacttcctgatgcagaaaggctgtttcgcaacaaaacgcagttcgcctatcagcgtatgccggacgatatcaaactcgcgaacccactcgtcaaagaaacgacaagtgagtacgtcttctcgaaaggtggcagcgtaacggtttcgacatccttccgtggcggcacgttgtatagcctacacgtatcagagttcgggaagatatgcgctaagtacccagagaaagccaaggagattgttaccggcgcttttgaggcggtgccacttggtggcgtaatcacgctggaaagtacggctgaggggcgggcaggatatttctatgactactgtgctgaggctgagaaggccatgctgcagggtaaggaactatccaacctcgactggaagttcttcttcttctcctggtggaagaatccacagtacgccatcgacccggtagaaccgctcccggcgcgcctgatcgaatacttcgctgagatggaggcgaaacacggcgtggccgttaacgaacggcagaaggcctggtatcacgccaaagaaaagacgctcggcgacgacatgaagcgcgaataccctaccataccggcggaggcgttccagcagtcggtcgagggcgcgtactacgccaaacagttccgctggctctacaccaacaagcggatcggcaaaatccccgataactcacatctaccggttcacacgttctgggatattggtgtgggcgactccacggccatctggtttgttcgcgaagttggtgaggagtttcacatcatcgactactacgaaaactctggcgaggggctgaggcactatatgaaggtgctgaaagaccgcgactacgagtacggcgagcactgggggccgcacgatatcgagaaccgcgaatttgctgctgatgctaagtcacgcaaagagcttgcgcgtgaaggttacgaaatcgatggtcagatgtactcactgaatttcaaagtggtgccgaaagctggcatcgataccggcattgagtcggcgcgtgaaatcctcccgaaatgcgtattcgatgaggagaaatgctcggaaggtatctctcaccttgagggctaccggaaggagtgggacgacaagcgcggctgctggaaagacaaacctctccatgacgccacctcgcacggtgctgacggctttcgttacttcgcagtgacgaagaacaaccgcaagcaagtcggcacagtattcttctaa

SEQ ID NO: 97095 - DNA, 189 bp, Enterobacter aerogenes
atgcaagattggttctatgcatttaaaattattgacagtgagaacaacttgcgccgtgaaggctcaggaacgttcggctctacaacggctaaaggggcaaaagtggttgctgagcaaaaaagagcgattgccgaaatgacggggtatgacgaggattggattattttcactgcatttaacaagatttaa

SEQ ID NO: 97096 - DNA, 1386 bp, Enterobacter aerogenes
atgaaacgcaatcgcgttaacgtgctgaccgtcgtcaactccgcttcaaacatcaccactgaaaccatcgacggcaagccacatattgtggttcgcggcataacgcctgtcgtggacgatatcgtgatgaaccggaagttgtacccggcagcagaaatcgaaaaggcctacaacacgcttgagcgtaacccgatgccgctgggccacccgaaggttgacggcaagcatgtgtctgctcgcgatgtccgggcggtgaatgaatatcacgtcggcgcatggctgcagaacgtcagccacaaagacgggaaggtgacgggcgatatgtacgttaaccgccagtacgccgagtcaagcgagaagggcaagcgcctgattaatcgccttgatgagatgatcgccggtaccaactcagaacccatccacatctccacaggactactgtattccggcattgccgctaatggcgagtcgaagggcaagaagtacaacgaaatcgccaccaacatgatgttcgaccatgtggcggtgctgcttgatgaacccggcgccggtacgccagaagaaggcgtcggtatcttcgttaactctgaaggtgatgagcagcaggtagaagttgctcgtcttgctgatggcatcgactgcactcgcgacggcctgctcaacaagaccaaatttttcttcaccaatgcctccaacttctctttcgacgacatctcccgcgccatcagcgacaagctgcgcgagggtgacaccgaagataagtggctttggcctgaaacggtgtggccggacaacttcatctaccgcaatgacaccaaatacctgaagcagaagtacctcatcgatgacgacggcaaagccgtgttcgtcggcgaacctgtagaagtcgtgcgcaaacccattgagtacgagattaaaaccaacggagagaacgatccgatgaaagaactgattatcaatgcgctgcaagccgctggtaagccgactgaaggcaagtccgacgccgagctgatggacgtatacaaccagatgaaggccgaagaagccaccgccaagaaaaaaggcgatgaagaaatcgaccaggaaaccggcaagcccaagaagaaagagcaggcagccaacaatgaagagatgccagcctgggctaaaacgcttaccgaacaggtaatggcgcttaattcacagatcaacgctaactcggagagcgagaaggccagcatgcgtgccgcggtgaaagccaaatttggcatgactgacattgcagttaacgccctcgacggtgagccgctcagcgagctgtttgctaaatgccagacctcaaccggcctgaatggtgctttcctgcaggccactaacaaccaatcagtcagcgagatgccggagtaa

SEQ ID NO: 97097 - DNA, 402 bp, Enterobacter aerogenes
atggcactcgtaaaggtattggtagcaaacctctttgccggtgccagccttcaaagactggaggctggacagatttatgacgtcgatgactcgatcgctgaaaagtggattgagcaaggcagggtagagaaatccaccgagaagaagggtgaaaagctcgtcttcgcagtggcgacaccgtcctcgcctgtggcatccggtgcatccgatttgcagtcaaaactcaatgaggcgttggctcaactggaacaggccaggtctgaaattgatgctaaggataaagagcatgccgaagtgattgagcaactgaagcaggaaagtgcagttaagctggacgctgaaacaaagcgcgctgacgaagctgaagcggcactggcggaagcaaccaagaaggcgaaataa

SEQ ID NO: 97098 - DNA, 516 bp, Enterobacter aerogenes
atgagtgacgatcaagcaactaacgccccggacccctatgatgaatttgagtttaaatgcccatatactctgttggggaatattaacgctaagaaagttatagagttttctgggttaatagctcgcattgaatatgctcttctcttgacaggtcatgtatcaaaaaaaaccgcctggctacaggcggactgggtaggatttgcggagagcatgagcggaaagcttttgagccaaggttccaaaaagcttcaggaaagcgtagagcttttatctgaagatccacctaatcaataccttgcgaattacagttgggagcctagaacctacaaaaaggggctgtctgcagattcactagcaattttagctgccaaagacgtaaggaataacctttttcacggtctaaaatttaacaatccagacctccagagaaacaatgagctgattgatgctgcttatatagttctccgtggatgccttatggcaaatgttcaattatatgaattttactgcctctaa

SEQ ID NO: 97099 - DNA, 927 bp, Enterobacter aerogenes
atggccggcgggccacgcgcccaaaacaagcccactgtaaaagagtgcctggactactggaaggaaaactacgttgatatctcgttgagggaaaaaacgcaggcgctctataaatcgactgtcattaaacatatgagcgacgctttttcgggagttcctgtcgaagatatccccgtgcggttatgggtggagcggttcgccgaagaggagcgtattaacccacggcgtgccaggcagctgctgattcagttacgaacggcgatagggtggtgcgttcgtaggcagtttgtcagcgcgcctgagctgatgctcctgcagcctaaggatatcggtgttaagccctcagtcggtgaggtgacgctaagctacaatcagcttgcaaaaatctggctgaccattgagcgcagccgtggttcaacgtcgaaccggttgttgcatcagttattaatgctttatggcgcaagaaatagtgagatacgggattcggtaaagggtgagtttaacagggaagaggggatttggctgcttctagccgaaaggagtaagaccaaaaaagttgtcagacgaccgatttttgacgcagcggatactttgctgaaaaaggcagaaatgacctacggaaacattctttttcccgggcctgatctgactaagcctatgtccatcgccggtgctaatcgcttcctgaaaagaatcgaggtttcactgggtattggcgaatttacagcccatgactttcgtcgcacgctggcaactcgcctttctgaagagggtgtagccccgcatgttatcgagaagatgctggggcatgagcttggtggcgtcctgactgtgtacaataagcatgactggatagcagaacagaaagacgcctacgagctgtacgcagaaaagatattctggcatatcaagaagatttcgggttga

SEQ ID NO: 97100 - DNA, 192 bp, Enterobacter aerogenes
gtggccagcgttgaaatgataaccgagaaagaagtgatgcagatgatgcacatttcatcgcgtatgaccatatggaaatataccgagcgttataatttcccaaaaccgatacgcacccaccccaaacaatacctgctgtctgaggtggaagcgtggattttaaatggcggtatcaacccgaaatcttcttga

SEQ ID NO: 97101 - DNA, 1224 bp, Enterobacter aerogenes
atgacaattagtttaagaaaagtccaaaaatggatattttatttccttgtattttttattgtctttgatggcgttaggagtaatctggttatctctggattcatatctccattcagggaattgttcctaaatctttttattttaagttctatacctttattgaggctatgcaaaagaaaagatgtggcccttgtcgctccttacttaataatttccgctctggcgataataaacataccaataacattatctatagatataacaacatataatgttggccctataaatgtttttgagaataaatactcagccgtatacaagcacataatattctcaataattttcttatcaatgatatgttttatcagaaatgatgaagaatcggccactaaaggaattggcctgatgattaacctggctgcaatatattcaataataacgattccaatttatttgcatggggcccctctttttaaagagaattttagggactggggtaggatgggggttggctatcctacaatggacggtcaaatgatatgcttttcaattttctgtttgatctttttggttaaacagaaaagtgtatttttatttaacattaagatggcagcattgctaattggtcttgttgcacagaatacgggaacagcaattgtaacgatggttgtcattggtgctctttcgataataaagaaaccaggaaagacatttacatatgttgccattatgattccattcatagctgcactagttataaagcaatattactccaatcctgagttcttcacagacatgctatatgttttgaatactaagatagagcaacttcttcaccctgagatggcatcaagcagtaatcttgacactcttcaaatgcgagctgcgcaatttgacatgcttgaaaaggtattgaagcatgacccaatgctcaggatatttggtgttggaggggaggcatacattgaaaacgaattcagattaacacttgtagcttatggtatattctcgtttgctgcattcattatctctttcgtatggatggctttcatctctattaataaaaagaataataacaagttgctgctccttacgataattgtcatgtgggcttttactagctacacactttccagtattcatctattcacaacttcgtttatgttctgccttgtattttcctatacctatattactggcgaaagagatcgaatggtaaattaa

SEQ ID NO: 97102 - DNA, 1371 bp, Enterobacter aerogenes
atggatgggtttacacgtagacaagtggtgattgggttggctgcaggatctgtaggggcactcattcctgccagattcgcgttaggtggcggtagggatgtggcgtggctaaaaggtattgatgcttctggtgtgccggtagatggtggaggggcaacagttttggttaatgagccgctaacccttagaggcggtcattttgtgaacataaaattcgttcctgcaccggggtattttggaccgggccctatttttcaagccaaagacggaactgtcattcatgaaaatgtttctgttaatggctttgctggtcctgggtgtaagatattgagcaataagcaaaaaggtaacagttttattgccattggtgaatgttcatacagtgacaacggtagaaagagcttaaccacactctctaacagcgtagatttacgtcttactaatcgcctggaagtagttgacgcaagtgctttcaagcctggccaatatatctggcttggcgatggtaagtttaagattaaaaaaattgataaaaactcattgttccttgaatctggagagcttccttatcttattggtgcaaaagtattcaatggcggctatgatcgctgcatgcctgggcagagtgtaattggcgatgcagacgatcgaaatggaattaggattggtaatggtggttatgcgtggaacatagatacttctaacgcaaaaataacagctagcaataatgcctggttcggacttttccatcattcaaaaaaatactatggcaaacaattaattgaaaatatcacttcagaaatgaatggatactgtaatatcggcatgggcttcatgaatgaaggcactataaaaaattgtatttcaaaaaatgcaggaaacaactgtatagatgtctttgaaagtaagggtgcagttgacgtaacaaaaaatgttgtttctggcgctggcgttgatggtatttttgttggtggtgatgggcaagtggcaagagtatatgataataatgttagtgattgccgtagaatcggaatcctgatcaatgcacgacataacccaatatcaaatgtctttgttaaaaataatgctgtaaaaaattcggggatgaactctttgactctaactggggttgaaggcggcgttgttgaagataataaattagaaggaagcaacattagacaggccatcttccttgaaaaaaaaaaggggcttgaattaacagggcatctaacaattgaaaataattacattgtaaactcaaagaaaggtgatatatctactaattacagtgggtatggagcagattcaaatgctaaagttacaataaaaaatactaaaaaaactttagtttcaggaatagaaggttattaa

SEQ ID NO: 97103 - DNA, 129 bp, Enterobacter aerogenes
atggttagcatgaggtatcactcattgactaaccacatatctgactcttcaaacatctcttcaagcatgcggttaagccgttctttctcggttttcgtgcagtcactgtttaacgcgttcgttcagtag

SEQ ID NO: 97104 - DNA, 162 bp, Enterobacter aerogenes
atgtgtggatgttttgcacaagcccaaacccgtgaagaatatcttgcttacctgtccgatgaagccgatcgtgacatcgcatatgagccggagccgattggtcgatacaacgtctcgcccggtaccaaagttttgctactgaacgaacgcgttaaacagtga

SEQ ID NO: 97105 - DNA, 1254 bp, Enterobacter aerogenes
atggctctaacagatattaaagtcagaacagccaagccaacagataagcaatataagctgaccgatggcaacggtatgcaccttcttgttcatccaaatggctctaagtactggcgtttacggtaccgatttggcggaaagcaaaagatgctggctatgggggtttaccctgatgtgtcactcgctgatgcgagggctcgccgcgatgaagctcgtaagcttttggcaaacggcatcgatccgggagataaaaagaaaaatgataaggttgagcaggaagaagcacgtactttcgaacagcttgctattgagtggcatgccacaaataaaaagtggtcggaagaacatagccgacgagtactgaaaagtctggaggataatctttttccagccattggcaaacgcaatattgccgaacttaaaactcgggatttgttagccccgataaaagccatagagatgtctggacgtcttgaggttgcatcacggctgcaacagcgaactacagcaattatgcgttatgccgtacagagcggtttgctcgactacaatcccgcgcaggagatggttggtgctgttgcttcaagtaaccggcagcatcgaccagcattggagttgaagcgtactcctgaactccttcagcgcattgacagttataccggtaggcctttgactcgtcttgctgttgagctaacgctcttggtattcattcgttcaagtgaactacgctttgctcgttggtctgagatcgattttgaaacatcaatgtggacaatacctgcagagcgcgaagctattgaaggagtaaagcattcccagcgtggttcaaaaatgcgtacgcctcatctggtaccgctttctcatcaagcgttagcaatccttaaacaggtacacaaacttagtggcgatcgcgattttgttttcattggcgatcacgaccatcgaaaaccgatgagtgaaaacacggtgaacaaggcgctgcgcgttatgggatatgacactaaggtagaggtttgtgggcatggtttcaggacgatggcatgtagttcattgatagaatcgggattgtggtcgagggatgcggttgaacggcagatgagccatatggagcgtaactctgtgcgcgcagcttatattcataaggccgagcatctggatgagcgcagactgatgctgcagtggtgggctgattttttggatgtgaatcgggagaaggcggttagtccgtttgattttgccaagcttgggcggtga

SEQ ID NO: 97106 - DNA, 537 bp, Enterobacter aerogenes
ttgcaacttcaatctacccgactatatcttcgccccgtaacgaagtctgaccttgatgaccttttcagaatttatggtgacccggctacgaacacctttaaccccgcagggccctatcctgacatacatcatgctcaaactgttttagctcactggattaaccactgggaaacccacggttttggaaactgggcaatctctttgaaggatagcccggaaaaaatcattggctttggggggctgcgtatccgtagttatgcggatatagtaattaataatttagggtatcgtttcgccacagaggcatggggaaaaggtctggcgacagagttctcgaaaaactctgtccaatatggattttgtaagttaaatctgtccgagatatccgccgtagtgagagctaaccacctggcatcgcagaaggttctaaaaaaaactgggtttcaatatataaaagagatttatgatgtgaaagatgcaccgccgagtctgattttttccctcaagcaaagtgaatggttaagacaaccaatgtga

SEQ ID NO: 97107 - DNA, 162 bp, Enterobacter aerogenes; identical to SEQ ID NO: 92151

SEQ ID NO: 97108 - DNA, 453 bp, Enterobacter aerogenes
atgaatggttacgcaggcaaggacgaagcccgacagcaaattaatggttacatattgaactactacaacagcgtcagacctcaccattataacggtgggttgacgccggaagagtctgagaacaggtaccatttttactgtaaaaccgtggccaatattacttgcccactacacgtataccagtgggaactcaatcagaatgataaaaaaattacccatcgtcctgaaggacaatgggtcttttctgacagctatatggaggcagaagccgcccggttgggcctaggattggcctatgttcctgttgaactgatagcggatgatttagaacacggtaaacttatcagggtgttgcagcgttacagcctgcgaatggagggattgtttctctattatcctcatcgcaacgtctcccctgccctgcggatggtcattgatacgttgaagatctga

SEQ ID NO: 97109 - DNA, 396 bp, Enterobacter aerogenes
atgcgcaaggatgcggatcccttcaacaacctgcgccgcgcaatcctgcatcaggcgatcgtctgcggtgatatagggttcgcattctgcagcattgataatcagggtatcgattttatcgccgccgccgcgcagttttgttcccgtggggaagccggcgccgccgagtccggcgacgccaaactggtgaatacgctcgatcagctcttcacgcgacttgttgtggtagtcgctccagccgtcgcgctcgatccagcagtcttcgccatcggcgtcgataataacgctgagttccgccagcgcggaagggtgggcggtggaatggggggcaatagccgtcaccgttccggaagtcggggcatgaaccggcagcatcctgccaaagccgcgggttaa

SEQ ID NO: 97110 - DNA, 261 bp, Enterobacter aerogenes
atgacagcaagcaccggaattagctttccaaaggggtctgtcgtcactttcagcccttttgttaaagcaaaaagccaagactatgtcatagcatccttagataaagagcaaattctgagctttaaacaggtgtacataggtgaggtggaaactaacctagtctctttaaacccaatgtatccaaacattattgttaaaaatgaagatctgagcattcttgctacggctgtttatttggagatacctctcagctccttctga

SEQ ID NO: 97111 - DNA, 174 bp, Enterobacter aerogenes
atgtctgaaaaaatagcttcaatcaagccgaggcaggttcgttttgtggtagaggtcgatcagcgcattcgtgaatctgcgaaacgctgccataggtcaatacaggctgaaattgcttatcgtatggagttgcttatgaaacttgaggataaaggtgatgttgtcatccagtaa

SEQ ID NO: 97112 - DNA, 621 bp, Enterobacter aerogenes
atgaatattgtacagaacaaagacctaactttccacaacaccaattttgcatacatggaaatgggtggtcatatctggcttacggcgtcagaggttggccaggcgctggagtatgccgatgataaagcagttcaacgcatctactctcgacatgctgatgaatttacagcgcaaatgacaggggtggtcaaactgaccaccccttcaggaaggcaggaatcgcgagttttctctctgcgcggcgctcacctgattgcaatgtttgctcgcacgccaaaggctaaagagttccgccgctgggtattggatatcctggatcgcgaagtagcgcgctcgccgatcgccaagcagttcacagacgatgaactttgttccctggcgtggctatggagagccagcgacacaatgcttaaagcttgtgagagtgttacgccgttattgagagtggctgagcatcgtgaagcaggtcactttcactcaataggacaggaactgcctcgctcgatcaacaaggcaagagaaattattaaacgcgagacagcgcatatcgaatttcacccatggagggatgataactggagcagggtattaccacacctgagacaggagatattgcagtga

SEQ ID NO: 97113 - DNA, 732 bp, Enterobacter aerogenes
atgacttctaaaaatgtagcaaatgtaggctcaattgtcaccatgatgtctcatcacgaaattgctaagctgacagggaaacaacctgctcatgtagtccgtgatattgaggcaatgcttgaagctcttaatcgccattatccagaaatggatgattatgattctaaagagttttctatcaagcgtaaggtttacaatggccgtgtggttatcgatgagatcaagcttgaccatgatctgactatgacattaatgaccggctacagcattccgctccgtcacaaggtagccacgcgctggcgtcaacttgagtctggtcaagtgcagccactgaaatcaacatctcaccttccagagtttcgccgcgcacgggcgatcaagatggaagttgaggcaatgagcttggcgctgtcgttcatgccaaagcttagcgacgttgcaaagcaaaccgctatggctcgtgctgttaacgatgcggcaggtattgagcttcttcctttgccgaaggttgaagagcatctccgtacagctggagatgtcgctgagatgttgggagtgtctccgcaaaagatcggtcgccttgccaacaagcatgaactaaaaacggagcagtatggaatgtttgtatgggataaggcgaagcactcagacaaacaggtcgaggcgttccgctacaatgcagaaggcgtgaaagcgctacgccacctgattcacggcgctgatgtggcataa

SEQ ID NO: 97114 - DNA, 2649 bp, Enterobacter aerogenes
atgtcagaaaaagcaggtgaaatttactatgacatagaggctgatgtttctgaactgattcaggcgcagcagcaagttaataaacgcctagatcagatggatgccaaattcgagcaatcatcaaggtctgttgggcgttttgaaggtgcgctcaacaaagttggtgtcgcaatagctgcagcttttacgattgatgccgcgaaaaggctgattgcgattggcgatgaaatggtcactctccaggcgcgcattacacgattgagcccgagtattgatgtagcaaaagaaacattagcggctctttctgctatagcgtcacaaacgggtaatagcctgtcagagactgagcgcctttgggagtcgttaactacagcattaaaagaaacaggcgcaacgaactcccagattttgggactaacttctactttgcagaagatcggaaccataggtgcgtcttcgacagaggaaatggcgaatgctttaaggcaatttggacagtcaatctctggcggtatcgttcgcgcggaagagttcaactctattcttgaacaaatgcctgaacttgcaaggcagattgctaccggacttggcatttccataggggatcttcgcaagagaatgctggagggcaagctcacagcgcaggatgctttgaatgccattcagaagcagtctcaatcggtaaatgaagagtttgacaagatgccggtcagtattgaccgtgcaaaaaacagtcttgatgtagcgtttaaaaatgccataaatgacctgaaccaagctattggattgacgtcaacactggcaggcttgatgcagacagttgctgacaatcttaattactacaataacaacgttggtgattcatcccgaatgccaaagttgattaagttacagcaagaacttaatggtgaattaaaggacagtcagcgctggtatgagtctgattctgtcttccaggctcgtcgtgctcaagcagctgtgcagcttaaacaaattgaaggagaaattgcgcatattcgagcgaaagcgaagaatgacgctagcaataaccagttcaatgctccacctacaaaaggcgatgatgctgcaacgaaaaagcttgttcagaattccgagcgccgactcgctcttgccaaactagagggagaggccagagctcgccagcaagctcaatatgatgccgctgatgccggggtaaccgaccagaagcggattaaagctcttcaggatgagtatgctgaaacctaccgcgtcacggaagccagaaaggaaagcaataaggcaggtaagcagtcagaaacgcaggctgattcgatcgcgcataaattagcgagtttgaaacaggagtccgcacttgccgcagactctacagctgagttaagccgtgaacaggcgatcctcaatgctcagctatcgcttggcaaaggcgctacgcaggaacaaatagcgctggccgggcagtatgctgctaaaaagtgggatacggctaacgctatcaaggcgcaagccgcggctgagaaacttctccctgaagcacgcgagaatgcaagttacaagcaggatgttcaggatttaaatactgcactgaccgcgaagaaaatcagccaggagcaatataacgagacctccgagagactggaggcaactcaccaggccaatcttgcgaaaatccgcgcgcaacaggctgttaccccgcagcagcaggcggccggcgacgtggatccggtgcagaacctggctaaccagcacgcccaacagttagcactaatccagcaatacgagcagcaaggggttatcgctcataatcaggccttagcactaaaaaaagccgctgatactcagtatgagcaggaacgaacggatgccatgtgggcattgttcacgcaacagggtgtagggtatcaggctcttggcgcagcggtggacgctttcggcaatcaggcatccaatgcattaaccggtatcatcactggcagcatgtcagcctcagatgcattgcagtctatcggcaacaccattctcaacgacgttattaatacgttcgtgcaaatgggcatccagcaagccaagtctgcagcgtttggcggggcagcgcagcaagcttctatagctgccaccactgctacgcaagtcagttctctggcaacgaccacggctgccagtacatcgtcggcggcggccacaacagcagcatggactccggcggcgcttgtggcgtcgatcggttcgttcggcggcgcggttgctattggcctgggcgccctggtggctgcgctggctgttggctcatcgttggccggcaagcgcaagaacggtggtccggcatcggcgggctcaatgtaccaggtaggtgagggaggcatgcctgaaatctaccgcgccagtaacggcagtcagtacatgatcccgggggataacggctctgtcatcagcaataaggatttgcagggcagtggcgggggcgcgctgcaggtcgtgaacaacgtttacaactatgcaaatggcgtcaatgtcgatacccgcagcagccagaacggcgggcaactggttatcgagacctttatcaccgatatgcagaacggcggcccgatgtcgtctcagatgcaggacacgttcggccttcgccggcaggccaatggcgattactaa

SEQ ID NO: 97115 - DNA, 168 bp, Enterobacter aerogenes
atgaaattcatcgaactaccagagcgagtacaggagcaggccgcagagagactttctgaggaacttcaaggcatggtgacatggaaggaagatgagagaacggaaaaagcgaaggcgatcgctaaatccgttcgtgaaagttttattgagctgtgttcagagtgttag

SEQ ID NO: 97116 - DNA, 174 bp, Enterobacter aerogenes
atgtctggtctagtgaatccgaaagattctccagaagaagcagcatacgcattgctcattgaaatggtcagagctcagcggatacctgtttattcttcgaacatttcaggattgttgtcgttttatgatgaagcagttcagcactttaaaaaagaagatgaacaaaagagctaa

SEQ ID NO: 97117 - DNA, 2142 bp, Enterobacter aerogenes
atggcaacaccgttacctactccaacgcagaatccagtcccaagtacggatatccgggacgcagtttttgctggcgcaaagatggatgagattgttaccagcccaagtgagaagtacgtagatcggtttggcaacgaacactataccatagagggtattcgccagaaccttatcccacttagtcgccagtatatgactctggaagacgcacaggcggatattgccaatatccctgaaggaagcacaacctattaccgtagccctgatgatagtgcgctggctattgaagtcatcaacaatggcggaactctggtcgctactggacgtaaaatgccgtctcaggaatctattgatggccgggtgtatttatctgaagggagtgaactaaccagggttatcgctgctggaaaacctgtgctcatacaggatgagctcgggcgtgtatacctggcgggaatggaagcgccggtgcaggaagttttagacagaactgatgaaacgaataatagttccgtccaccttaaccgggactcagcaggaaatgtggtcttgcttcaggatgagaacgggcaactgtatgcccccgggttgaatggctcagtgcaggatgagttcgacagaatacgccggaagataaacagcaatcgttctccttatcttaatgtcatgcccgatgctctggaggcggtgtggcaacgagtggatgagctcggccggctttacttgccgggtatgacttccggcttacagactcagctcagcagaaatacagagcgcctgcgtgagcttgcgaacaaccgacaggtttatgatgcgcgtgatttcgggctgcgtagcgaacagggagatcgaaacgaatacatcataaacggcgttatcaatgctgccgcgcgaaatggtggtggcgtggtttatattccgccaggtaactgggggctgctgaactacattaccccgcgttctggggtgagcattattggcgcaggaaccggaaccacaattctgcggccgcgtggttcctacgccgccattcagcgattgccggatgacgacagttatctttctgattgtctgttccaggatttcgccattgatggcagcgagcagactcttatcggagatacgacttatgacagccggataaaagggttttatttctttttctttaagcgttgtttcttcaacaggctgctaattcagaataccggcgcaaccgggctgggtgtcgattacgcctacgactcaaccatgaccaatatcacaacagagaattgcggacgactggccccggcaggacaggccggggcatcaggaattggtattggtactggagggaatctcgatgaaccgctgtatatcggtgggacgttcaaccggaataacaggaatttcgggattttcggagaatgggcccgccgggaaaattcgaaaaaccatagccggtatagcatctacgccaacaatgtttgcaccggaaacggcatggcagggattggtgactgtggcctggacggtctggtgtgtatcggaaatgacctgactaataacaccggatacggctttctacaggataccggaacaatggatgtggtagatgggaggccggcaccgggctcccgagggatactgatgggtaacaatatcagtcgtaatggtaagtcagggattggatatgaaggcgcagttgtcgccgggagcgggtatcactacaaggacaacatcattaatgataatgctgaattcggcatcgaaatcacggcgggctcactggaatataacgacgtatggatattcgggaatgagttggccagaaacggacgggatggatttcgcctggtgagcggcaccatgaaaaatgtcgatattgagcacaaccgagttttcaacaacgggcaggatattgcgaacggtggtggctctggtctggttataaacgggaatattactggtggctccataaccagcaataaattacgtgataatcagagcagcaaaacacaggactacggtttgtgtggcaatggaaacctgaccgatgtcgatattgatggaaaccattatgtcggctttaaaacggcggctgaaaatctcacgggtacaaaaactaatgtgacctatggtcgtaatccaggaaaagaataa

SEQ ID NO: 97118 - DNA, 1410 bp, Enterobacter aerogenes
atggctcttgaactgaaaagcaactctgaatataaaggcgacccgtcacagctgccaggggcaaatgctcctatgccagataatgcttcgctttacctcgattttaagaacgggctttatttagccagaaacattaccacaggcaaacttttccgaagtacgttaataagtgaaatcaccagttttgctcgcgcttcgcaaaagaccgtcgtcggtccttacggtatactccagaccgtagctaataatgaacctgctgttgtttatgatcctgtcacccgtaaacgacgtggtgtttcgttacataactccacatctaacaaggcaatttacagtgaggatttcacgcaaacgacctgggcgaaaaccggagtcacggtgactgcggtagcggcagtttcacctgatggcaatacgtcggcaacgctggtgacagaaggaacgagtaacactgttcataccctggaagaagtgaatgcaacggcaacagcagttaacagctaccacacctacagtatttatgtgaagaagggaactgcgcgatttgtacagttatatgcgctgcctgcttcttcaggaaatacgtttgcaaacttcgacctcgagaaaggggttgtggcaagagcttcctctgccgtgcaacaggctggtattgaacagggaccgaatggatactggcggatcagcattacgatccgtatttatgctgcttatccggcgggcggggccgggttggcgttcatcaatgatggagtgaatgctgggcttatgccagcctacgtcgggactggtaagaccgtgtatgtctggggggcacaactggaagtccgcgaagcagccacgccgtatgtcccaacatctggcgcatcagggacgcgtgcagccgatactctgaatgcaaataattcagtgacaggattcatgtctcctgatgccggaactatctacgtggaggcagtgatgcccggcgttaatcagtcgccggttggtgttctggagttaggaaacggattcttcggcgttgaggccaccgataccagcgctaactatatctccttttaccagaagaacctggcgagtcagaacggcgtcatttccgcttcttcatacaatgccggtgccaataccagtctggatacgaaaaagggctcagcaggtgctgggcgtagttaccggggatttctgtcgtatgatgctgcgacattgcttacgtacgatgaatatggattaacccaggtcgccgcctcggttgcagtagcgctttttggccgcataagtgtaggcagagggcgaagcaccgataaaaacccggatgcactatggtttaacggtactattcagaaaattgtctactacccaaccaggctaactgaagagcaaatggccgatatttacgacgcaggagtttag

SEQ ID NO: 97119 - DNA, 672 bp, Enterobacter aerogenes
atgtgcggacgcttttcccagtcaatgacccgtgaagattatctttcctatcttgccgatgaagccgatcgcgacatcgcatatgacccggagccgattggacgatacaacgtcgcgcccggtaccaaagttttgcttctgagcgaacgcgacgaacaattacatatcgatcctgtcttctggggttatgcgccaggttggtgggataaaccgcctctgattaacgcacgcgtcgaaacggcggccaccagcagaatgtttaaacctctctggaaacatggccgggcgatctgctttgctgatggttggttcgaatggaagaaggaaggcgacaagaagcagccctacttcatccatcgtgccgatggccaaccgatattcatggcggcaatcggaagcactccgtttgaacgtggagatgaagcagaaggctttctgattgttaccgcggctgcagataaaggtttggtagacattcacgaccgccggccgctggtactttcaccagaagcagccagggaatggatgagacaggatataggagggaaagaggccgaagagatagctgcggacggtacggtgcccgcagacaagtttatatggcatgctgtgacgcgcgccgtaggtaacgtgaagaatcagggcgccgaactaatcgagccaatcacctga

SEQ ID NO: 97120 - DNA, 195 bp, Enterobacter aerogenes; identical to SEQ ID NO: 36234

SEQ ID NO: 97121 - DNA, 603 bp, Enterobacter aerogenes; identical to SEQ ID NO: 25057

SEQ ID NO: 97122 - DNA, 423 bp, Enterobacter aerogenes; identical to SEQ ID NO: 25058

SEQ ID NO: 97123 - DNA, 195 bp, Enterobacter aerogenes; identical to SEQ ID NO: 8291

SEQ ID NO: 97124 - DNA, 132 bp, Enterobacter aerogenes
atgctttttgggcaatggattgggcaaaaagaaatccctgacccgtatcgtaaaagtgaagaagcattctcttcagtgtatcaattgatagcgcaagccggtttaagctgggttgaaaagctaggcaaataa

SEQ ID NO: 97125 - DNA, 2166 bp, Enterobacter aerogenes
atgtctccagtaataaataaaaccaatacaaaggatgcagatgaggtagacttaggccgtttgattggcgagtttattgatcatcggaagctaatagtatctattacagcattatttactctcatagctttactttatgccttatttgcaactcctatttatcaggctgattcacttattcaagttgagcaaaaacaaggtaacgcgattttaagtagcttaagtcaagttctacctaatagccagccaagttctgcaccagaaattactttgcttcaatctagaatgattctagggaaaacagtcaatgatctgaacttacaagcgaaaatagttcagaactatttccctatttttgggaaaggctgggcaagactgatgggagagaaaacagggacgatttcaattagtcgtttgtatattccgaatggaattgaagattctgtatcggaattggaattgaaagttgaagataaatcacattatattgtggatttcgaaggtaaaaaaattagaggtgaagtcgggaaacttctaaatgaggatggaatttcgcttaaaattgacaatatagatgcgcagccgaattctgaattcacgatatcgtatattagtagattaaaagcaatatcagaaattctaaatactttcacagtaaccgatgaaggtaaagatacaggcatgctaagtctgtcaatgacaggtgaagactctactcaaattgtaaaaatattagatagcatcagtaataactatctggcacaaaatatctcgcgccaagcggcgcaagatgctaaaagtttagaatttcttaatttacaactgccaaaagttagagctgagcttgatgttgccgaagataaattaaatttataccggcgtcaaaaagattctgttgatctgtcgctggaagcaaaatcagtacttgagcaaatcgttaatgtagataatcagttaaatgaattaacatttcgtgagtctgaaatatctcagctttataccaaagaacatccaacatataaggctttgatggaaaaacggaagacattaaaagatgaacgaaataagttaaatgagcgagtgtctgcaatgccgaaaacgcaacaagaaatattgcggctaagtagggatgtggattctggacaagccgtatatatgcagttgctcaacaggcagcaggaactaaacatagcaaaatcaagtgctattggtaatgttagaattattgataatgcggtctccttgcctaagcctgtaaaacctaaaaaagtaattgtattattattaggattcatagcgggattaatggtgtctgctggcatcgtactcctcaaagtgtatttaagaagagggattgaaagtcctgaacaattagaggagattggcattaatgtttatgctagcattccggtatcagagacattttcacgatcgattagctctaaagctatcctgaaaaaaacacaaagaactgaaaatacaaaatttcttgcagtcgagaatcctgctgatcttgcaatagaggcaatacgaggattaagaacgagtttacattttgcgatgttagaggcaagaaataatgtgttaatgatttctggggcaagtcctaatgcaggtaaaacctttgttagttcaaatttggctgcagtggttgcgcaaacaggtaaaaaagtattatttatcgatactgatatgcgaaagggatatgcgcataaattatttgatgtaaataacgatagtggcttatctgattttctttcaggacgaaatgaaatagagaaaataattaaaacaattcctgcaggtgggtttgatttcatatcaaggggagtaactccaccaaatcctgctgaattactgatgcaccgtaattttggtgcacttattgattgggccagtaaaaaatatgatattgtaatattagatacacctccaatcttggctgttacggatgcggcaattattgggaactatgcaggaacaacacttttagtggctcgttttgaacagaacactgttaaagaaattgatataagttccaaacgtttcgaacaaagtggagttcaggttaaagggtgcatattaaatggtgtagtcaaaaaagctagtagctattatggttatggctataaccattatggatattcttataaagaaaataaatga

SEQ ID NO: 97126 - DNA, 1230 bp, Enterobacter aerogenes
atggcaaaaatcgctaagaaactcactgacactgaaatcaaaaataccaagccagcagaaaaggaaatcaacctttttgacggtgatggcctgatactacgaatcgctcccctatcaaagggtggtaagaaaaattggtatttcaggtatgcagtgccagtaagtaagaagcgaacaaagatgagcttaggaacctatcctcatctcacacttgccaaggctcgggctttacgtgatgaatacttgtcgttgcttgcaaatggtatcgatccgcagattcacaacaacgatatagccaatgcccttaaggatgccactgagcacacgctacaagcggttgctaggaaatggttagatgaaaaggttaagacctctggtatctctccagaccacgcagaagacatctggcgaagccttgaacgaaatattttccccggtttaggcaacgttcctatcaaagagatccgtcccaagctcttaaaacaacaccttgaccccatagaacaacgaggcgtattggaaaccctacgccgtatcatttcacgtctaaatgaaattttccgttgggctgcgacagaagaacttattgagtttaatcctgcagataacctcggtcagcgattcagtaagcccaagaagcaaaacatgcctgctttaccaccgaatgaactcccccggttcatgctcgccatatctaacgcttccatacggctcgaaacacgtcttctaattgagtggcagctgcttacgtgggttcgtccgggagaagcagtccgtgctcgttggagtgatatagacgaagaaaatcggttctggaatatccccggtgagtttatgaagatgaagcgccctcacaagattccgctgagcaaagaagctatgcgcatccttgagtcaattaaaccgatcagtggtcatagagagtgggttttcccaagtattaaggccccccttaaccacatgcatgaacaaacagccaatgctgcaattatccgtatgggattcggtggtgaactggttgctcacggaatgcgctctatagcaagaacggccgctgaagaaagtggtaaattcaggaccgaggtgcttgaatcagccttagctcatactaagaacaatgaaatcatagccgcttacaatcgtgctgtgtatcttgctgaaagaacagagctgatgcagtggtggggagattacgttcaggcgcagaagcgtagagctatggcagcatga

SEQ ID NO: 97127 - DNA, 336 bp, Enterobacter aerogenes
atgctgaacacgtggatcatcctgattgtggccatcgcggccgaaacctttgcaacaaccatggtcagagcatcagaaggattcacacgcctgcttccttctcttggggtcgtcgccggttatgccgtgtcattttacggactctctcaggtcgttaaggtcatgaatctggggatcgcttacgcgatatgggctggcctgggcatctttcttgtctccattttttcctggtttctcttcggccagaagcttgatcttcccgccattgcagggatgggcttgatactgtcgggggtggtggtcattcagctgttttcctccaccgtcacgcactga

SEQ ID NO: 97128 - DNA, 861 bp, Enterobacter aerogenes
atgtgtataagagacaggctcaaagatattttgcgagtctatgagagaagctctaatatagtaattgaaagtgctgctgatttgttagattacactgatgatattaatcctatttcattaggcgatctattgatcgattctgctggtaatgattattcccttttgaactattattatgatctgcttgagaaaactatatcatctgttaaatcaaataaatatagtgagcatattaatcatgtcgttataaatagtgcattgaatacctttccaagacattactctttatttttgactgagaattttgctcctgaactttcacaggatttacaaacagattgctggagtgatacgctaagcaaaaattctgaatttatagctttacagcacaatggtaagaaacaatttatagagtggtctaagttaaattataataatattgatttccattcagatctggaatcaaccttagatactatattagcaggcacttatcttgattataaaaatctaattacaaattcattaaactcgttaaatcaagcttcttatgaattttcaactgacccacaaggaaatcaagaggaattaataagaatatctgaatacacctcaaggtttggtaagcaattatcttgtactcgacagggggcgaataaaccaaagtttgcatttccaaaaattcaggatggttcatcggaaatgattaattgtgaatatcacttgaaagttaactggaatgatcgcggtgaccgattagaaagagacaattatgttagaatctattttggtttgaaatactatgatgacataggtataaaaaaagttaaattagctcatattggcaggcatttaccttga

SEQ ID NO: 97129 - DNA, 735 bp, Enterobacter aerogenes
atgcaacaattaaataattacgcagataataggctggtgagcggttgtgtatattgtggtggcattccagaaacaagagagcatgttccatctaaagtattcctagatgcaccacttccggaaaatctatcagttgtaggagcgtgcaggaaatgtaacaacggtttttcttcagatgaggaatatgttgcatgccttcttgaagccgccatagcaggaagtgcatctccttcagacatacgaagagaaaaagtttctggtattttagaacgaacaccaaaacttcaaaaaaagttagaaagtgcgaaatatataaaagatggtgaaacctatttctcagttgatggtgaaagaataaaaagaatcataataaaattagcacaaggacatgcagcttacgaactgagtttaatttgcaaagatgaacctagctcagtttggtggcatcctatagagttaatgggcaaggaagtgagagatgattttgaatctgatcgttttgcttatattctcagcgaagttggtagcagaaattctcaaagaatacttgttatagatactaaaatggtttctcaagaaaataaagagttacatatccctattttcataaatccttggatagatgtacaagaaggacgatatcgttattttgtggatgattcatcagatgatatagtagtaagatttgttataggtgaatacctagcatgtgaggttatatggtcgaacatataa

SEQ ID NO: 97130 - DNA, 195 bp, Enterobacter aerogenes; identical to SEQ ID NO: 36234

SEQ ID NO: 97131 - DNA, 492 bp, Enterobacter aerogenes; identical to SEQ ID NO: 15993

SEQ ID NO: 97132 - DNA, 738 bp, Enterobacter aerogenes; identical to SEQ ID NO: 13703

SEQ ID NO: 97133 - DNA, 225 bp, Enterobacter aerogenes; identical to SEQ ID NO: 13704

SEQ ID NO: 97134 - DNA, 1494 bp, Enterobacter aerogenes; identical to SEQ ID NO: 13713

SEQ ID NO: 97135 - DNA, 822 bp, Enterobacter aerogenes; identical to SEQ ID NO: 25148

SEQ ID NO: 97136 - DNA, 1215 bp, Enterobacter aerogenes; identical to SEQ ID NO: 25147

SEQ ID NO: 97137 - DNA, 306 bp, Enterobacter aerogenes; identical to SEQ ID NO: 25146

SEQ ID NO: 97138 - DNA, 225 bp, Enterobacter aerogenes; identical to SEQ ID NO: 25145

SEQ ID NO: 97139 - DNA, 1200 bp, Enterobacter aerogenes
gtgaaacccaacagacccctgatcgtaattctgagcactgtcgcgctcgacgctgtcggcatcggcctgattatgccggtgctgccgggcctcctgcgcgatctggttcactcgaacgacgtcaccgcccactatggcattctgctggcgctgtatgcgttgatgcaatttgcctgcgcacctgtgctgggcgcgctgtcggatcgtttcgggcggcggccggtcttgctcgtctcgctggccggcgctgctgtcgactacgccatcatggcgacggcgcctttcctttgggttctctatatcgggcggatcgtggccggcatcaccggggcgactggggcggtagccggcgcttatattgccgatatcactgatggcgatgagcgcgcgcggcacttcggcttcatgagcgcctgtttcgggttcgggatggtcgcgggacctgtgctcggtgggctgatgggcggtttctccccccacgctccgttcttcgccgcggcagccttgaacggcctcaatttcctgacgggctgtttccttttgccggagtcgcacaaaggcgaacgccggccgttacgccgggaggctctcaacccgctcgcttcgttccggtgggcccggggcatgaccgtcgtcgccgccctgatggcggtcttcttcatcatgcaacttgtcggacaggtgccggccgcgctttgggtcattttcggcgaggatcgctttcactgggacgcgaccacgatcggcatttcgcttgccgcatttggcattctgcattcactcgcccaggcaatgatcaccggccctgtagccgcccggctcggcgaaaggcgggcactcatgctcggaatgattgccgacggcacaggctacatcctgcttgccttcgcgacacggggatggatggcgttcccgatcatggtcctgcttgcttcgggtggcatcggaatgccggcgctgcaagcaatgttgtccaggcaggtggatgaggaacgtcaggggcagctgcaaggctcactggcggcgctcaccagcctgacctcgatcgtcggacccctcctcttcacggcgatctatgcggcttctataacaacgtggaacgggtgggcatggattgcaggcgctgccctctacttgctctgcctgccggcgctgcgtcgcgggctttggagaaattcttcaaattcccgttgcacatag

SEQ ID NO: 97140 - DNA, 678 bp, Enterobacter aerogenes; identical to SEQ ID NO: 54015

SEQ ID NO: 97141 - DNA, 243 bp, Enterobacter aerogenes; identical to SEQ ID NO: 15164

SEQ ID NO: 97142 - DNA, 1470 bp, Enterobacter aerogenes
ttgaataaagaaaacgctcaacgccgtccatccgtgatgactggtgcaatatggtcggtgttagataacatggctgggcaagccattacttttgtcatctttataattttggcaaaaatgcttacacccgatatttacggaatgttgagcgtttctttgcttgtaactcagttttttaaaatgaccatatttgatagtattgcaacatctatagttaggaaaagtaatccgtcaaatattgattataattctgcctttttcctttgttttgttatttccatcccttcttttactgtcgtttattttatatcaccaataattgaacaatatatgcatatagaagggttaactactgtcataagatgcactgcagtaataattattttaagtggagcgagccgtattcatgaagcttggctctcgcataatatgctttttaaatctctagcattaagatcgattttatcgattacagttggtggatgcgtagggttgtatttggcgtatcaaggatatgctgttatgagtttagtggcacaacaaatagtaactgcatctatctctcttgttatcttatggtggaaaaccccatggaagccggaatttaagatttcaaaaaaatcttttaaagaatcttttgatttttccaaacatgttgcattgagtaactttacgaatttttcaaatcaaaatagcgacgttttttttatcacgtattttcttggtcccgcagccgcgggaatatattccgcaggtaaaaggattgtaaatactttaaatcttgtcttatcatcagctttaatgagagtatctcttccagcattttcaagattcaaggatgatattgacgttttgtctaaaaaatatataaaaatgtcatattttactgtggtgatcacggcacctgcatttataggattggctgttttagcaaaagatattaccattctccttttagggaataagtggatagcctcagtcgaaattatgcaaatcgtcagtgcggtaggtttcgttacttcgattggttattacaatcattccattatgttcgcccgtgacagacctgacaggcaagctaggctaacaatgctttatgctataagtaatataatagtgttttttattttcgtaaggtatggcttgattgcaacggccttggccttttcaataaggacaatagcgctttatccattatcagtatggtgtgcatgtgatttacttaacataaaactaagaatgtatgtaaaagagttagcgctcccggtaatctgtgcattgttaatgggtgggattatggtgtggttaaatgataattatttccagatagtcggttggggaacattgattctaaaaataatcatcggctttgttatttacttgtcttttactttgcttctctctccgaagtcaaaaaaacaagaagttttaaatctttttaaatcaataggctcaagaaaaggaatgtga

SEQ ID NO: 97143 - DNA, 993 bp, Enterobacter aerogenes
atggttggttcattagataaccctttgattagtgtattgattccttgttataatgccgcttcatttatcagcaaggctcttttgtctgtgaagaatcagacatataagaatattgaattgatagttgtggatgatttttcaagtgatgattccgttgttattgttgagaaattcataaacaattaccctgagctaaatataaaactatttactaatgaaaataacaaaggtgtttcttatactcgtaataaactaatctctaagtccttaggcgattatatattatttttagattctgatgattttattgatgatgatgctgtggaatatttatataatattatacgtgataatgacacagatatcgctcaatgcttgtattatagcgaggatgtatctggggcaccttcaggtataactaatgatttttatatggatggttttcttacaggaagggatgctgcgtttgctatgcttcaaaataatattacggggtatttatggcacaaaatgttccgtagtgaaataattagaacggttcattttgatgctaatctcaaagttttcgaagattatgaatttattatgactgtatttttgaatggcgcgagtatcgcattcggtagtcaaaaaaaataccattatattcaaagaagtggttcactaaccaaacagtcgctccaaaaatattttgaccgtgtggagtatcttgacagaacagatgcgttaataagatctcatttaacatcagaaaatgatagggttatactaacgaatcataaaataacggttctttctaatgtttatatcaatttaataaagaatggagcctctaaagaaacaatccatatgctattaatgagatttaagagtttcagcatacatcatatactaaatctcaaaggaactaagtcgaagtttattttcttcctatgtaagtactttcctgcgggcttgtcttgtttggttaatgctaagaattccattaaataa

SEQ ID NO: 97144 - DNA, 312 bp, Enterobacter aerogenes
ttgcaacagtgccctaaagactaccagggagggtattgggaataccttcaggccagcaatggcgcgttttttatggaagcgccccaacctctttggctctcgttacctaactattttgaaggtgaatgcagcgcgcgcgaagtagggattattgtttgtctgtatgcctacagttacttttgcgggctggcatatgaagaaggcaaagccgaactgaacgaaacgatggctaaccggtatcacctgttgcgggagtacgttaatacgctggagaacgaaagccagaatcgtatttatcgtgccattgattaa

SEQ ID NO: 97145 - DNA, 405 bp, Enterobacter aerogenes; identical to SEQ ID NO: 16822

SEQ ID NO: 97146 - DNA, 240 bp, Enterobacter aerogenes; identical to SEQ ID NO: 16823

SEQ ID NO: 97147 - DNA, 156 bp, Enterobacter aerogenes
atgaatacgattagcataacggaaatcgtgttgagtgtgcttcttgcgggcgctttggggccggttttattacgtcgaaaaaaaggtctgctgttactgttgttgattctggtctgcacgatacttttgcttcatggtgtcactacgatttactga

SEQ ID NO: 97148 - DNA, 546 bp, Enterobacter aerogenes
atgtggtcgaaaatctttaaaagcgaacccccggacgtcacccctccggggccgttctgctgtgctgcgcatcgagccgctacgcgtctcgccccgctcacgcgggcagctgccactgacgcctccggcctgcggcctccgcgctccgcttggcaaccccttcccctgctgccgctcatttccccttcagcctcctatcatgattcgtctcctgcattatccgtggattgtgcagctcagtggggcgctggccgtgacggtgcggtgtcccccgtaaccggccgcgcggcggccgctaactcgcagtacggcgccgcgacccgcaggcgggccgccgtacccgcgcgcaggcgcgcggcgcccactgcgcacccccgtgggggacgtgcggcagctgcgtggcggcgggctgggttatggcttagcaggaaggggggttggcctgttgctccggtcagtcccgcagtttccggcgatttgcggccggtgtccggtggagtccggcgcggtcgccttccatgccctgacgggcataaaaacatgtaa

SEQ ID NO: 97149 - DNA, 297 bp, Enterobacter aerogenes
atgcactttactaacttccttcagcgttacttcgatatagagattgaacatacctttgaccctaccattcagggcagcaacgaaacgggtaaagacgtcactaaaatctggatctatgagaagggcgaggatagcgaaccgctgcttactctgacagaagcatggtggtataccgagacaaaaacggctggtaactggcttatcggcaacgtgtattcaacgcttgagcatgggcgtgaaattcatgaaagcgaatttcgtaaactggtaacagctggcaaggtgatatcagcatga

SEQ ID NO: 97150 - DNA, 360 bp, Enterobacter aerogenes
atgagtaaggggaataaaatgcttattaatcggatagcggttatcgggcttgcagttgtcgcagccgctacgcaggcaggtgtgccgccggttaagtttttttaccgggatacagtcccggtaagcattacgctggacgaacccgcaacgggttgcagcatggccggtgtgattgttcatccagtggatcggccagcggcaaaagtggcgtggtttagcgagcggatttgcggtaaaaaacgttacccggttagctttatcagtgatgaaattagcgccccgcataacgtgatccataaaggggaaaagtttcacgttaccccggctcaggtcaatctcctggacgcgcaaaacctctaa

SEQ ID NO: 97151 - DNA, 285 bp, Enterobacter aerogenes
atgtatcactatctcgtttttgtccctctcgcattaatttttagcgccgctgcgcttgccctgccctggtttatcgttcgtgcgggatacagggatctggtgcagatcacctgcgcctgcgtctctgttctgggcctgtgtgcggcgacaggggttttcagctacttcgataataagccgcttgcgtttctgtacggttgcggcgcgctggcgtgctttttgtacgcggtagactgcgcgataccgttgtatatgacgcgtaaaaagccacgtaagcagctgtaa

SEQ ID NO: 97152 - DNA, 333 bp, Enterobacter aerogenes; identical to SEQ ID NO: 16829

SEQ ID NO: 97153 - DNA, 180 bp, Enterobacter aerogenes
atgaccactgttaccaccccttcccagctgaaaaaagaagtcgaatctcagaaagaattattgctgcgcgcctgcctcgaagcgttcaaccagctgcctaatcagcgcctgcaaggcgctttcacatcgacgtatgcactggcggcaaaattagaccagctgctgcaacaaactaaatag

SEQ ID NO: 97154 - DNA, 321 bp, Enterobacter aerogenes
atgaccacacaaacccttgagcagactcttgaagattttcgtcgccagtgtgagagttttgcgcgcgaacagcagccccgctgcggcctgatttatgaactgtatcagcgccgcctgagcgcggttattgacggctatcttgctggcgttccggccgagtatcgggaagaactgatcgcggtagcgcggcgtgaatttgactatctgacccaagacgagatcgcggaagaaatccggcaggatcgggaaaacgattattgcagccacggtattgagcgtaattgttgcccgctgggctgcggagatctagacgattactga

SEQ ID NO: 97155 - DNA, 345 bp, Enterobacter aerogenes
atgaatgaccgacagcgtgaacaagcccgtattcgccaggcccggcgccgcgcgcgactcaaagaggaaggcgctagcgtgacagtcacgctaacaaaacaggaagaagcaatgttacaggagctttgccgggttcgtcgtccaggacgaacagcctattccacgaatgagtttttccaactgctgctgatccgaaactggcaacagtggcaggagcaaaaggcgcagctggggaaatgccaggcttgcggaaagctgaaagcggagggaggttgcggcggcgaacggcagagcgaaacctttaactgctggctagccgtcgaagcaaacgagcttaatgtgtag

SEQ ID NO: 97156 - DNA, 369 bp, Enterobacter aerogenes
atggaaaagcagccagataaatttgaagttctgatggattggtttttaggtgacgcgaaggaaatcaccgcaagtcagaaagaaatgactgagatactttctgcgctttcggaaaagctggcaaaagacaccgaaagtttaggagagacggcagactctcttaaacggactttagtagaaaaccagcgttcaattagcctggcaattagtgatgatgctaaggcgcgtgaggaatttctgacgaagttccgccgcgcgcaggcgtccagagctgagacgttaacccgtcagatcctttttattacagctggctgcactattgtgggcgccgccgtgggtgccgcgatagccataattctactgagataa

SEQ ID NO: 97157 - DNA, 717 bp, Enterobacter aerogenes
atgaaagtagcggtaattaattacagtggcagcgttggtaaaaccttaatttcatcctacctgttagccccgcgtctgactggagcaaaattctatgcggttgaaactatcaaccagtctgcttccgatctggggattgagaatgtttccatttttaaaggtgatgacttttcacggttgattgaagatattgtttttgaagatgccgggattattgatattggtgcgtcaaacgtagaagcgttcctgatggcaatgtcccgctttgacagtggcgcgaatgaatttgataagtatgtaatcccggttacgcctgataataaggccattgatgaaagcctgaaaacagcacatacgttaagtaaggcaggtgtaagcagcgataaaatcatctttgttccaaaccgcattagtccagatagtgaagtagaggatgtactggcgccggtatttgaatttgtcaaacgaacgaaagttggcaaaatcagcaagaaatctgttatttataacagtgaagttttcgaatatctcgcgtatcaccgtatctcattcgaagcattgaccgctgaagatccagaagaatttaaagcccgcgctaaacaaacaacggatgctgacgagcgcaaaaaactggcccgccgttatacctacatgaaacaggcaattcctgttaaagctaatctcgataaagcatatgcggctttaatgggagaataa

SEQ ID NO: 97158 - DNA, 420 bp, Enterobacter aerogenes; identical to SEQ ID NO: 22854

SEQ ID NO: 97159 - DNA, 417 bp, Enterobacter aerogenes; identical to SEQ ID NO: 16834

SEQ ID NO: 97160 - DNA, 1530 bp, Enterobacter aerogenes
atggacgatagagaaagaggcttagcatttttatttgcaattactttgcctccagtgatggtatggtttctagttgcaaaatttacctacggtattgatccatccacggctaaatacctgattccgtatctggttaagaatactttttcgctatggcctttatggtcagctttaattgctggctggtttattggtgttggcggtctgatcgcttttatcatttatgataaatcacgcgtgtttaaaggcgaaagattcaaaaagatttatcgtggtacagagcttgttcgcgccagaacactcgctgataaaacacgcgaaagaggtgtcaaccagttaaccgtggctaatatccccatacctacatacgctgagaacttgcatttttcgattgccggtacaaccggtactggtaaaaccacaattttcaatgaactgttatttaagagcatcattagaggcggcaaaaatattgctttagatccaaatgggggcttcttaaagaatttctatcgtcccggcgatgttattttaaacgcctatgataaacgcactgaaggctgggtgtttttcaatgaaattcgccgttcatatgattacgagcgcttagtgaactctattgttcaggaaagccctgatatggctactgaagaatggttcggctatggccgtcttatttttagtgaagtttcgaaaaaacttcacagcctatatagcacagtaactatggaagaagttattcactgggcctgtaacgttgaccagaaaaaattaaaagaatttttaatggggacgcctgccgaagctattttttccgggtctgaaaaagcagttggaagcgcgcgatttgttctcagtaagaatcttgccccacatttgaaaatgccggaaggtaatttttccctgcgtgactggcttgatgatggaaagccgggaaccctgtttatcacctggcaggaagaaatgaaaaggtcacttaatccgctaatttcctgctggctggattcgattttttctatcgtgctgggtatgggtgaaaaagaaagccgcattaatgtatttattgacgagctggaatcactccagtttctgccaaacctcaacgatgcactgaccaaagggcgtaaaagcggtctgtgtgtttatgctggctatcaaacctattctcagctggttaaggtttatggtcgggatatggctcagacaattctggctaacatgcgttctaacatcgtgctgggcggcagccgtctcggtgatgaaacgttggatcaaatgtcgcgctcactcggtgagatagaaggcgaagttgagcgtaaagaatccgatcctcagaagccctggattgtccgtaaacgccgcgacgttaaagttgttcgtgccgtaacgcctaccgaaatatcaatgttgccaaacctcaccggctatctggcgttgcctggtgatatgcccgtcgctaagttcaaggctaaacacgttaaataccatcgcaaaaaccctgttcctggcattgaactgagggagatctga

SEQ ID NO: 97161 - DNA, 3237 bp, Enterobacter aerogenes
atgcttgatataaccacgattacccgccagaacgtcactagcgttgtgggctactactctgatgcaaaggatgattactacagtaaggattcatcattcacgtcctggcagggaaccggagctgaagccctcggcttatccggggacgttgaatcagcccggtttaaagagctgcttgtcggagagatagataccttcacgcatatgcagcgacacgtgggtgatgccaaaaaagagcgtctgggctacgacctgacgttttcagcgcctaaaggggtatccatgcaggcgctgatacacggcgataaaaccattatcgaggctcatgaaaaagctgttgccgctgctgtgcgtgaagctgaaaaactcgcgcaggcccggacgactcgccaggggaaatcagtaacccagaataccaataaccttgtcgtcgctacttttcgccacgaaacgtccagggcgctagatcctgatttgcacacccacgcttttgtcatgaacatgacccagcgcgaggacggccagtggcgcgcgctcaaaaatgatgagctgatgcgtaacaaaatgcacctgggcgatgtttacaaacaggagctggcgctggagttgaccaaagccggttatgagctgcgttacaacagcaaaaataacacgttcgatatggcccatttttcagacgaacagattcgcgctttttcccgccggtcggagcaaattgaaaagggactcgctgcaatgggcctgacgcgggaaaccgccgatgctcagacgaaaagccgcgtctcgatggcgacgcgtgaaaagaaaacagagcattcccgtgaagaaattcaccaggaatgggccagccgcgccaaaacgctaggcattgattttgataaccgtgaatggcagggacacggtaaacctctggaggctgatattgcgcgcaacatggccccggattttaccagccctgaggttaaagctgaccgggctatccagtttgcagttaagtcgctgtcagagcgcgatgccagctttgaacgccagaagctgattcagatcgctaataagcaggtgctgggccatgccacaatggccgatgttgaaaaagcgtacctgaaggcggtacagaagggcgccatcatcgagggcgaagcccggtatcaatcaacgctgaaggtcggtgcttcagttatggccgaaactctgacgcgcaaagagtggatcgactcgctgacgaatagcgggatgcgtgcggataaagcccgttttgcggtagatgatggtattaaaaacggcaggcttaaaaagaccagccaccgcgtcactaccgtggagggtattcgccttgagcgttccattctgactatcgaatcacgcggccgggggcagatgccgcgacagctgaccgcagagattgcaggccagctgctcgccgggaaaaccctcaagaatgagcagatgcgcgcagttacagaaattgtgacgagcaaagatcgttttgtggccgcacatggttacgccggtaccggtaaaagctatatgacgatggccgctaaagagctgctggagtcacaagggctgaaggtcacggcgctggccccctatgggacacagaaaaaagcgcttgaagatgatggattaccggcccgcaccgttgccgccttcctcaaagcgaaggataaaaagctggatgaaaaatcagtcgtattcattgatgaagccggggttatacccgcccggcagatgaaacagctgatggaggtgatcgagaagcataacgctcgcgcggtattcctgggggatacgtcacagacgaaagcggtagaagccggtaagccttttgagcagctgattaaagcaggtatgcagaccagctacatgaaagacattcagcgacagaagaatgaagttttgcttgaggcggttaagtatgccgctgaaggtaatgccgcgcgcgccctgaaaaatatcaccggcgtgaacgaactgaaggaagaagcgccccgactcgctcaacttgccgatcgctacctgtctctgtcctcagaacaacaggatgccaccctgataatctctggtacgaacgcctcacgcaaaaccctcaatgactacatccggggcaatctggggcttgccggaaccggcgaaacgttcacgctacttgaccgcgtggattcgacacaggcggaacgccgcgacagccgttatttcagtaaagggcaaatcattatccccgaacaggattacaaaaatggtatgaagcggggcgagtcttaccaggttcttgataccgggccgggcaacaaattgacggttgaaagcagcagcggtgagcagatcgctttcagcccgcgtacacacaccaagctgtctgtataccaggcagtcagcgccgaactggcgccgggcgataaggtcatggtaacgcgtaacgataaaacgctggacgttgccaacggcgaccgcttcacggtgaaaaccgtggagggtgaaaaactgacgcttgaggacaaaaaagggcgcacggttgagctggacaaaaaacaggcttcttatctttcctatgcttatgcaaccaccgtccacaaatcccaggggcttacctgtgatcgcgtgttgttcaacatagataccaaatcgcttaccacttctaaggacgttttttatgttggtatttcgcgtgcgcgtcatgaggtggaaatttttaccgacgataaaaaatctttggcatcgagcgtgagccgcgacagcccgaaaaccacggccgcagaaattgaccgtttctttgggcttgaggccaggtttaaggatattggccgcgataccagtttagaaacccgatcagctgaaaaaggtctgccagaagccacgggggaaagcatggcgtttaaccagaaacccgatgaacataacatgacaaccggcactgattatcagccggtgagcaacgcagaggacgcctttcatcttaagcagaaccctatggatgattccgttggcctgcggcgtcatgaagcacagcaaaatgatgcagaactggcccatgattatgctgctgccgacgatcagcagtggagcgcgcaggagtatgccgattacgagcattatgccgaagcatcagactacgactttgacagcagcatttacgacgattacgccatgccgcagacgtctcaggcggaacagagccataccggaaaagaacacacccatgagcatgagcatgaagaagggggccatgaaatctga

SEQ ID NO: 97162 - DNA, 366 bp, Enterobacter aerogenes
atggagcagaccgacaagcgcaagcaggataaactgaagttcgaccgggtaattaatctggcgcgcagactgccgcaaccggcgatccatgacttactacgcgcgctgatactgccaattcaggccgattacttgctggccgttggcacggagggccaggacgcgcgcccggacatgaacgagcgcgagttcttcttcacaaaaatcatctgggcgatggattacacgcacatgaaatcactcaggcttgcagctgaagattttcccctggcgcttgcgacggccaagatcctgccgtggccgtggggtgaatcaagctaccggagtgctttagccgatataggggttcgaggttcaatcgtgtaa

SEQ ID NO: 97163 - DNA, 1836 bp, Enterobacter aerogenes
atgtctctaaaactacccgataaaggccagtgggcttttattggtctggttatgtgtcttgtgacgtattatactggctcagttgctgtttacttcctgaacggaaaaacgccgctttatatatggaagaattttgattccatgttgctgtggcggataataacagagagtaatatacggacagatatcagattaaccgctatcccctctcttttatcaggtatggtttcatctctcattgtgcctgtttttataatctggcaactgaataaaacggatgttgctctttatggtgacgcgaagtttgccagtgataatgatttaaggaaatcgaagcttctgaaatgggagaaagaaaacgatactgatattctggtcggggcgtataaaggtaaatacctgtggtataccgcaccagattttgtatcacttggcgcaggaacccgagcaggtaaaggggctgcaatcggtattccaaacctgctggtcaggaaacattccctgattgcattagatccaaaacaggaactgtggaaaatcaccagtaaggtacgtgaaaaactgctgggtaataaagtctatcttcttgaccctttcaacagtaaaacgcatcagtttaacccgcttttctatattgatttaaaagcagagagcggggctaaagacctgctgaagctgattgagatcctgttcccgtcttacggtctgaccggagcggaagctcactttaataacctcgcggggcagtactggacggggctggcaaaactgcttcatttctttattaactacgacccttcctggcttggtgagttcgggcttaaacctgttttctcaattggttctgtagtcgatttgtacagcaacattgaccgggaactgatactcagtaagcgagaagacctggagggaacgaaaggacttgatgaaaacgcactgtatcatctgcgcgatgcactgaccaaaatcagggagtatcacgaaacagaggatgaacaacgttcgagtattgatggttcgtttcgtaagaaaatgagtctgttttatcttccgactgtccgtaaatgcacagacggaaatgattttgaccttcgccagttgcgccgggaagatatcactgtttatgttggcgttaatgctgaagatatgtcactggcctatgacttcctcaacctgttctttaatttcgttgtggaagtcacgttacgtgaaaaccctgactttgacccgaccctgaaacatgactgtctgatgttcctggatgagtttccgtctattggttacatgccaatcattaaaaaaggttcgggttatattgccgggtttaaactcaaacttctgacgatttatcagaatatcagtcagcttaatgaaatctatggtgttgaaggtgccaaaacgctgatgagtgcgcatccctgccggattatctatgctgtcagtgaagaagatgacgctaaaaagatttcggaaaagctgggctatatcaccactaaatcgacaggatcaagtaagacaagcggacgctcgacgtcgaaaagtagttcagaaaatgaggcgcagcgcgcccttgtgctcccgcaggagctgggaacgctggattttaaagaagaatttatcattcttaaaggtgaaaacccggttaaagcagagaaagctctctacttcctcgacccgtattttatggacaggctgatgatggtaagccctaaacttaccgagttaaccgcctccctgaataagactaaaaaagtattgggtgttaaagggcttaaatatccttctaaagaaaaaatgctctccgtcggtgagctggagtcagaggttttactatga

SEQ ID NO: 97164 - DNA, 471 bp, Enterobacter aerogenes
atgagacattttcttaatgctctttcctttgctgttgccctgttgccagctacattgtgtgctgctcagattcaggggaaggttattcgtgtacttgatggtgacaccattgaagtattgcaggagcaacaacctgtcagggttcgtctcctgaatatcgatgccccggaaaaaaaacaaccctttggacgctggtcaactaatcaacttaaagccattcttgcaggacaatccgttaccgtctcttatacacaaacagatcgctacgggcgaatcctgggacgagtgataacagcgaacggcactgaggctaaccgccagcaagtgctaaaaggggctgcatgggtttatgacaggtacaacaccgataactcattaccggctctgcaacgggaagcacagacacagaagcgcggcctgtgggctgataatcaacctgttcccccgtgggaatggcggcataaaaaataa

SEQ ID NO: 97165 - DNA, 435 bp, Enterobacter aerogenes; identical to SEQ ID NO: 80549

SEQ ID NO: 97166 - DNA, 303 bp, Enterobacter aerogenes; identical to SEQ ID NO: 80550

SEQ ID NO: 97167 - DNA, 597 bp, Enterobacter aerogenes; identical to SEQ ID NO: 80551

SEQ ID NO: 97168 - DNA, 2328 bp, Enterobacter aerogenes
atgagactttttattgcagaaaaaccctctttagcaaaagcgatttttgaagggctgggtggtaacccaaatactgaaaagaaaaacggctactttgaacatggctctgatgtcgttacctggtgttatggtcatatgctggagctttacgacccggaggattatgacgaaaaatattccaggtggagctttggtgatttaccgattaaatcggtttacccgcctcagtataaaatcaagccagaatccgaagtacagacccgcatcattttgtctcttatcgataaagccgacagtatcgttcattctggcgaccccgatgatgaaggatgtttgctggtcgatgagattttaggttatgccggaaacaagaaacccgtccagcggctgcttgttgccgacctcaaccttgcgccagtgcaaaaatcgctggctaatttacagcctaacgataaatttcgcggtatgacgttaagcgccctggcgcgttccctgtgtgatcagggttttggctataacatgacgcggggatgtacattaaaaggccgtgagaagggctatgacggcgttctgaacgttggtcgggtacaaagtgctgttcttggcctggtgaacatgcgcacgctggcgaaccagaaccacacagaaagcttttattacgatgtatttgccagtctgtcgatgaacgggcatcagattaaggcgaaatatcagacaacagacgacgatcagatagacgagaaaaaacgcctgatttccgaagctcaggccgagcatattgccgggcgggttacgggtaaggacgctattgttactatcgcgacgacaaagccggaaaacacgaaaccaccgctgccgcttaacctttccacgctacagcagctatgcgcaaagcgatttggttattctgcaaaagatacgctcgatgtgatgcaggggttgtatgaaactcacaagcttctgacctatccacgttctgacaatcgctatctttcagatgagcattactaccaggccggagatattgctgccgcgatagcggccaccgtacccgaactggcgtctgcgatcgcagatatggataaaggccagaagcacaaagcctttaatgccagcaagattgaggcgcaccacgccatcatcccgacgacaaaaagcggagccggtattcagcttaatgaaaaagagcggaacgtttataacctggtgtccgtctactttatcgggctgttctacccggatgcgatccgcaacaagacgaaaatccactttgatattaagggggatacttttacggccacacagagcgttctggtacaaaagggctgggaggcgctaggtaaggatagtgatgatgaggacgaaaccgaagatgccggaacggatggttttgatctttcattgctgaaatttaatgacagcggcctgtgtgaatcggcagacgtggacaagaaaaagactacaccacctcgctatttcacagagtcaaccttactggccgccatgacgagtgcagcaaaattcattgatgatccggctctcagaaaggcgctggaagcgaaagacgagggcagcagtgatcgtggcagtatcggaacggaagccactcgcgcgggcattcttgagaaactggcggcaaataccgggcttatctccatcgaaaaagaaaaggggtattcggagctggtatggaaaaccacaaaacaaggccaggagttttgcgctgcactgcctcctgaaatcactaaaccggatatctccgctctgtgggctgaaaagcagtctcagatcaaagccggagagctgacggttgaggagtttattaaggaaaatgatgagtatgtccaggggttaatcgacgagctggacaggaacggaatttcgatttcttcaaatgccacgtcctgcccggtctgtaacaacggtttcctgcgtaaacgtaaggggcaaaatggctttttctggggatgctcctgctatcctgaatgcaagacaacattcccggacaaagacggcaagccggatatggaagcaaaatccagatcagaaggttccatgtcccggctcgaagccccctgcccttcatgtagtaaagaaattattatccggcctaaaggctttttctgttccgggtgcgagtttaaaatctggtctgaagtgtcaggaaaaaaactgacacaaaatcaggttgaaacattaatcaaaaaaggtaaaaccggagagattaaaggctttaccagtaataaaaccgggaaaaagtttgacgctgcaattgttttgcaggataaagctacgggtaaacttgggtttcagttcagtaaaaaataa

SEQ ID NO: 97169 - DNA, 651 bp, Enterobacter aerogenes
atggatatcaaacctaactcagtgatccacctggagccaggcgatacattacccggccataccaatctgaaacccgtacctgataagtatctcgatgagttaaaggcactcataaataaactcaatactcaatcaggtaatatttacctcaagttaaaacagatgtacgcctttttggatcgttttaacaaagaatttgtgagcacgtttacctcctgtcaaaaggggtgctcttcgtgctgtaaaatcgatgttcatttaaccgcgcttgaggcaacacatattgcacaagcaagtaaactcactgccagagacaacccgcttacgaccgggcatgagtcaaaatgtccgtttttgtctgagaagggaacatgctcaatctacaattaccgcccgctgttatgcaggacatatcatgtactcactccgccggaaatgtgtaacgacccggatgcacaagtcatgcagtatggttctcaaagtgcgaacatgggaaatcacatctacaaaacaatagctgagtggatctattttcagacgtatcactgcactggtaagttagaaaccaaagatatcagagactacttcccttatccccgcgaagatatccaaagatttcttcaccataaccccccgcgccctttttgctaa

SEQ ID NO: 97170 - DNA, 822 bp, Enterobacter aerogenes
atgacaagagccacggaacgcgcttacagcgagctacaacaggcgtttgatttctataaccagcgcctttttgacggcgaactccctgactgtctgattacgttccagcgcggcaagaacacaatgggctatttcagttacaggcgctttgttgctgctgacggcagcggcaggatgattgatgaaatcgccctcaatcctgaatacttcccggtgtacccgcttattgaagtcatgcaaacgctggttcatgagcagtgccatatgtggcagtaccactacggcaacccgtcgcgtaagacgtaccacaatgcgcagtgggcggcaaaaatggaaagtatcggacttatgccctcctccaccgggagacctggtggtgcgaaagtcggccagaagattaatgactatccgatccctggtggccgcttccagcgcgtcacactggaactgttccaggggcaatttgctttgagctggtttgatcgcttccctgtccaggtcgaacaacaaaaagatatgaccgccgtaatagagcaatggcgcgaaacgcttgctctggcgcatcaaaatgctgaggccgggattgatatagaagcggtgctttctatggctctgctgccgtcagtgtcaccgcagaacgggagccattcagatgatatggccgggagcaatgacaatgatttgtcagttgcagcatttgaggacaagccaaaacgaaataaagttaaatatcagtgtcgcgggtgtggcgctgccgtgtggggcaaagccggactgaatattgaatgcggcgattgcgagctggctttcatcgaaaattaa

SEQ ID NO: 97171 - DNA, 255 bp, Enterobacter aerogenes
atggggcattacacaatcagaacgaatgacgacgaagatcaggccattaaaaaggcgcaggaagcgaccggacaggcatcagccagcaaaacctttatgacggctatccttgagcttcagcgtaacagagacgagatggcgcagctacggcgtgaactggcgcaggaaaaagcgcggagtcaggagctggtatcatcggtaaaacaattccgttccagcctgaacaatctgtttgatctggctgacaacccttaa

SEQ ID NO: 97172 - DNA, 276 bp, Enterobacter aerogenes
gtgcataccacaaatgcgattatcctgtgcctggtgtcatatccctgcatcgttgcatgggttatctataaaaacagatttgtcgattacttgtttttaactctgcttgcttgtttggggagcattttttcagtcgtattgtataaacagcccgactactcattgaccatatatcaggccgttgctgtcggctatgctgccgtgatcatgccaacggtgttagttttgagtgtcgttaatatcttcatgggaaaagcagagagaacgtgcaaatga

SEQ ID NO: 97173 - DNA, 279 bp, Enterobacter aerogenes
atgaatacactggctgcactggaaaatacgtttcgtgatatgagaaagcatggctgccaaacagtcatggtcacgcagtctttagctgattttggccgctacagctataaaccgcgccctgcatttcaggactggatcgaacggctgaagactggcgaacgtctgccgcgaggccgttactttgttggcaagaagcctggtggccgcctggtgctcattgatgaattggggggaacatggacagaaaaagtaacagtgattcataccaacgctggatga

SEQ ID NO: 97174 - DNA, 765 bp, Enterobacter aerogenes; identical to SEQ ID NO: 6031

SEQ ID NO: 97175 - DNA, 1209 bp, Enterobacter aerogenes; identical to SEQ ID NO: 14805

SEQ ID NO: 97176 - DNA, 1434 bp, Enterobacter aerogenes
atgtctgaatttgaattactggcgcaggatctgcttgagaaagcagaagcggaagaacaactgcgacaggaaaatgataaaaagctgctcgggcaggtgctggaaatctatgaccagaagtacgtggctgaactgcttagaaaagttggtaaaaatgagtggagtcgcgagactcttaatcgctggattaatggtaagtgctcacctaagacgctgacgttagccgaagaggaacttctacgaaaaatgcttccggaagcgcctgcacatcaccctgactatgccttccggtttattgacctgtttgctgggattggaggtatacggaagggcttcgaaaccatcggtggccagtgcgtttttaccagtgaatggaataaagaggctgtgcgcacatataaagctaactggtttaacgatgctcaggaacacactttcaatctcgatattcgtgaagtcacgctcagtgataaacctgaagtacctgaaaacgatgcctatgcttacattaatgagcatgtgccggatcatgatgtacttctagcaggtttcccctgtcaaccgtttagccttgcgggcgtaagcaagaaaaactcgctcgggcgcgcgcatggtttcgaatgtgaggctcagggaacgcttttcttcgatgtggcgcgtattatccgcgcaaaaaaacctgccatctttgttcttgaaaacgttaaaaacctgaagagccatgacaagggtaaaacctttaaagtcatcatggataccctcgacgaactgggctatgaagttgcggatgcagctgagatgggcaaaaacgatcctaaagttatcgacggaaagcactttttacctcagcaccgagaacgtatcgttttggtcggtttccgccgtgatctgaacattcaccagggctttaccctgcgcgatattagtcgtttttatccggaacagcgtccgtcatttggcgaactgctggaacccgtggttgacagcaaatatatactgacgccgaaactctgggagtatctctataactacgccaaaaagcacgcagctaagggtaacggattcggttttggcctcgttaatcctgaaaataaagaaagcattgcccgtacgctttctgctcgctatcacaaagacgggtctgaaattctgatagaccgtggctgggatatggccacaggtgaaacagacttcgcgaacgaagaaaatcaggcgcatcggccccgcaggctgactccgcgagagtgcgcgcgccttatgggttttgaaaaagtagatggcaggccttttcgcattcctgtgtcagacactcagtcgtacaggcagttcggtaactccgtagtggtgcccgtgtttgaagccgtagccaaactgcttgaaccttatatcctgaaagcggttaatgccgattcgtgcaaggttgaacgaatctga

SEQ ID NO: 97177 - DNA, 648 bp, Enterobacter aerogenes
atgaccatgatccccttccccactacagaaaaccttattctatgggcttgcagcgccatcgcactgcttgccgttgtattcttccggcgttcagtacggcacaggcgacacaaaaggaagcagcaaagtgcgcggcgggtgctggagcgcataaagacgttgccgggcttcccacaaaaaattgactacctgaggaaaattgatccttttgtgtttgaagaactgttgctggaaggatttgaagcgcatggcttcagaaccatcagaaacaaacgctataccggcgatggaggcattgacggccaggtaataataggaaaatatcgctatcttattcaggctaaacgctatcgcggccatattgctttacagcacgtacaggagttcgagaagttgcttaaacgtcataactgtcgcggtctgttttgccataccgggaaaaccggcgcaggttcaaaatctgtcagtattgccagtgaacggatggagattatcagcggccagcgcctgatagatttgctcacgcccggcagctccttcactatcgcaaccgccccgcagacgatgatgaagcgtaccgcagcaacactagaaacgagcaccattgttaaagatgccggtaaagaaaatcgataccatgagagttaa

SEQ ID NO: 97178 - DNA, 312 bp, Enterobacter aerogenes
gtgaaaaaaataatattaagtgcattagcctgtacagctctcttaactggttgcgtcagccaggataaaggtaatgcgatgcagagccagctgaataaccagcaacgccagattaacgaattatccgttcgtttgcagtctgcggagtcccggctatcaaagcaggaagaaaagctgcgcaacgaactgctgcaatccagcggctattgctatctgaatggcgcccgctactcgaccggcaccgtactttacgggcggatttgccagaatcagtcaggcagcgcttcgtggcaggtatacagccgtcgctaa

SEQ ID NO: 97179 - DNA, 315 bp, Enterobacter aerogenes
atgaagaaactcttaatacctctgatagcagctggtagtctgctttatattcctgccagccatgctgaagatccctgcaaagttattatgtgcatggcgggcaagctcaccggcgatagcggcggaagcgagtgtaacagtgctgaagctgctttcttcaatatcgttaaaaagaacaagcacggctttttacccaaccacacgaaggatgccaggaaggcttttcttaatgaatgcccggataatggcgaaggtggaagtaaccagtcgatgataagccagatcataagtaaatacgggaaagttcgcttatag

SEQ ID NO: 97180 - DNA, 345 bp, Enterobacter aerogenes
atgggcgaacttattgattttgcggaaaggcaaaaaagcagaaggaagaaaaaggcatcttccattccgcccatttttagaaaatttcgtgtccatgcgatcaggttactcgccagcatcatcaaatccggctcttattcagttgcttatattgttaagaaaattacaggaaagttaatcaagttttacacaattttaacgattttcgtttttgttgtcgaatatattgcaggcgatataggttacaaatctatttataacgcagcgttattattaatattgcttaccgttatcaacattctggcgagtgtatatctgaacaaactgttaaggacaaaacaatga

SEQ ID NO: 97181 - DNA, 306 bp, Enterobacter aerogenes
atgctggttcccctgaaatcagaaaaacgaccaaaaggcgaacccgtgtatcgtgacccggataacccttttaatacgtggactggtatagggaagcgcccggcctggctaactgcaaaattggacgctggcattagcctggaagccatgaagatgcagggcgtagccaaccccagagaacatagaccagcaaaataccgcgaccccaggaacgcagaaaatacctggtccgggactggccgccgacccacatggctcaaagagctgcttgatagtggtttatcacttgatgatctgaagatataa

SEQ ID NO: 97182 - DNA, 600 bp, Enterobacter aerogenes
atggcgtacatcgtcggccatgagtcctcaaatgggccgtacaggatcaatattaacggtagtattcagttaaaacagcaaccgcgtactgaagctgaggccgtcagcgttgcgaaagttctgctgaaggataataaaagttttgatatgggccttgcacaaattaactcaaataatttagtgggcctgggtctttcggttgacgatattttcaaaccctgcatcaacctgcgggcgagccagaccatccttaaagcctgttatgatagcgccctgaaatcctacccagccgggcaggttgcgctgagacacgcgctttcctgctacaacaccggctcactcacaaacgggatttctaacgggtatgtcacgaaagttatcaacgtggcgcgtcaatcaactgatttgaaaatccctacgctgctacctgacggccagaccagtgaggacagcaccgcgactgagcctcagcaggcaaaaagtacggcgccgcagtatgacggtgaacaagatgtttttggttcgggtgatggcgatgccttcagccgaaataatacggatgcctttttaaccagacaggaaacagcgaagggggaatga

SEQ ID NO: 97183 - DNA, 282 bp, Enterobacter aerogenes
atggaacgtttgtaccttgtattgcaatcacagatcctggagctatttgaagcaggaaaagtgaaggaggtaacgatagaacgggtttcattaaagaagtggtatcccgtttttcagatagacgatgaacagctgggccagatcgcatgttccattagggttaacaaagagcatgagctacgaacctgggctgatttaaggctactggcagagtttttgaaagataagtgtggcgttgaagaatgccggttaaatctgcaatcaacagaagatagtgagtaa

SEQ ID NO: 97184 - DNA, 294 bp, Enterobacter aerogenes; identical to SEQ ID NO: 16852

SEQ ID NO: 97185 - DNA, 318 bp, Enterobacter aerogenes
atgttcgttgacgggaaaagaccgcttttcaaaggtgcgactcgcttacctcgcgcgctgggtgtaccacgtaatgtagctatgatgatattcatgatttctgcctcgctttttatgattattcatatgtgggcgattctggtgttcgtctttttgtggattccttcagctgcattaacaaaatatgacgaccgcatgtttcgaattatgggcctgtggttgaaaaccaaattcagtaattggtttgattctccgtttaagcagtggggaggatcgtcttattcctctgttgactacaaacgtaagggtttaaaataa

SEQ ID NO: 97186 - DNA, 2601 bp, Enterobacter aerogenes
atgagagctgccaccgctacgaagccaaaaaaaattgatgcctaccgtaaggagccatcagtaaataaaaagtatttgccctattcttatcacctcaatgattacgtgatttcgatggaaaacggcgatctgatggcttttttcaagctggatggccgcacacatgactgcgcatcagatcgggaactggtcacctggcataaagaccttaatacgctggtcaagagcttcggaacagaccatgtagagctgtggacgcatgaatatcaccatgaggctaaagagtacccggatggtgagtatgaccattttttccctgcttatgttgatcaatataaccgtaagctgcacggtgattccaagcagctgattaatgacctttatctgaccgttatttacaaacaggtaggggataaaacacagaagtttctggcgaaatttgaaaagccgactcgtgacgaaattcagcaaatgcagaatgaggcgcttgaaggtctggaagatatttctgaacaaatcctggaagcaatgaagccgtatggcattcagcagttgggtatctattatcgtgacaaacgcggtgttgaaattcctgcgcctgataaaaaagaacgtgaagaacttgctgaagtcgatgaatcagacatttttgacgaagccattgttatcgaacgcaacgagcctgaaccttcgcaggctcacgcttattcaaaagcgctggagttcctttatttcctcgcaaatatggaatgggccatcgtgcctgtttgccgtgatcgtatccgtgagtacatcatggacaaccgccctgttagctccctgtggggggatgttgtccagatcagaacggtagatcacaacttctataccaccggcattgaatttcgtgaatacgaagaagatacagagccaggccagcttaacatgcttaaagaagccgattttgaataccttctgacgcagagtttttcttgcctctctgaatcttcagctaaaacgtttctgacgcatcaggaaaaatctttgcaggaaacgcgcgaccgtgcgcaaagccagctggcacagcttggtactgcgctcgatatgctgacgtccagagagttcgtgatgggctaccatcatggaaccgtgcatgtctgggataatgaccaaaacgcggtacagcgcaaagcgcgtcgtgtgaaggttatgctaaccggctgtggcgtggttggcgggactatcagcctggcctctgaggctgcatattatgcgagactgcctggcaaccagaaatgggcgccgcgcccggttccgataaactcatggaacttcctgcacttcagcccgttccacaattttatgcgtggcaagcctgacaataacccgtgggggccagcgctgaccatgttccgcacgatcagcggtacgccactctattttaatttccatgtgaccccgcttgaagaactttcctacggtaaacgcccgctgggccatgcgttaataacgggtatgtcgggggaaggtaaaaccacgctgcttaacttcctgctggcgcagtcaatgaagtacaacccgcggctttttgtttatgaccgtgaccgcggtatggagccgttcattcgaagcgttggtggctactataaagttctgcaacagggtatgccgtccgggtttgccccgcttcagattgaaccgaccaaacgcaatattgccctcattaaaaacctgttccgcatttgtgtggaaaccaccaataacgggcctatcagcgcaacgatggctaccgaactggctgaaggcgttgatgcggttatgggggaaggctcacttattccacgcgaggcgcgcaccgttactatcctggacgggtacgtgaatgaagttgtggaaaatggcgtatcactgaaagggctgctgcgcgaatggacgcgcgaaggccagtatggctggctgtttgacaatgataaagacagcctggatctcagcgcgaatgatatttttggcttcgatttatccgagtttatcgcagccaaagaggaagtatccagcccggcccgtactccgctcatgatgtaccttctgtaccgggtacgtgactccatcgacggcaaacgccgcgtcattcagtgctttgacgagttccacgcctaccttgacgatccggttatcgagcgtgaagttaagcgtggtatcaaaactgaccgtaagaaagacgctatctatgtgtttgccacgcaggagccgaacgatgcgctgtccagccgtattggccgcacgatcatgtcgcagaccgtcacaaaaatctgcctgcgcgatccggaagctatccgagaggattatgccttccttactgatgctgaatacgacgcgctgatgtcgattaccgaacactccagacagttcctggttaaacaagggcaacagtctgcgattgcttctttcaatctctaccctcgcaacagcgacgatattgatgcagatattaagacaatggacaacgttcttagcgtgttgtccggtgaaccacaaaacgccgaaattgcgcatgagctggttgaacggctcggtaatgaccctgaagtatggctcaaagaatactggcgcctgacggcttaa

SEQ ID NO: 97187 - DNA, 333 bp, Enterobacter aerogenes
atggatttaaacactgctgcaaacgcacttcgagaactgggccacccgacacgtctcagcatataccgggagctggtcagggcgggtcatgaaggcctgccggttggcgaactgcagaagcaccttgagattcctgcctccacgctcagccatcatctttcagcgctgatatccgctggactcataagccaggaacggcagagtcgtaccctgttctgcaggccctgctatgcgcagcttgagcaattgatggcctttctgacagaagaatgctgcgcaggcggcagctgcagtctgtcacccgcaaagactcccgatgagaccccattgtga

SEQ ID NO: 97188 - DNA, 723 bp, Enterobacter aerogenes
gtgaacaacctgactgatgccctgaaaaatatcgatccggccctcctggacgcgccgctgacggaagataagctgaaggccagagagataacgcatccgccccgcatcctgatgctctacggctcgctgcgggcgcgctcttacagccggctgacaacggaagaaggtgcccggctgctgacggccatgggctcggaggtgaaaattttcaacccgtccggcctgccactgcccgatgatgcgccggagacgcacccgaaagtggctgagctgcgggagctggttctctggtcggaaggcatggtctggtgctctccggagcgtcacggggccatgaccggcatcatgaaggcccagattgactggataccgctgacgtcaggcgcggtccgcccgtcacagggaaaaaccctggccgtcatgcaggtcagcggcggctcacagtcgttcaacgctgtaaatcagatgcgtattcttggacgctggatgcggatgatcaccatcccgaatcagtcatccgtggcaaaagcctgggccgagtttgatgaggatggccgcatgaagccttcttcgtattatgaccgcatagtggacgtcatggaggaactgatgaagttcaccctgctgacgcgcggtcgcagtgattatctcaccgaccgctacagcgaaaggaaagagagtgccgcgcagctttctgagcgggtcaaccagcgcagcatataa

SEQ ID NO: 97189 - DNA, 429 bp, Enterobacter aerogenes
atgactgacattaccatttaccacaacccggcctgcgggacatcccgcaataccctggcgcttatccgtaacagcggcgccgaacccacggttattctgtatctggaaacgccgccgtcacgcgatgagctgaagaagctgattgcggatatgggcatcggcgtgcgcgacctgctgcgcaaaaataccgaaccgtacgaacagctcggcctggcagaagaccgcttcagcaatgacgaactgctcgatgccatgctggctcatccgatcctcattaatcgcccggtggtagtgacaccgctcggcacgaagctgtgccgtccctccgaagtggttctggacatactgccggacccgcagcagggcgcgtttaccaaagaggacggcgaagccgtcattgatgagcacgggaaccgcgtcagccactga

SEQ ID NO: 97190 - DNA, 1284 bp, Enterobacter aerogenes
atgtttctggcaggtgcgattttcatcctgacgctggtactggtcatctggcagccgaaggggctgagcattggctggagtgccgtcatcggtgcggcgctggcgctgctgaccggcgtggtgcacatcggtgatattccggtggtctggcagattgtctggaacgccacgggcacgttcattgcggtcatcattatcagcctgctgctcgatgagtccggcttttttgagtgggccgcgctgcacgtttcccgctggggaggcggcaggggccggctgctgttcacgtatatcgttctgctgggtgccgcagtggcggcgctgtttgccaatgacggagccgcgctaattctgacgccgatcgttattgccatgctgctggcgctgggattcactcccggctccacgctggcgtttgtgatggcagcgggctttatcgctgacacctccagcctgccgctcatcgtatcgaacctggtgaacatcgtaacggctgacttctttacgctgggcttcagcgagtacgcatccgtcatggtgccggtgaacattgcctccattgcggccacgctggtgatgcttcatctctttttccgcagggacatcccggtcacctatgacctggcgaagctgaaggcaccgcgggaagccatccgggatgcacgaacctttaaggctggctgggtggttttggttcttctgctggttggcttttttgctctggagccgctcggcgtgccggtcagcctggtggcggcggtggcggcgtttattctctggctggttgcccgcaaaggacacgtgattgacgccggcagggtgctgaaaggcgcgccctggcagatcgttatcttttcgctgggcatgtatctggtggtatacggactgcgtaacgccggactgactgattacctttccgccgccctgaaccggtttgcagagcacggcgtatggggcgcaacgctcggcaccggcttcctgacggcggcactctcgtccgtcatgaacaacatgcccaccgtgctggttggcgcgttgtcgattgacggtagtagcgcacagggcgtggtgaagcaggcgatgatttacgccaacgtcatcggctgtgacctcggcccgaaaataacccctatcggcagcctcgcaaccctgctgtggctgcacgtgctggcacagaaaaacatcaccatcagctggggctattacttccgcgtgggcatcgtgatgaccctgccggtgctttttgtcacgctggccgcgctggccctgcgcctgtctgtttaa

SEQ ID NO: 97191 - DNA, 354 bp, Enterobacter aerogenes
atgccacccgtgtcccccctgcagctttttaaaagcctttccgacgaaacccgactcagcctcgtgctgctgctacgcgaaaaaggggagctctgcgtctgtgaacttacgtccgtgctgaaagaaactcagcccaaaatctcacggcatctggctctgctgagagaaaacgggctgcttaccgaccggcgggacggaaaatggatccactatcgtctgtcgcctcatatgccggcgtgggcagcggcggttatcgaacaggcttatctctgccagcgggatgatatccgccagctcagccggcaggctgaacgcgataacgccaccaccaacggcaagcctgtctgcatttaa

SEQ ID NO: 97192 - DNA, 345 bp, Enterobacter aerogenes
atgtttgcgtacgacggcagcagtgagagccgtaaaaacctgacgcgcctgacggtcagcccgctgctgcacggcctgagctgtcatatcgtgatggtcaacggtgacatgtcagccctgcaggatgcgcaggctgttcttcaggaagccggtatcacgaccgagacacgcctgctggaagacgagtccgtaaccggggcgctgtgccgctacgcggacgcccatgatatcgacctcacggtaatgggggcctgcgggcactcccggttacggcgattctttattggcagccacaccacggaaatgctgtctgaaagccgtcagcccctgctgatgctgcgatga

SEQ ID NO: 97193 - DNA, 651 bp, Enterobacter aerogenes
atgcgggctctgcatcgtgtccgtgaatccctggttcaggataaggtaaaaacaaccaatcaaatgcatgcttttctgctggaatttggcattagcgttccccgaggagctgccgttattagccgactgagtaccattcttgaggataatagtttgcctctttacctcagccagttattgctgaaattacaacagcattatcactatcttgttgagcagattaaagatttggaatcccagttgaaacgaaagttggacgaagatgaggttggacagcgcttgctgagcattccctgcgtcggaacactgacagcgagtactatttcaactgagattggcgacgggaagcagtacgccagcagccgtgactttgcggcggcaacagggcttgtacctcggcagtacagcacgggaggtaggacgacattgctgggaattagtaagcgaggtaataaaaagatccgaactttgttggttcaatgtgccagggtattcatacaaaaactggaacaccagtctggcaaattggccgattgggtcagggatttactgtgccggaaaagcaactttgtcgtcacttgtgctctggcaaacaagctggccagaatagcctgggccctaacggcacgacagcaaacttatgtagcataa

SEQ ID NO: 97194 - DNA, 198 bp, Enterobacter aerogenes; identical to SEQ ID NO: 25167

SEQ ID NO: 97195 - DNA, 534 bp, Enterobacter aerogenes; identical to SEQ ID NO: 83888

SEQ ID NO: 97196 - DNA, 996 bp, Enterobacter aerogenes
atgactgatgcagctttctatcaacttggcccactgcgcgagtatttagaagatcctactgtttttgaaattcgcattaactgctttcaggaagttatctgtgatacgttcagcggccgcagggttgtgcagaacgcggcaattacggcagattttattaggaaccttgctaaatcgttggtgagcagcaacaagctgaccatgcaggccattaatgacgtgatcctgcctggcgggatcaggggcgttatctgtctgccccctgcggtgattgacggtacaacggccgtagcgtttcgtaaggatttggcggccgataaaaatctggagcagctgaccagcgaggggattttcagtgactgccggaagattaccggcagcaagcaaagcctaacggatgatgattttttccttaaagagctgcacagcagcgaaaaatggcccgcattcctgcaaaccgccgttgagaagaaacgcactatcgtgatctgcggtgaaaccgggtcggggaaaacggtactcacgcgcgcgctgttaaaatcgctacataaagacgagcgtgtaattattttagaggacgttcacgaagtcacggtcgatcacgttgtagaagccgtttatatgatgtacggcgatgcaggaaagatcggccgcgtcagcgccactgatgccctgcgagcctgtatgcgtctgacaccgggccgtatcatcatgactgagcttagggatgatgctgcgtgggattatcttaaagcacttaataccggccatccaggcggtgttatgtcaacgcacgctaactctgcgcgcgatgcctttaaccgtattgggctgcttatcaaggcgacccctatcggccgtatgctcgatatgagcgatattatgcgaatgctctactccaccattgacgttgtggtgcatatggaaaagcggaaaatcaaagaaatttattttgaccctgaatataaaatgcagtgtgtgaacgggagcctgtaa

SEQ ID NO: 97197 - DNA, 1161 bp, Enterobacter aerogenes
atggcccgtaaaagtgtcgatgtagatcaggaactcgatgaaaacaccggagacggtgaatttgaaagcgagcgtggcggatttaaaggcagtaaccgccgttcggctcctggtatgaaagcctttgtcatactgatggcgctgcttgctttggtattcatcgggattacggtcatgggtaaaattcgcaccccggctaaagctgaagctgataaagacggtggtaaagcgcaacaggccaatacactgccaaactacagctttaacagcgatcctgatgttaataaacctgcaactgcgcagaatagcgccactgatgcccgtgctgtgcaggctgccgcacaggcagatgcagatgcgggcagcagcaataccgccgcgcgtacctctaataagcgtaaagaaccttcgcctgaagaactggctatgcagcgtcgtctgggcggcgagctggcccagactaatcaggcggctacaagcaatagtcccggagtgcagccccaggacaacgaaacaagcgaaggtagttcagcactcgctaaaaacctgactcctgcaaggctgaaggctagccgcgctggagtcatggctaatcccagcctgactgttccgaaaggcaaaatgatcccctgtggtaccggcaccgagctggataccactgttccgggtcaggtttcctgccgggtttcacaggacgtttactcagctgatggactcgttaggctgattgataaaggctcatgggttgacgggcagattaccggtggtatcaaagacggccaggcgcgcgtgtttgttctctgggagcgtatccgcaatgaccaggacgggacaatcgttaatattgacagtgccggaacgaactcactcggcagcgcggggattccgggccaggtggatacccatatgtgggagcgtctgcgtggtgcgatcatgatttcgttgttctctgacaccttaacggcgctggttaaccagacgcagagtaataacattcagtacaacagcacagaaaacagcggtgagcagctggcgtctgaagcacttcgctcttacatgtctatcccccctaccctctacgatcagcagggtgatgcggtgagcatttttgttgcccgcgacctcgatttcagcggcgtttatacgctcgcagacaactaa

SEQ ID NO: 97198 - DNA, 885 bp, Enterobacter aerogenes
atgaaaaaactacttctttcagcagtcgttttgtcagtcctgggaggcgcggccactaacgttatggcgcttgaggttggccgcaattctccttatgactatcgcattaaaagcgttgtttataaccctgttaatgtggtcaaaattgacgctatcgccggtgtggctacccacattgttgtcgcgcctgacgaaacctatatcactcatgcttttggcgattctgaaagctggacgtttgcgcacaaaatgaaccatttttttgtgaagccgaaacaggccatgagtgataccaacctggtgatcgtcaccgataagcgcacctataacatcgtcctccatttcatcggtgaagaaacgaagaaaaatgcagacggtacggtatcaaaatcctttattgaaacgccgtgggctgtgcgccaggccgttcttcagctgacctatgaatatccgtttgagcagcaggaaaaagccaaaagcgcggctgataaaaaacgcattacgcagaagctgaagcagacggcttttgcgggggcgaagaactatcagtacgtaatgagcgaacagcctgaaatgcgcagcatccagccggttcacgtctgggataactaccgctttacccggtttgagtttccggccaatgcggagttaccgcaggtctacatgatctcggccagtggcaaagaaacgctgcctaactctcatgttgtgggtgagaaccgcaacatcatcgaggtggaaaccgtcgctaaagagtggcgtattcgtctgggcgataaagtcgttggcgttcgtaataataatttcgcgccgggcgccggtgcggtagcaaccggtacggcttccccggatgtgcgcagggttcaaattggggaggataactga

SEQ ID NO: 97199 - DNA, 699 bp, Enterobacter aerogenes
atgaaagctaataaaaaaacagggcttacacgtgaagccattaaagagttcaacgaaagccgtaaagggcttgaagttgatctgatggatgaagtgctgaagtcccggcgtaccgcctggatggttgccaccggttcagcggtggtaactgtttttgcactctctttagttggttacgtggtgcataagtacagccagccaatccccgcacatctgctaacgctcaacgaggccactcacgaagtacagcaggtcaagctgacccgcgaccagacctcttatggtgacgaaattgataagttctggctgacacaatatgtcattcaccgtgagagctatgacttctattcagttcaggtcgactatacggccgttggcttaatgtccacgccgaacgtggcagagtcttaccagagcaagttcaagggccgcaacggtcttgataaggttctgggcgacagtgaaacgacccgcgtgaagattaactctgtgatcctcgataaaccgcacggcgtagcaacgatacgctttactacggttcgccgcgtgcgcagcaatcccgttgatgatcagccgcagcgctggattgccattatggggtatgaatataaatcgctggcgatgaatgctgagcagcgttatgtcaacccgctgggtttccgcgtgacgagttatcgcgtcaaccctgaagttaactga

SEQ ID NO: 97200 - DNA, 1041 bp, Enterobacter aerogenes
atggcattcaccctagtcgcagacattttcgcaaaagtagacggggcgattacgtcaatggtgagcgccaatgttgccaccattatctctgatgtaacgcctctgattgccacctgtctgacaatcaagctgatggttcaggggatgtactcagcgtttaatccgggggcgggcgacagcctgagttcgctgattaaagagtatctttccatagcccttatcctgagctttgcaacggcgggcggctggtatcaacaggaactggtcaacgtggcgcttcacctgccggatgattttgccgggatactgtctgcccctaataaagtcggtgcaagtggcgtaccggcgattattgatagcggtattgaaaaaggtatcaagatcgtcaacaccgcatgggaagccgcagacgtgttttcatcgagcggcctggccgcgtatgccattggcggcattatgatgattgctaccgttgtgctgggcggcctcggtgcgggctttgtgatcatggctaagatccttctggccgttacgctttgttttggcccgattgcaatcttctgcctgctgtggggagcgacaaaaaacatctttgctcgctggctggcgtcggtcattaactatggccttgtcgtcgtcattcttgcgctcgtgtttggtttcatcatgcagatgttcgacaacctcctgtcctcgatgaactctgatgccgcttactcatcaatcactggttctatctccgccttattactgacggtcatttccgttttcgttctgttccagattccgcaaattgccgccagctggggtagcggtatcagcgccggagttgctgacgccgcacgctctacgggttcttccatgcaggcgcttggcaatatgggcagccacggcatgtttggcggtaatgcgttcagaggcggtaacagtggcggcggccagcaatcggcaggtggaggaagtggcagcaacagcggaggaagcagtggttctaatttaagtggtaaggcaaggggcagtcgcgggaagaaggctgcataa

SEQ ID NO: 97201 - DNA, 228 bp, Enterobacter aerogenes; identical to SEQ ID NO: 16848

SEQ ID NO: 97202 - DNA, 423 bp, Enterobacter aerogenes
atgaactccagttcttccgtcacgccttcagttaacagcatgatgggccagtttaatgcggaagttgacgacatgacgcccagcgaagcaattacctacatgaacaaaaagctggctgaaaaaggcgcttatgaccgcgttatggcagaaaaagcctacaacaaccagatgcaggaactaaccgatatgcaggagctgacggagcagattaaaacgactccagacctgaaatcgattgctgacttacaggcccgtatccagacgtcacagggtgctattcagggtgagcaggcgaagctgaatctgatgaacatgttgcagcagtcacaggacaagctattacgtgcgcagaaagaacgtgccacccacaattttgtttttggaaccggcggggacgttaccgcgtcaccttcaattaactga

SEQ ID NO: 97203 - DNA, 216 bp, Enterobacter aerogenes; identical to SEQ ID NO: 80560

SEQ ID NO: 97204 - DNA, 516 bp, Enterobacter aerogenes
atgaatattcaggaagcattaaacgtttttggtttatccggtgatctgactgaaaaggacatcaaggcggcatacaaaaaagcggctttaaaatatcatccagaccgcaatccattgggtgctgagctgatgaaagcagtaaatgcagcgtttgattttctcatggctaacattgataaaatcaatcagtttcaaagcactgatgaaaatgcacgttacaactacggtgaagatctggaaaaagttttgaatacgctttccggccttacagggattgtctatgaagtcattggtaattgggtctggattagcggggaaactaaagaacacaaagatattttaaaggaaatgggctgtaaatgggcatcgaagaaaaaacaatggttttaccgtcctgaagaacacaaaagccgctggaaccgtaaagaacacagcattgaagaaatccgtgaaatgtatggtacagcgggtaaacgtaaggcgtcaggctggagacgtgtagaagctagcgcataa

SEQ ID NO: 97205 - DNA, 237 bp, Enterobacter aerogenes
atgaaaaacaagaccataacggaagcggagctgataaacatttttgaaagttacggagcctacatttgcccggatgagatcgaaattacagccaaagaatgcaatgaaaatggttcagtcttacaccgtggcttaaacgcagaaggatgggcgcatctttttgcaaaggaagaagcatatcagcaggaatgcgaagcccaggaagctgcaagtgatgatggacactttgacgaatag

SEQ ID NO: 97206 - DNA, 552 bp, Enterobacter aerogenes
atgaaagaacagaaaaatttctttgaacggtatcaccctgtgtttgaaatcgtttgtcgaatcctggggaacggctggcgtgtaaacctgctcgatgattgccagtacaggataaagctaacctcgcctcagtataaaaattactctatacatattcgaatggaaaagggaaggttagttatcattggaagtgtagacagtcgaagctggcgaagtccttaccatacttgcactgtatcgccagtacgtaaccctgtagaaatcgccgccgatattgaaaagaaaatcctggctgatgctttagataatgtagatatggcgcgagaatatgaacaacagttacagcgaaaacgcgagaaaaaacagatcctgaaaggaatgttatctcgtttagtgcgtcttgaaagctggcatgggacattaaccgggtttaaagttgagaatgggttagatggtaacgtatcagaacggggcgacggatatgaaatggtaattcgtggcctgagtgtggatcagctcataaaggtagcggggtttattaaacagctatga

SEQ ID NO: 97207 - DNA, 270 bp, Enterobacter aerogenes
atgaatgagatcctgagcgacaggaaaaacaaaggtaatgtaacatacaggattgttgtgtctgaagatgcaacacgtttgtttattgaacttgaaaaactgatgaaggtacgctctaaagaagcggataaaaaaacaactaaaaaggttgttttccaaaaatcattttattatgaagaattctgtaacgttaaagatgaaattgatgatccaattttattgcaattctattcagatactatcgtgaaggtacaaaatcatgagttttaa

SEQ ID NO: 97208 - DNA, 339 bp, Enterobacter aerogenes; identical to SEQ ID NO: 76466

SEQ ID NO: 97209 - DNA, 165 bp, Enterobacter aerogenes
atgtcggaacgcatgttatcagcaatacagactattgaaaagggtgggcgtccagtttttcccttgatgccattctctgcttttcctgagtacatggcattacttagaaaagccctggaaaagaaagaaacaaaagcactgataaaaaaacaggaggtgctatga

SEQ ID NO: 97210 - DNA, 258 bp, Enterobacter aerogenes
atgaaaaaacaggaatttttagattttatcagtgcagaacagaggcggggggctgtccggttttcgctgggatttaacagcaaaggggaaattgtattgcactggactaacgaggccgggttaagagtctggagtatactaagcggtaacaggggtaaaagtcccagccgggcaaaccgggaaagaatgagtaactttcgtcgctggctccatgatgcccgtcagggcatggaaggcgacactccagaggcagaataa

SEQ ID NO: 97211 - DNA, 546 bp, Enterobacter aerogenes
atgaaaaaagttcaattcaggattgaagaaagccaacatgatgatctacttgattgtcttaaaacactttatccagatgaaccgggtttaaccgtggcaaaaggaatgaagctgcttgccagtgctttactgaaaagcaaggttaaaaatgaagatgttaatgtttcaaaagacaatgatgattttatcaaaaccacaatgtatttgacagggaaacaaagaactttaatcgagaaagcggctcaccgtcatggctggaatttatccagagaatgtcgttaccgaatccagacgacacttgaaaatgaacttgatttcttcgatcaggaacttctggtgatgaatcgttgccgtaatgcaatagataaaatcgggcggaactttcattatattatcgttaatgataatgccagggtacttgataaagatgggttctatcaggacgctgagcggttgagtacagagataatgagtctcaaaagtgagtttgaaaactacattatgttatgcaaagggcgaactgtttctaacaaggttgaggtgtaa

SEQ ID NO: 97212 - DNA, 444 bp, Enterobacter aerogenes
atgggcgtttatgttgacaaggaattcagggtaaagcgtaagtcctctgaagctggccgcaagtctgctttcgcccataaagttaaaaatggtggtaagaattatcaacgcaacgttcaggaacgtatcaaccgcaagggtgccagtaaggaggttgttgtcaaaatctcaggaggtgcaattacccggcagggagttcgaaacagtattgactatatgagccgggagtcagagctgccagtgatgagtgaaagcggtcaggtatggaaaggtgatgagattcaggaggctaaagagcacatgatagatcgtgctaacgaccctcaaaatgttttcgatgataaaggtaaggaaaataaaaaagtaacccaaaatattgttttttcaccgcctgtatcagcaaaagtaaaacctgaagatctgcttgaatcttggctatcataa

SEQ ID NO: 97213 - DNA, 384 bp, Enterobacter aerogenes
atggcaatggcgaatgaacaggtagcctacatgaaagtactacacggtatttttaaaaatctttatcaggattccgtttccctaatgcaggtttccgcaagcatcatcaatttgcctggtattaagcaggcatccgttgtgatgggaagtgagaccaatcttattcaattaagagacgcaaggctgggcgacaatattgctgcaggtcctaacgatcttattattgcgattatgggggaagatgaggcctgcgagcaggcactggcactggcgaaggagaaacttaacagtaagccgcaggctgatacagaagccgggagaaggctggtacagtttaccagcttggctatggcgcagcaccggagccagccgaagaattactga

SEQ ID NO: 97214 - DNA, 879 bp, Enterobacter aerogenes
atgacatctttaacactgattcccgttacggtcgggtatttggccattgaccgtctgaacgatgccgggaatcaacaaataaatgttcacagctgctttacaaatacgatgaatttattgttgtctgatggtgaattactgatactggcttcggagcacaccggtttaaatcatcctgatactattattgttagcgtaccggcgaactgggattggcgttgtaccgggcgtgcggggattacgttcggtgatggtatattcagcaacccggtttggcaaatggatatacgccatgttaaacgttggcagcaaacagacttatatccattaataatgacggaaactgaaaggaaatatacgtttcttgctgagcaattaaaagtgtacagtcagagatatccgatcaaaagtgcaattatgctgttgcccgataatatggctaaacaggtaaatcgaccattgcgcgaagtaaatatcgccattgaagataatgagcagcagattagccagctggttgacggattaattggttttggtttcggtctgacacccgatggcgacgattatcttctcggatatctcgcagccatctcttttttgccacaggacattatttcgaggcagcgacgggcgcttaccagaattattatatcgaggctggatcgtaccaatgatattagccagcattatctgaagcgcgcgacggagggccatttttctgaagcgatttgtcagctgctgacgcacctatcggcgcctttttcaccttcgcctcttgcggcggcggcgacagctgtcatgcggtttggcgcctcttccggagtcgattgtctggctggactacttcatggcatacgtgcgtcaacccgcattcattaa

SEQ ID NO: 97215 - DNA, 1305 bp, Enterobacter aerogenes
atgaataaccactttgtcggaattgatgagaagcccccgtttctatctttgctgttaatggggattcagcacgtgctggtgctgttctcaggtctggtagccgtaccgttggtggtgggcatggcgcttggtctgcccagtacggatattactgttctggtccagggcagcttgattgttagcggtactggtacgctgattcaatgccttggtttaggacatctgggatcccggttgcccatttgcatgggctcggcgtttgtcttcattgcacccagtatcacggtggggtcgcagatggggatccaggccgtgtttggcgcatccatggtgtgcgggtttgtcgcctggatcctcagtttttttattggaagagtgcagaaactgattcctccgctggtgaccggaactattgtttcactgattggtatcaagctgctgccgctgggattcacctggcttgctggtgggcatagtgaactttatggcaagccggtatgttttctgatcggcggcgttgtgctggtggcattactggttgccagccagtcgcgaaaaggcttgttatcatcgttttccgtcattattgccattatgctgggatatgttgtatcggcactgctcggcattcttgacctccaccacgtgcaggatgcttcctgggtctcttttcctgatttgctgcattttggttggccgactttttcgtattcggccattgtcatcatgatgattgctcaacttaccgccgtactggaaagcattggtaatacatacggtacgggagctgcggtacgcagagagatcacgcataagcatttgtctggcgcaatctcagtcgatggtatcggctcgattgtcgcgccgctgcttaacggttttcctctgacctgttttgcccagaatataggggtcatcagtatcactcgcgtggcaagccgctatgtggttgcctcagcgggtgtggttctgattgcacttgggttgattcccaaattttcagccctggtcgcgggaatgccggcaccggtgctcggtggagcgtctctgattatgttcggctctatcgtcgggtcaggcgtcgcccagattaaggattcaggaccgttcgaccagcgagcagccatggttttttcaacctctctcgcactcggactggggtttggcctggcgccgaaagacgcttttgatgccttttcgccatcgctggccgtgctcctggagtcgggtgtggcgattggtggaatggcggcaattatattgaatctggttcttccgcgatcacctgaaccatccgttagctga

SEQ ID NO: 97216 - DNA, 1104 bp, Enterobacter aerogenes
atgcaaaaagttgaagtgttccgtattccaactgcatcgccggatgatgtatctggtctgaaaaatttgattgagaatggtagtgttgatccacgtgatattattgctgtattgggtaaaactgaaggtaatggttgcgttaacgactttacccgcggttttgcaacgcaaagcctctctatcttcatggctgagcaattagatatgtccgtcagcgccgtacaggagcggatcgcatttgtcatgtcaggcggcacggaaggcgtaatgtcgccccatctgacggtgtttacccgcaaagaggtggatcaacccgcaaaggaaggtaaacgtctggcagccggtattgcctttacccgggattttctcccagaagaaattggcagaatggcgcaggtgaaagaagtcgctgaaggggtgcgtattgcgatgaaagatgctggcattaccgatccgcaggatgttcattttgtgcaaatcaagtgtcctttactgacggcagatcgtattgaggacgccagagtgcgcggtcaaaccgttgctgttcatgatacgtataaatcaatggcctactccagaggggcatccgccctcggcgtcgcgctggccctcggtgaagtgtcagaagatgcgttgaacgataaggtcatttgtcaggactggacgctttattccggtgtggcgtctacttcggcaggtgtggaacttctgaaggatgaaattattgttatcggaaacgctgaaaacacgaccagcgatctgcgcatcgggcatgcggtgatgcaggatgctattgatatcgatgccctgtttgccgctatgcgtgaagccggtcttgaatttgacggtctgccgccgcaggaagagctggatcggatcgtaaatgtgttggccaaggctgaagcaagctccacaggaacggtgcggggaagaagaaatacgatgcaggacgactctgatatcaaccatacccgctcggcccgggccgtggtcaatgcagccattgccgcaattacacgtgacccgctcgtgtatgtctccgggggggctgagcatcaggggccagatggcggcggtcccattagcgtaatcgcgaaagtgtaa

SEQ ID NO: 97217 - DNA, 1236 bp, Enterobacter aerogenes
atggaaatagtcgtgttattgccattgttggtaatgctgatactcgttttgcgaaataagcatatgattctggcaggactggtgggcggactaaccgcgatgctggttggtggcatcggtttttcgcaggcaagtaagatcgttatgacatcaattcccgggatgacgggaattatcaccccggttatctattctgctgtggcgttggtactggctaaactcggtggttttgaagcgttgctcggtctgagtcgcagagtgtttggccgaaagcaatatctcattgcggcggcgattgtactcactcaggcgttagcaacttatgccgcagggcttggggcgggtaataccatggtaaccgggcctcttgcgctggcgattgtaggtgctgttccacagctgatagcgggcatggcaattgtgactgccgcgagctttatgacgtcaccttcaggggccgatgcggccgctatttcaaaaattgccaacattgaaattgcaacctatagcgatacgatgttccccattaccgtctgcttgtggactttgggaatgactatcgctgcattcggcgtctggaaaagcggaagcgtcctgcaggatgaggatacgatgtccgatgttacgctgaaagaacagttaattaaggtcatgcctcccgtatattttctggtagtcgttgtggcaggcaaaaacttgaatgagttattcgattattcgctgtttagcccgatatttaatatgttcagtacgttgatgctgggttttgcagtaacacgtcagtctcccggtaagctggctgaagaactggtacagaactcttctttcctgctaacaaaactattcgcaattggcattttcctcggttttatcaacatactggcggaaattggtacgttcacctacattgctgaatttattaaatcatcacccgcctttgttaccgtacccgtggctgtatttattgctttttgcatctcgattccggcaggaggatacagcgtgggggtcagtaccctggtcatgccgattatggtggagtccgggctttctattacacaaattggtctggcggcacttgctgtaggtgtgggcacgcaaatgagcccggttcaaatcaacgtggcttcactgtcacagtcattcaagctggatattcagcgaattgttaaaattaatgcaccttatatggctggcgttgcggcgatactgtgcatcatgggattcttcttataa

SEQ ID NO: 97218 - DNA, 1140 bp, Enterobacter aerogenes
atgagtgttgatatccataacataagtatattttcttttttctctggtgcaggatttttagatcttggttttgagaaaaatgggattactataaattttgcgaacgaaattcataaacctttccagggcgcatataccttttctagagataaaatgaatttgtctttgccaaaatatggatgccatttggaaagtatagaggaatatataactgggagtcggaagaagtttctatctcagttgatcaaagaatcgaagaaagattctgttgtaggatttattggaggtcctccatgcccagatttctctaatggaggtaaaaaccgtggacaccatggagataatggtaggctaacgaaagaatatgttgatctgatttctatatttaagccggattttttccttttggaaaatgttaaagggctttggaaaactgaaaaacacagagctttttataatgatatgaaagtttttttgagtaataatggttatgtattgactgattgtcttgtcaatagtttagagttcggtgttcctcaagatcgtgacagaattatgttgtttggtattaacaagaaattattatctcataaaaacaaacaaaatatcgacaatgattttccttggcgtaaacatatttgttttgataaaaataaaataccaagcaagaaaaattggcctcagcaagaaatatatatgaaggattcgttaaagagttgcccttcatatgtggaagagtttatagaattaaccgtagaacattggtttgagaaaaataatgtatcagcacaccctaactctttacacttctttcagccgcgaaaaggactgttaaaatttcagactattatggaaggtgatgatagtcgtaagtcttttaaacggctacataggtggagatattctccaacaactgcgtatggaaataatgaagttcatttacatccctacaaggatcgcagattaagtgctgctgaagcattggcaattcaatcgcttcctaaagagtttgaattgccagcatctatgtctttaaccgatatgtttaaaacaattgggaatggtgttccgtatctgctttctctagggatagctaaatcaattactgactatttagaacaaattagaatttatcattag

SEQ ID NO: 97219 - DNA, 795 bp, Enterobacter aerogenes
atgagtttacgccaggcctgcaggacattatcgctgagcaggacggtgtatttttatcagcccgatacccggcgtgatgaaccagtgatccacgcgctgacagaactggcagaacgctatccgcgctacggttttaagaagctgtttcagctgctgcgcaggcagggaaatacctggaaccataaacgtgttcaccggatttattgcctgctgaaactgaattttcgtcgcaagggaaaacagcggctactagtgcgtaatccagcaccactggcgacgccgcaagcgttaaaccagagctggtccatcaattttatgcacgacgcgttggtctgcggcagacgcttccggaccttcaatgtggtggatgattttaatcgtgaagcactggcgatagaaatcgacctgaatatcccggctcagcgagtcatccgggtgctggacaggatcgtggcaaaccgcggctacccgctgaaaatgcggatggacaacgggccagaactgatctcgctggcgctggcacaatgggccgaagaacatggcgtacagctcgaatttattaaaccgggtaaacctacacaaaatgcttttatcgaacggttcaaccggacataccagacagaaattctggatttttacctgttcagaacactgaatgaagcacgggaaattaccgggcgctggctgatggaatataacaacgagcggcctcatgaatccctgaacaacctgacgccggaagagtaccggctgatggctgaaaaaccggaaccctcaaaaagtgcgtggaaataa

SEQ ID NO: 97220 - DNA, 285 bp, Enterobacter aerogenes
atgcgcaagatccgattcactgaacaccagataatcgccgtattgaagtccgtcgaagcaggacgtaccgtcaaggatgtttgccgtgaggccgctatttccgaagccagctattacaactggaaggcaaagtatggcgggatggaagcggccgatattaaaaaatcaaagatctggaagacgagaatcggaggcttaaacagatgttttctgatctcagccttgagtgccgggcacttaaagacgtcatcgaaaaaaagctttaaaaccagcgataaagcgtga

SEQ ID NO: 97221 - DNA, 2529 bp, Enterobacter aerogenes
gtgacatacacttttgaaaaatccaaactttggcaagcaactctaggaaaaactgatgatgtggatatcgagagactaagaaatagcttcttcgattttagaaaaaaagttgagcccctggtaaaaaacattgaaacagagctgccaggattaactatccatgatataactcatattgattctttatgggaagtcgcagaccaaattattggtaataaagaatatttaaacccaatggaagcatatgtattaggtggggcttttcttctacatgatgcagcacatgtaagtgtcgcatatgatggcggcttcagtgcattgaaagaaaaagatgaatggaaagacttaatagctctcaaatttaaaggcatagagcctgagcaagattctgaagttgagaaaagagcccttttcgaaatagttcgtcaattacacgcaaaccaagccagacatcttattaaacgttcgtggatgtcggagccttcgaagaattactatttccttatatctgatgaagaaataagaaattattattctgagctaattggagaaattgcagagagtcaccactggagttctaaaaaagtatttgacaccttccttgaaagaaagatcaatgcccccgcattctttaacaataatgcctgggaggtagacgcattaaaaatagcatttattttacgaacagctgatgctgctcatattgattcaaggagagcgcccacatattcctatagttatctttctcctaaaggaatatcaaaagagcactggcacttccaaaataaattaggtcgagcaacattaattgataatcaattcttaagaatatcctctggctcttcattctcggaaagtgagcgaacttcatggtggttagcctttgatacagcaaaaatgataaataatgaattacaagaagcatacaattacttatccgaggcagacagagatgtcttcgatgcaaaaaaagttttaggctcagactctcctaaaaacttttcaaaatatgttatggctgaaggatgggaaccggaggacattgctatacatgttagcaatttacctagattgatttcaacactcggtgggaaagctttatatggcgaaaaaaaccatgttggaattagagagttaatacaaaatggatttgattctattactgcagcaaaaaaattaggatatcttgacagtcatgaaggtttgataagtttaaacttaataaggaataaaaataaaacttggactttatctataatggataacggccttggcatgagtagatatgtattatctcacatactattagatttcggaaaatcgctctggaataatgatgatataagatacgagcaccctaaactagcacaaacaggttttagttcaattgggcaattcggcattggtttttattcggcatttatgttgtcgaataaaataagtgtcataacaaacaggtacaagtccaaatatgatgaaaataatactcactggaaactcactttccaggatggtcttatcgagagaccttttatttctcgcccaaatgacaatgaacaattaaaaaagcatggtacaactgtttcgttggtaattgagaatgatatctttctcaacttattatcaataagcgacacagaagattctgaggacgatggaaaaatttataccgcactttcacaattaattaaatggatactacctacttgtgaaacggacatagccttatctttcaatgaggtaaaagaaagaattttaatcgcaaatgactggactaaaatttccgacaaagaattattgtctagattagaagcaagtagtgtagaacaaagattatacccattagtatacgatgaaaaaattgtaggccgattgagaattgctgatagtccttatttttacctaacagaaaggccttctgcaagtgtgactttcaaaggagcttgcgcaggtaagatttttggtctaaatggtgtatgcatctcacataagaataatgaaaaagctgaaagaaatgatgccataccagactatcctgtagaaacatggagaaactgggctcttactttggttaggagcgaacccttgctattcactactcacttgctacggttacaccctcttataccagatgaagacttacatgtatggtatttaggagacgacagatgcactctaaatgatatagtagaattcatatcaacagttactgagttttttgtaattgacagtcatgtagaatttgaagaagaagataatgtaaagagttccgaattcgaagccgacttcatcattgatgatcgtgtaatattggttccatctaaacgctggccccgagtaactaatgaaggagtattatttgatgatgttatcaactccctaagccagaatgaaataaattacaaaacaaaattaaatgacgcaatcaactcaactggcattgagtttgaagaaagcaatgattacgtaactattggcgatgtgaatggtaacccaatttcaaggtgggttacaaaatatacaaaatag

SEQ ID NO: 97222 - DNA, 306 bp, Enterobacter aerogenes; identical to SEQ ID NO: 6030

SEQ ID NO: 97223 - DNA, 441 bp, Enterobacter aerogenes
atgaaggtcgatatttttgaaagctccggcgccagccgggtacacagcatccctttttatctgcaaagaatttctgcggggttccccagcccggcccagggctatgaaaagcaggagttaaacctgcatgagtattgtgttcgtcacccttcagcaacttacttcctgcgggtttctggctcgtcaatggaagatggccgcatccatgatggtgacgtactggttgtggatcgctcgctgacggccagccacggctcaatcgtagtcgcctgcatccataatgaatttaccgtgaagcggctactgctgaggcccagaccctgcctgatgccgatgaacaaagattttcctgtgtactacattgacccggataatgagagcgttgaaatctggggagtggttacgcattcccttatcgagcatccggtatgtttgcgctga

SEQ ID NO: 97224 - DNA, 1266 bp, Enterobacter aerogenes
atgtttgcgctgattgatgtcaatggcatgtacgccagctgtgagcaggcatttaggccagatctggcaaaccgagcagtggccgttttatccaacaatgacggcaacattgtggcccgtaattacctggcgaagaaagcgggcctgaaaatgggcgatccgtacttcaaagtcagacccataatcgagcgtcataacatcgctatttttagctctaattacactctctatgcctccatgtcggcccggttcgcggccgtagttgagtcccttgcaagccacgtcgaacagtattcaatcgacgagctttttgttgactgcaaagggataacggccgccatgagccttgacgctttcgggcgccaactgcgcgaggaagtcaggcgacacacaacgctggtatgcggggtcggtattgcccgtactaagacgctggcgaagctgtgtaaccacgctgcaaaaacatggcccgctactggcggggtggttgctctggacgatggcgccagactgaagaaattaatgagcatcctgccggttgcggaagtctggggcgtcggccatcgtacagagaaagcactcgccacaatggggatcaaaacggtgctggatttagccagggcagatacgcgcctaatccgtaagacgtttggtgttgtgcttgaaagaacggtacgggagctacgcggcgaggcttgcttcagcctggaagaaaaccctccggcgaagcagcagattgttgtatcgcgctcattcggccaacgcgtagtagccctggcggatatgcagcaggcgatcaccggatttgcagcgcgcgcagctgaaaaactgcgtaatgagcggcaatactgccgcgtcataagcgtctttatccgcaccagtccttattcagtgcgtgatacacagtatgccaatcaggcaaccgaaaaactgacggtggcaacccaggacagccgcacgataattcaggcggcacaagccgcgctggcgcggatctggcgggaagatattgcgtatgcaaaagcagggatcatgctggccgatttcagcggaaaggaggcccagctggatttattcgactctgctacgccttcagctggcagcgaggcgttaatggctgttctcgatggcataaaccggcgtggcaagagccagctgttttttgcaggccagggcatcgataactcctttgccatgcgccgtcagatgttgtcacctgattacacgacagactggcgctcgataccaacagcaaccatcaaataa

SEQ ID NO: 97225 - DNA, 792 bp, Enterobacter aerogenes
gtgaatttgcctacgcccgaaacctacgatgaacttcagagagcctacgatttttttaatgagaagctattcagcaacgagctgccgccatgcctgataacgttgcagcgtgagaagcgaacgtatggctattgttcctttaagcgtttcgtcggccgtgagagtgggtacacggtagacgagatcgctatgaatccggtgtatttctcgatcagaaccataaaggccacgctttcaacactggtgcatgagatggttcatcagtggcaattccattttggcgagcctggccgccgtggctatcacaacaaacagtgggcggcccggatggaacgggtaggactaatgccttctgataccggcgaaccgggaggcaggaaagtgggccagagcatgacccattatattattgccggtggccctttcgatatggcctgtgatgaactgctgacaggccatttccggctttcctggatggacaggtttccgccttaccagcctaagcctggcgctgtgctaagccctacaggaaaaggctatattgacgacgaggaagatgatagcgaacacgaacaggaggtggaggaagggcgcgacccggttgaactcgacgacgagatcatagaggccatgcgatttgtaaccccgccgcctgaagcgccggtgaacaaaacaaaccgggaaaagtacagctgcccggtgtgtcatatcaatctctggggtaaaccggggatagtggtttactgtggtggcgagcactgtaataaagccgcgttagtagtcttaaaataa

SEQ ID NO: 97226 - DNA, 342 bp, Enterobacter aerogenes; identical to SEQ ID NO: 16817

SEQ ID NO: 97227 - DNA, 720 bp, Enterobacter aerogenes
atggataagttgctgaacaaaaagataaaagttaagcagtctaacgagcttaccgaagctgcttactacctctcgctaaaagcaaagcgcgttctctggttatgtcttatgcagacgtatttcacagcttcagtaagcgaagatgatgatgagatggctgtactcggtgactctactttcaaagtaaaggtggctgactatgagcaaatttttcaggtaagccgtaaccaggctatcaaggatgttaaagaaggcgtgtttgagttaagccgttctgcggtaatcttttacccgaaagaagggagttttgactgcgtcgcgcgcccctggctaacagaggctggcagccgatcagctcgtggtatctgggaaatcgaatttaaccataaactcctgcggtacatttacggcctgacgaaccagttcaccacctactcgctccgcgattgtggcagtcttcgaaatccacggacgatccgcctttatgaaagtcttgctcaattcaaatcttcaggcttatgggttactactcatgcttggttaaatgaccgtttccttttgccggaatcccaacagaagaacttggcagagttgaaacgatctttccttgatcctgcactcaagcagataaatgagaaaacacctttacttgctaagtatagtattgatgattcaggaaaatttctgttctcaataattgataagcaaaatcccgtctga

SEQ ID NO: 97228 - DNA, 1212 bp, Enterobacter aerogenes
gtgagcgaacaggaaaataaaatcccgaccgcagtagaaattgaacaggcactacgggagagacttcagaaagataatgagcaaaacgataaaacggataacggagaaagtgaaggacaaccagttaaacgcctgggtatcgagaagcttaaaaaatcgcgtaaggggctggtgattattatcgctgcatttcttctgttggccgccggggtgtcggtctactatatcccgtcgattatccgtgcaatgtccagcggtgacgaaaagccagccagtaatgcggtatctactggttcagtaaaacgcgcgacaggtctcagcgatgatgttgatccattcaacaccagggcagaaccggctaagacggaagagcggaaggaaagcagcgacaaagcggaaatgccaacggaaaaagtacaacagaacttcagtcgtgcgctggatgtggcctatggaggaagcagctctgcttcctcaggttccggtgggagttcttcatcggccagcaatacaaggaacgaggagaacggcagtgacaaacaggccgaggttcagcctgttaactcagggcaacccgcgcagctttcaaaaattacacgcgttccttatgaccctaaccttttcattcctgaaaataccgcgattaagtgctcgctggacagacgatttatctctgatctggctggcaagctggtctgtacgattaatgaggacgtatacagtgcaaacaggaatgtaaaactaattgaaaagggaactgccgcatatctgatgtataaaacgggaacgttcaatcatggtcagggagccgtgtttatcgctgctacgaagctgagaacacgcaaggaacctttcattgatattccgctgattgatacgcaggcggcgggagcgctgggtgaggccggggcttcaggctggattgacacacattttgcagatcgctttatgggcgcgatgatggttggcatgatccccgatgtggcacaggcggcaagcggagcagccaaaagtaataaagacaatcagaccgattatacagctaacagtcgccaggcttttgctgatatagcacgcgaagcgtttgcaaacagtgtgaatatcccgccaacgctttataaaaaccagggggaaatcattactctgattgttggtcaggatctggatttctccagcatctacaaattaaaaatggtgggttcccggaggtaa

SEQ ID NO: 97229 - DNA, 930 bp, Enterobacter aerogenes
atgaaaatgaataaaggagcgctaatcgtggcgcttctgttggtgtctcacgtctgccatgcagccgttacgccagcagccagccgtttcgacccccgtaatcaggttgtcagttataacccgcaaaacacgactgttataaacagtgcggtcggctatacaaccacactggtatttgacgaggatgaaacggtaatcagtgccagaaccggctttccccagggctgggaagtgaacaaagaagataacctggtgtatctggaagtaaagcccgtcaaacagacagtacagaagaacagtaccgatgacagtggcaaccagtcttcagaggtggtcagtgttgctcttgatcctgaaaacgacctggaacgctggcgaacaaacctgtttgttcgcacaacaaaacgtaattacagcatggagctgaacgcccgaacgttccggcagccggacaagatcgcttttgttgttaattaccagtacccgcaggaacgccggaaggaacaggccgaaatcgagaagaaacggattgaggctctcaacaagcggcaggaagaacaggcaatcaaccgttctcttgaaaacgcgaagtccccccggaactgggattactggaagcgggtagctgacggcagtcagtcaatcagcccggattatgcgtatgacgatggccgctatacctggtttggcttcagccccctgaaaaaaatccccagcgtctttgttatgagtggcgaacaggaaacgctgactaacccggtagtcaaaaacagcggcagtttcaccgttgttggtgttcctgtagaccagcgttttgtattgcgtatgggaaatcaggttgttggggttgaaaaccggggctttggcaaagtccggcttccggcaggagataccgtttccccgaacgttgagaaagaggtgatccagtga

SEQ ID NO: 97230 - DNA, 729 bp, Enterobacter aerogenes
atggggtttaatctttcagaattaaaactgcctggttttaacaagaaaaaagaagtaacggactcttcaactacttttgaagagaaaaatgtattgatgcaggagaaaatgaaccgcatttataaattcggtggtattgcagggatggccgtaggtgtattgtctctgctggctctgaatggggcgctgccgttaaagagtacggttgtcgaagcttatcttattaatggtgtcactggtgttgctgaaaggctgacttccgttaaaaaagaaaacctctctgaaaatgaagcactggcgaaatactttattactcagtatgtgaagcgtcgtgaagggtataactatttcagtctccagcatgattatgattatgttctgttatacagcgctgagaatgttgcgacggattacaacgctttaatcaacagcaaccagtcaccaaaggttatttataataaagcggaaaaaacagcatccgttcaggataatccctccgtgattatcagtccgtcatcacggcgcgatgataaggatatgggggcatatgtcaggtttaaattaaccattcgaaatgtcgcgacaggccaggatgattatgaatactggaacgtcagactgacctaccgtattgaaccacaggtcgaaatggcatcgggtgaccgaaataataacccgcttaaattcgttgtaacgagctatgtacgcgataaagaagtgaaagggtga

SEQ ID NO: 97231 - DNA, 561 bp, Enterobacter aerogenes
atgctagctgttactgcacctctgtttattatttgtctgtctttcggttttttacgacaaatgtttaatagctggctacagctaatatttagctcatgcttgatatttctgttttgcggtttggcaattagagctgggatgacttttttaaatggcatcctgacaatatctatagcaaatgcagatgagctaaatctaatctcaactggcgctcaggccggggttgcaggtgcattcatggcctggattatctggcaagccaaaacctatgcttcccagctcgcaggggtaggtgttgaaggcgcgatgcagggggcagccgcaatggggattggtgctggcgtgttcggcgcttcccgtatggggcgcaatatgcttggcatgggtaaaaatgcagggataggagcatggaaaggtgttcgccgtcaggataatggttttagccagtcgcctggtgtttctggcaagctggggaatctgacaggacagggagttaacattggtgccaagagacttcgacaggctgctattgatatggcgaaaaagaaatacggaggataa

SEQ ID NO: 97232 - DNA, 822 bp, Enterobacter aerogenes
  misc_feature (805)..(814): n is a, c, g, or t
atgctgatggggctgaatgccctggcggaagatgatgagacgcaggtgattgtccttatttccaaaccgccagcctatgacgttgcggaaagggttctcacccaagcgcagaaagcaggaaaacccgttgttgtaaactttttaggtgctgcaccgcagagcgttacgcggccaggtgttgttgccgcattaacgctggcagaggccgctgaactggctatgtcgtttgttgcgccagagtccgctcagcaggcgcagtcatcagcatgctgtactgaagatgaatttattcaaaagcaaacgcagattaacggcgccgataattcacgtagatatatacggggcgtttttgcgggcggaacattttgttatgaaagtcagttaatttgccagcgtaatggtataaccgcccattctaatacgccaataaaaggaaacttagcgctaaataatatctggcagagtgaggggcataccttaattgatatgggggatgatgatttcacccgcggccgtccacaccccatgatcgacccgacgctgcgtaatcagcggattatcgctgaaattaacgatccgcaaacggcggttgtgctttttgatcttgttcttggctatggcgcagcaccggagccagccgaagaattactgaaactgctcaatgctaccaacagagcggccagcccgttattaatagcccatgtttgtggaacacagagcgatccacaacagcgtagcgtgcaaattggcgccttgagacgctatggcgttctggtcgctgacagcaacgctcaggctacatgcnnnnnnnnnngtaaataa

SEQ ID NO: 97233 - DNA, 987 bp, Enterobacter aerogenes
  misc_feature (953)..(962): n is a, c, g, or t
atgaactcattattttctcagtcacttaatgtgattaacgaaggccttgccagttttgccgataatatcaggcaagccgggggagaggtcactcctttgaactggcagccgcccgctgaaggggatcgttttaccgggctgtccctcgcggggcttattaaccatcccgtcgtggagcgcgccaatcaggtggcaatggggcgctatcttgacgctcagccggtattagtggatgtcctgaccgcggctgtggcgattccggcaatggcggaacaaaaattaattctgcatgccggtccccctatcgcttgggaagagatgtgcgggccggtcaagggtgccattatcggcgcaatattgtttgaaggctgggcggcaagtaaagatgtggcatctcgtttggttcttaatggcgaaattgcccttgctccgtgccaccattacgacgccgttggccctatggccggcgttattagtccttcgatgccgttgtgggtaatcgaaaataaaactaacggcaagcgtgccttcagtaactttaatgaaggcctgggcaaagttttacgctttggggcgaacaatgaagaggtcctggagcgcttaacatggatatcgcaggaattaggcccggtaatgaaagcggcggtgtgccagttgggtgagcttgaactaaaacccataatggctcaggcgttgcatatgggggatgaggtacataaccgtaatgccgccgcgacggggctgctaattaagcgtttatttcccgtgctgctgagatgtaacttaccgaacgtccagcttcagaaggtcgtgtcatttatttctggtaacgatcatttcttcctgaatctttctatggcggcaagtaagtcgatgatggatgccgccgctaatgtaccattcagctcgctagtgactgttatggcacgaaatggcgtcaacttcggtatccnnnnnnnnnngtatccggctctcgggccttggtga

SEQ ID NO: 97234 - DNA, 507 bp, Enterobacter aerogenes
  misc_feature (22)..(31): n is a, c, g, or t
atggcgtcaacttcggtatccnnnnnnnnnngtatccggctctcgggccttggtgaccagtggttccaggcgccggccaacccggtagaagggttatttttccctggctatagcgtagaggacgccgcggctgatctgggagatagcgccattactgaaaccgcaggcgtgggcggctttgcgatggcatcttccccggccatcgttaaatttgtgggggggacccccgctgatgcaactgaaaatagccgacgcatgcagtttattaccgtgggctcaaaccctgcgtttactctacctgccctgaacttttcaccgaccgcggccggtatcgacgcgcgtaaagttgtcgatcgcagcatactaccgattatcaacaccggtatcgcccataaggaagccggcgttggccagattggcgccggaatcaccacggctccgatggcctgctttagtgcagcgattcgggctcttgcgcaaaagctcactgaggagaatcccgaatga

SEQ ID NO: 97235 - DNA, 963 bp, Enterobacter aerogenes
atgagtaaacctttagccgttgtggccgtgggcggaaatgcgctcattgccgatgacaagcgtaatagtattgatgaacagtatgcgtgtgtcactgattccgttcgctatctttgcgatatgatcgaggtcggttgggaaatgttgttaactcatggcaacgggccacaggtcggcttcattctgcgtcgttctgaaatatcccgggaggaagtctctccggtccccctcgactacgcggtgggtgatacgcagggagcgattggttatatgttccagaaagcgttcaaaaatgagctgcagcggcgcggtattcacaaacctatagtctcactagtgacgcaaacccttgtcgataaagatgatgccgcgttcagccacccctcaaaacccattggcgcgtttctggatcgccataccgctatgcagcgccagaaagagctgggctggacaatcatggaggactcagggcgcggctggagacgtaccgttccatcacctcagccactggaaattattgagcttgaaaccattgctcagttattgcgttacggttgtattgtgattgcctgtggcggtggcggtattcccgttgttcgcgatcgtgatggaatgttgcatggtgtagaggcggttgttgataaggatttagcctcagccctgatagcagataaactccatgccgaattactgctgatatccactggggttgaacaggttgctgtcaactttggtacgcccgagcagcgggggatcaatagcctgactatcgctgaggctcaacaattgctcaaagaagggcaatttggtgaaggaagtatgcagcccaaggtcgaagcgattgttgattttgtgtcgcgtagccagtcgaaagggagaagtgcgaagggacttattaccagtccgaatgccattcacgcggctttgcagcataaaaccggcacctggattggagaggagtaa

SEQ ID NO: 97236 - DNA, 198 bp, Enterobacter aerogenes; identical to SEQ ID NO: 25167

SEQ ID NO: 97237 - DNA, 225 bp, Enterobacter aerogenes; identical to SEQ ID NO: 80557

SEQ ID NO: 97238 - DNA, 240 bp, Enterobacter aerogenes; identical to SEQ ID NO: 80558

SEQ ID NO: 97239 - DNA, 663 bp, Enterobacter aerogenes
atgactcaaacagtaccgaaaggctttgtcagagcttacttacgcgcatccacgactgaacaggatgcaacacgcgccctggacacgataaataccttcgccatcgagcgcggcctgagcatctgtaactactacattgaaaatgaatcaggttctaagcttgaacgccctgagttgttccggctcctgaaagattgtcagcaaaacgatatcttgctggtagaggatgtggacaggctttcacgcctggtaggggaggactggaacacactgaagaaaatgatccggcagaaagatatccgggttgtggccgtcaacgttccgacaacctggctcgcatcgggtcacaatgattttgacagccgaatgttttcggccataaacgatatgttgctggatatgctggccgccgtcgccaggcgagactatgaacagcgccgggaacggcagcagcaggggatcgccagggcgaaaagggaagggaagtataaaggccgccaggttaatcagtctcgctatgacgccataaacaggctgattgcgagcggcagctcctggagccagattcaaaaagtgctgggttgtagccgggcgactatcagcaaagctgtgaagcaacagaccgttaacaaaatgaaccatgaacctgaaggtagggagtag

SEQ ID NO: 97240 - DNA, 663 bp, Enterobacter aerogenes
atgggtaaaatcttgcttgtcgtatcagataagggtggggtaggcaaaagcacctacgtagctaacacaggctcaatgctggtcaacaaaggtaagtcggtaattatcctgaagacagataaaaaccacgatctgttgagctggaacgaaaagcggacagataacggcttactcactatcccggttcacgcagcttacggaaacgtcagcaacgaaattaagcgccttagtaagctgtgtgaagtcctcattgtcgattgccccggccatgacagccaggagttccgtagcgccctgacagtatcagatatcgtggtaacactggttaagccgtcctctgatttcgaaagcgaaacactgaccagtgttacagagaaaatccgcaccgctcagaaagctaacgcagctctggaaccgtgggtgctgttcaccagaatcaactcagcgaaaccccgccacagaaaagcggccattgatctggataaattactgcgttcggacaacatctggattcaacctctgaaaacccggatatccgagctggatgtgtatgaaagcgcctgtaatgaaggggcaggggtacatgacgttagccgggcatcgagcctttcaacagcgaaagcacagattgaacttgtggcacaggaaattggcattttatag

SEQ ID NO: 97241 - DNA, 285 bp, Enterobacter aerogenes
atggctttaaaactaaaccgtccgaacatcgatgaatctcagcaaccagcaacaaacgcagaaaccgcgcgttttatctccggcgctaccagagcgcctgtagtgggtaaaccaaagttgatgaacttcagactgccagcgtactttgaggagatcctggaagctgaggcgcagagaacaggccagagcaagacaaccgttctaaaggcagcgctggccgcattcgataacctggacgagaacctgaaaaaccactggctgcttgaatctgcaaaattagggtag

SEQ ID NO: 97242 - DNA, 180 bp, Enterobacter aerogenes; identical to SEQ ID NO: 80559

SEQ ID NO: 97243 - DNA, 312 bp, Enterobacter aerogenes
atgttcatattcagatatattaaagctcttattaatatctacttgttatacatccaaccgatattggggatgttccttataggtataggcttatggggtttctatgcacctgatgagggaacttgtactaatctcaatattgagttatgcgctgtatcagctattgatgttctgaagcctgctatttttgtatttttaggcattattaccgttgccggatggtactttagcgaacttcagccgaagctaaggggggagggcaagtatatgaaggtaaaaacaggtgtaaaaccggaagatttcgttaagtaa

SEQ ID NO: 97244 - DNA, 1782 bp, Enterobacter aerogenes
  misc_feature (91)..(100): n is a, c, g, or t
atgtgttctttggtaacgatgcagggcaaatcaccgcttcagatcatgcccggtattttcgttgcattgagattaaggactactttcaggnnnnnnnnnntccctgttgagtatgttcagacatcctctttcacgccgatagacaaacagtcggcaatcaaggcgctggatgatcagatcgacaaactggaaatgacggatgacgcggctcaatccttactgactgatttaaaagttgctctcgacatggtgtccagtggttacatttctttcggtaaaagtcaccagaccctgattgtctacgctgacacgccggaacgcctggtgaaagacaccaatatcgtgacgactactctggaggatttggggcttatcgtcacctactcaactatgagtcttggcgcggcttattttgctcagctacccggtaactatacgttacggccacgccttagccctatcagcagtctgaactttgccgaaatggaaagcttccacaacttctttacgggcaaagagaaagggaatacctgggggaattgtctgttaactctggggggatcaggcaatgatatttatcacctcaactatcacatgactaccgagcatcaaaattacttcggtaaaaaccccacgctggggcataccgaaattcttggtacgtcaaacgtgggtaaaacggtagtgatgatggctaaggcttttgccgcccagcagttcggtacgccggagtctttccctcctgaaaggaaacacaagaaacttactaccgtatggttcgataaagaccgggcagcggaacccggtatacgttcaatgggaggtgcttactatcgggtaaaagaaggagagccgacaggctggaaccctgcggctttgccccccactaaacgtaatatttcctttatgaaagacctggtgaggttaatttgttcgctaaacagtgagccgcttgacgactaccagaaccgcctgatttctgatgccgttgagcgccttatgcaaaggtcagatcgctcttatccgattagtaagttgcgaccacttattctggagcctgatgatactgaaacccggcggcatgggcttaaagcccgtctgaagccctggactcagggagaggaatttggctgggtgatcgataaccctgaagatacgtttgatgtggataatctggatgtgttcggtattgatggaacggagttcctggataataaggtactttccagcgttgcttcattctacctgatctaccgtgtcaccatgctggccgatggccgccgactccttatctacatggatgagttctggcaatggattaacaacgaagcgttcagggattttgtttataacaaactcaaaaccgctcgtaagctggatatggtgcttgtcgtagcgacacaatcgccggatgaactaattaaatcacctatcgcggctgccgttcgtgagcaatgcgcaacacatatttatctggcgaaccctaaagggaaacgtaatgagtatgtggacgagctgcaagtcaaagagctttattttgacaaaattaaagccattgacccgctctctcgtcagttcctggtcgttaaaaacccacagaggaagggggaaagtgatgattttgcggcttttgcaagactggatttggggaaggcggcgtattacctaccggttctcagcgcatcgaaacctcagcttgaactgttcgatgaaatctggaaagagggaatgaagccggaagagtggcttgatacctatctggaacgtgcaaacctgatttaa

SEQ ID NO: 97245 - DNA, 771 bp, Enterobacter aerogenes
atgaaaaagcatatcgttgcggcacttatcgcctctgttacggttatctctggtgctcaggctggtattcccgttgccattgatgcaagccctgaatgggctatcgaagcgcagcgctggacagaacgtctcaaacagtggcaggacacggtgagccactaccagaaacagatcaatgcctataagcaggagctgctgaccaaaacgggcattcgtgatgttcagggactggtgcagtctgcgcaatctgtcagtaaggagctggagaagatttacgaccaggggaactccttcattgatgattacattaagaacccggaagccgccctgtctgagcaagccagatctcttctggccgattataaggtgacaaacacctgtaaaggcctgggttatacaggtgaccttgtgcggggctgtgaagcctcgttcctgtcccaactggcggggatcgagtacggcaataagctggaaagtaaactgcgtgaagataatcaggagatggccgatcttatcgaccaggtgaagaacgcccaggacacgaaagccacgcaggacgcgacaaacgctgtatctctggcaagcctgaaatttaacaagctcaaatttcagtatgaaatgtatcgcgataagcagcgcgatcttgcagaatacaaggagaaaatgttacaggccgcatatcagcaaaaacaattaggagcggttaataccgatacccctgttgtagactataaagcggcgtttgatcagcagagctatgaaatgaactga

SEQ ID NO: 97246 - DNA, 648 bp, Enterobacter aerogenes
gtgccggtccgcctgacgccattgcagggcgagatagtgtggtcagagaagacgggcgtatggggagaaaaaggggaggtctacgccgatcgtatcagcaacccgctgcgtttccagggccagtattttgacgctgaaacggggctgcactataatcgacatcgttactatgatcctgaaattgcggggtttattagccaggaaccgattggattagccggcgggctgaatgtttatcagtatgcgccgaacccgctgggatgggtggatccgtgggggttgagttgttcaagtgatgcaagagctcttcgagcgaatatggttgcggcaggaaaaagtgagccaagttttaaaaattcagcacatcatattgttatgtcaaattctaaagatcaaaggatggtcgctttgcagaaccaaatgagtaaattaggaatagatatcaacactgcggaaaacggtatatttttaccttcaaatagtaaagtgattgtgccagcaggaaacaaattgccaaatcatgctagcattcatactaatgcttataagcagaaagtatatgatcgtttaagtataaagaacaatagtggtgattttatatccgagctaaatagaatcaatactgaaattgctaatggtacattttaa

SEQ ID NO: 97247 - DNA, 441 bp, Enterobacter aerogenes
atgtccgacgccgcagactccacgctgaatgccctgaaggcgcttattgccgcctttcagaccggcaccactccggttacggttaaagcctccaccgcagaagcggccagcttaccgccaaagtttcccgggccggatgacaaaaagcccgcggataactccacgcagcagaaaaccgaatacaacgagcgcgggcgcctgccggcgagcagaacgcagaccgaaggcaactacgccaggcagtacctggaggggtatgttaaagagtccgatcatccctcggacaaaaaaacggagccgggctgcccggccagcctgcatatcagcctgttcttcgacggtacctgctgtaatgaagaagatggtgatgaagtgtatggctcgcgaaacccgccgctgaccaatatcggccgattttatcatttggaaaaccggtattga

SEQ ID NO: 97248 - DNA, 450 bp, Enterobacter aerogenes
atgtccgataccgcagactccacgttaagtgctctgaaggcgcttattgcggccttccagaccggtgccaccccggtcgctgtcaaaacctccaccgcagaagcggccagtttaccgccgaattttcccgggccggatgataaaaagggagaaaagcctgccgataactctgtgctacagaaagccgaatacaacgagcgcggccgcctgccggcgagcagaacgcaggccgaaggcaactatgccaggcagtatctggaaggatatgtcggggagtctgaacatcaatcggacaaaaaaacggagccgggctgtcccgccagcctgcatatcagcctgttcttcgacggtacctgctgtaatgaaaagggagccgatgaggtgtacgggtcacgtaacccgccgctgaccaatatcgcccgattttatcatttggaaaaccggtattaa

SEQ ID NO: 97249 - DNA, 831 bp, Enterobacter aerogenes
atgaaaaacacaatacatatcaacttcgctatttttttaataattgcaaatattatctacagcagcgccagtgcatcaacagatatctctactgttgcatctccattatttgaaggaactgaaggttgttttttactttacgatgcatccacaaacgctgaaattgctcaattcaataaagcaaagtgtgcaacgcaaatggcaccagattcaactttcaagatcgcattatcacttatggcatttgatgcggaaataatagatcagaaaaccatattcaaatgggataaaacccccaaaggaatggagatctggaacagcaatcatacaccaaagacgtggatgcaattttctgttgtttgggtttcgcaagaaataacccaaaaaattggattaaataaaatcaagaattatctcaaagattttgattatggaaatcaagacttctctggagataaagaaagaaacaacggattaacagaagcatggctcgaaagtagcttaaaaatttcaccagaagaacaaattcaattcctgcgtaaaattattaatcacaatctcccagttaaaaactcagccatagaaaacaccatagagaacatgtatctacaagatctggataatagtacaaaactgtatgggaaaactggtgcaggattcacagcaaatagaaccttacaaaacggatggtttgaagggtttattataagcaaatcaggacataaatatgtttttgtgtccgcacttacaggaaacttggggtcgaatttaacatcaagcataaaagccaagaaaaatgcgatcaccattctaaacacactaaatttataa

SEQ ID NO: 97250 - DNA, 633 bp, Enterobacter aerogenes; identical to SEQ ID NO: 16794

SEQ ID NO: 97251 - DNA, 207 bp, Enterobacter aerogenes
atggaacgcttcttcagaagtctgaaaaacgagtgggtgccagtgacaggctatataaactttagcgaagcagctcatgcgatcacaaactatatcgtcgggtattacagctcgctaaggccgcatgactataacggtggattacctccaaacgaatcggaaaaccgatactggaaaaactctaaagccgtggccagttttagttga

SEQ ID NO: 97252 - DNA, 771 bp, Enterobacter aerogenes
atgcgcgagtacgtgtactatccgggaagttttcagccgctggcgctgctgacgcaggaagcgggcaggaaggagagctggcactatcattgtgacccgaacggcgcgccggtgcgcctgacgtcattacagggcgagatagtgtggtcagagaagacgggcgtatggggagaaaaaggggaggtctacgccgatcgtatcagcaacccgctgcgttttcagggccagtattttgacgctgaaacggggctgcactataatcgacatcgttactatgatcctgaaattgcggggtttattagccaggatccgattggattagccggcgggctgaatgtttatcagtatgcgccgaacccgctgggatgggtggatccgtggggattagctaagtcatgtggtggaacaacaaaattttatcgttcaatgagtcatgaagatttcgagtatttacgcactacaggtaaattaagaggaacatctgaaacattcatttcaccaagaagagcattctctgagaattacgatggagttttagtgaggttttaccttaaaaacgatgcattatcagaactaaaatcaattggggttaaagattcagcagtacttaccagtattacttatccggacatgccagatgtagggaagggatggaaggagacaagtgcattctttaaagctgaaggggaacagattaatattggattaggtaaaggtaaggcattagatatattcaatcaagggattcagcgattcgagaggttaaattaa

SEQ ID NO: 97253 - DNA, 495 bp, Enterobacter aerogenes; identical to SEQ ID NO: 94785

SEQ ID NO: 97254 - DNA, 600 bp, Enterobacter aerogenes
atggaaaagcatttaccaaagtactcaatcccagaacggcaaattagagccttattcacaaaagattttatccgtgtctatcaggcatattccgatgaaatagctgatagtgcgattaaaaacaatacgttcgtttctcccccatttagcctgactagaatgacatggattaagccatcatttttatggatgatgtatcgctctggctgggggaaaaaagacagcaatcagacgagaatattagctatagacttgagtcatgacgcattccaaaaaattcttcatttaggggtgccaagtgattatcattcagcatcaacctttcaaaataaagaagaatggcaagataaaataaagaattcagatattatatttcagtgggatcctgagagagatattcatctaaataaacttaattaccgtacaatacaaattggaattcgaaaccaagcagtcattaatttttgtaatgaatggattgttaatctacatgatatcacccatcaggtacaggagattcacaacctcgtctctttaggcgatttttgcaaggcgaaaacgcttatccctacagaaaaaacatatcatttccaactttaa

SEQ ID NO: 97255 - DNA, 288 bp, Enterobacter aerogenes
atgcgcaaatttatgttagcggcaggtcttgccaccctgctaacgggatgcggtgatgatggggtttacggcaactatatcaatcaacagtatggcgtcaggcttgatattcagaaagatgtgatcaagtttcgtgatggtgtttttattgttaaaagctgggatgaaagcaagaaacctatttatatcgccaaaacacaaaacaaagatctcggatcttggacttttaaaatcgaaaaagtcaaagatggcgtagtctatcaaggtgctgtttttaaaaggaactga

SEQ ID NO: 97256 - DNA, 276 bp, Enterobacter aerogenes
atggaaaacaacacaatcaaatgtcctttttgcctaaaagaaagtcaaagaggtgttcaggtatgcacgagctgccaagcgtcagttctgtatggaacatatcccggttggtatgctttcgtggttatactattgaccttcgccctgtcgatactgatcggaatgtctacaggtatggcaggagctactattagcttaccaataatagcttttgtcggttttgtcgcaggtaaggcgattttctcagataacattatttttagaagaagaatgtaa

SEQ ID NO: 97257 - DNA, 570 bp, Enterobacter aerogenes
atgaaaatcggctatgcacgtaaatctacgcatcttcaggatgtggcgcaccaggttgacgaactaacaaaagctggatgtgagcaaatctatcaggatcagacctcacgtagcggcccaaagcgcgacaaaaaaggtgcgccggaactggagaactgcctgaaagcattgcgcgagggagataccctagtagtttgggcactagatcggctcggcggttcattgggtcaagtcattactttactcgacgacctgaagaaacgcggaataactttcatagccatcaaggacagaatagacacaaatgcgccagttataggggaaatctatactcatctgatggcgatattctctagctttgaacgcaaccgcaatattgaaagaacgcgctcaggccttgcagctgcacgcgcaaggggccgtgtgggagggagaaaaccgtcactttctgaagaagatgttaaacaaattagaatcttacttgctgatcctgaaatgacagttggtgcagttgctaagcgcttcaacgtttctcgcatgactatttatcgctacaccacaaaatcatga

SEQ ID NO: 97258 - DNA, 1149 bp, Enterobacter aerogenes
atgattaaaaaattatttttaaaaaattttaaatgctataaaaacgaaggctttttattcgggaaattgactgttttttgtggcaataattctgttggtaaaagtactgcaatacaagctattgcgattccgttccaaaataaattaagtaagctaatagcaattaatggggatcttgtaaacttgggtgcatcatctgacatattctcgaactatgcagatgttggagacgaagctctagatattgaaattacatttcagaatagatctagccattcatttaaatggggggttaatgattttcaggagcaacaggaactaaaaaatcatttgacccttaagagtacagatgtaaaaggcttgcaaaagttaactaataattatttccatgagaatggattccagttcattgaggccgaacgttatgggccaagatattatttcaatgtaaataaaaatgagtcaatattaaactggttaggttctaagggtgagttttcatatgaagttttttcttctttagaggaatccaatctaagacttccagagagggatctacgaactcatccagaagccgcagacaatacatctatacggcgaaacatcatttattggatgtctgaaatttcaccaggatttaatattgaagctgatatagttagatctgctggtattagtcatgcacattttcaaacaagtaactcagcaaaaactattcctttgaatatgggatttggacttagttattcccttagtatagttatcgctcttttagttactaaacctggagggctggttgttttagaaaaccctgaagcacatttacatcctcgtgggcaaagttatttagggcgtttaatcgcacttgcagcattgtctggtgttcaagtaattattgaaactcatagtgaccatttgttaaatgggatcagagttattgcaagattgaagaatgaatataaaaataatgattttaaagtctattatgtgtcagctacagataatggaccaagtcgggtggatgaaatcgatataggagataaaggcgagctttcaaaatggcccgacggattttttgatcagcaatcgtacgatattaaaacaataattaaaggggtggatataaaagataaaggggaaataaaatga

SEQ ID NO: 97259 - DNA, 570 bp, Enterobacter aerogenes
atgataaagcatacccgtattttgcccggcggactggcggtgctggtcgccgtttttctctgcctgctgacggcctgccgcgaccatagtcgcgacggcatgagcggcgctgatataaacgtcttaaaccacggtccggatgccattgtctcgttgcaggtgaatggctacggcgggccaggcgctaactcctacggcggcggcggcggcttctgctgtgtgatggtgccagatgtctggcgcccgggtctgacggcaaaaatcacctggacctccgatcctaacgcatggatagacccgaaacatatcccagacgatcatgcgagtcattatcagcgtcatggaccgatcaccgtccccattgaacgctgggagaagggacaggcctgtggctttgaagtgcatattttcccgtgcgacaaggtaagaattgttcgttcttgtcgcgatcgctcatctccggaatatccgatacatcgtgcgcccgatgaggatgaaaaggcgaaaaaaatattattcgaccatgttaaggagaatatcgtatgtccgacaccgcagactccacgctga

SEQ ID NO: 97260 - DNA, 435 bp, Enterobacter aerogenes
atgttatctactactgcttttgcggcgcttgctttgcaatgcgcggccagcgttcatcccgatactgcgcatgaagttgcaagggttgaatctggttttaacccatatgctattgccgagataataccgaaggttgaacgtaagcccggtgacaaaggcgtagtgtcctactttcccaaaactaaggaggctgcactccagatcgtaaatcaaattgaatcacgaaatcatcgttactcagtcggtcttatgcaaataacgagtaccaattttgcaaacttcaatacaaccgctgagaaaatgtttgacccctgcgaaaacctcaaggtctcagagcaaattttggtggactgttataaacgtattccggcaatccagaaacgggaactaaacttgaaccagattttaataacaccagttatatacagcgtatag

SEQ ID NO: 97261 - DNA, 291 bp, Enterobacter aerogenes
atgttaaaactcaataaacgttatttaactctttctgtatttatggctgcattgatgctttgtgtagcagaacctgcctttgctgatgatgtatccactaaaacaactggcttcttgcagaagatcatcgattttctgacggatatccgtaagccagcaatcaccatcattgcgctggtaattggttatattgctatcttctcacgccagcatgcagcgtggattacgcctttaattatcgggattatcatctttattgttgcgccatatctgcctgactggttagcgtaa

SEQ ID NO: 97262 - DNA, 525 bp, Enterobacter aerogenes
atgtgtctatacttttatgcgaaagagaataatgatttaattgcaattacatttaaaaacatttttatgtcggataatgtcactcaggctctaatcgaacgcgcaggaaaccattggtatagagttgaaatggcttatgatgtagctttgcaacatttttggggggttgggattggagcatatacggagttcacgcttaataacaaaagctcatacccgtactatagttcacttccttggtatctgaatccatttgggttgcctgcgataagtctgtatattgaaatggcagctacgtgtggatggctagcgttaatagtgtggcttgcatggcattataaaatgcttttttctaaacatgtatcttcagcaaagggaagtgtaatatttttttctctcattatctccatgttaatcttaatcatagagtcaagtttcatgcgtccctactattgggcattgattgggatttgtttagcccattcagacaaaaaatactttcctcgacgtatgagaaatgactga

SEQ ID NO: 97263 - DNA, 261 bp, Enterobacter aerogenes
atgaataaagtctggtcttttatacttctcttgccttctttattgtttatttcaaaatttagcatggcatatgaagttggagtggaaattcatcctgatggctactatggaaattctgattcaatattgaagcttatacaaaagtatcatttcacttcgtttcgagttgattatagatgggatgtgattgaaaaggaaaaaggagtgtttactcctcctcagaataaaacagaaaaaatcataatggatgcaaaagtataa

SEQ ID NO: 97264 - DNA, 276 bp, Enterobacter aerogenes
atgaaaaaagaaaataaatgtaatagtcagaactcagcagaacttacagcattgctagaatattctcgctttaccaagaaagtgcttgcgaagcctgctaatgaagtattcgatctatttactgacaagtattatatggaaactgtttacgatgatattattgataaaacgaagaagagtattgatcaaagtcagcatagattcatagattttgaagaggttagaataaatataatgtgcatgcatacagaggccattatgctttgttatatgtga

SEQ ID NO: 97265 - DNA, 381 bp, Enterobacter aerogenes
gtgggttttcacctggtcttccaccaccagagtcagcgtcaggatgaacggacaggagatggacagttccgggttcagcaggttgctgtagttgtcggccatattccacaggaaggcgatttccgggttacgggccagatggaaattcaggatacgggccgtgctgttcctgccgttctcacgcaggcccagcgtcaggtaatcagcccggacattcaggtcaaaactgtcctccacacactgataattcagatcagaatacgggtccagctgacgtcttttcgggtacagggagtccgggttatggttaatcatctccccgacaatatcgataaaggcctgtgcatccaccgtctgtgtggcgatactggccccctgtaa

SEQ ID NO: 97266 - DNA, 498 bp, Enterobacter aerogenes
atgtttcacccgtttgatattctcaccctggacaatggcgccaggctgatatttactccctgcccgggaaccagaggggtgtcccttgctgattcattaaaatccttaaaagaagccggcgcacaggctgtaatcaccatgatgacgctggctgaactcagtgaaaatgaggctgatgccctcccttcactgtgcgctaacctttatatggactggtttcacctccccgtagaagacagctgtgcacctgaagccccatttgaacaggcatttgcccaggaaaaaacgaatctgctggcgatcgtcaggtccggcggaacgatggttatccattgtcatggtggttctggccggacagggatgatggccgctatcctgatgctcgagtcagggtatctgcctgctcaggtgaaaaaacaggttcagcaaatcaggccaaaatcactgacttcgacggtgcaggtcagttatcttaacaggcgatacggctaccagtaa

SEQ ID NO: 97267 - DNA, 225 bp, Enterobacter aerogenes
atggatttcatttttacgctctgtgaccagatggcgggagaaggatgtccggtgttcccgggcggccccataacggctcactgggggttcagggatccggcttccgcagagggtaccgataaggagaagtaccacgcctttgtggaggttgaaaaacagatagccacgcgcatccggctttttctgagccttcccctggataataccggatctgacgaacattaa

SEQ ID NO: 97268 - DNA, 606 bp, Enterobacter aerogenes
atggggattgatataaataaatttacctataaacaacatcaacctattggagataaacttaagttagttactatcgcacgtttaacggaaaaaaaaggaattgaaacttgcattaaggcctgttcagttttattaagcatgggtgttgattttgaatatcatattatcggtgatggtcctgaaaaatcaaaactaacgaacctatcccattccatgggtcttgggaatagtatcttttatcatggcttgcaatctcaggaggtaatatctaaattccttgatgagtctgatatatttttattgccctctataactgcttctgatggagatatggaaggcatacctgttgccttaatggaagctatggcagtaggacttcctgtgatttcgagttatcatagtggcattcccgagttaatcgatgatgaaatatccggatatctaattgatgaaagagattataaatcgttagctagtaaagtaataaaaattaaaatgctcgatcatgagcacattcttagaatcacccgaaatgccagaagtaaaatagaacgcgaatacaatcgcgataattgttattctgagttggtctcatatctcaagtaa

SEQ ID NO: 97269 - DNA, 510 bp, Enterobacter aerogenes
atgactgatattacgaccccttctgtttatgttggcacttaccataaatacaactgcggaagcattgcgggagcctggctcgatctgaccgattttgatagctcagaggagttttacgagcgctgccgcgagttacacgcaaatgaggctgatccagaatttatgttccaggattgggagggtattccgtctgatatggcgtcagagtgccatatcaactgggattttattaacggctttaaacaagcccgcgaggaaggaaacgaagcggcgtttgtggcctttgttgatctgtttaatagcactgatttcgacctgtttagagatgcctatatgggcgaagctaaggacgaagaaacttttgcagaggaatacctgaatgatagcggtctactgaatgaaattcctgaatccgtagcccgatattttgacatcgtagcctatgcgcgggatctgtttattggggatttcagtttacatgacggacacgtatttaacatgacttgctga

SEQ ID NO: 97270 - DNA, 249 bp, Enterobacter aerogenes
atgaccaatgaagcagttctcccccagtgttacgttctcacaaataaacgtgtgcgactgtatccggcttccactaccaatgacacagcctttctgtatctcaacgaaggggccgacaaacacattgtccctgagttcacattcataaatgttgaccggtttgacaatacggacattggtcccataaatcacatcccggacagcacattccataaatttcatactcacacgacctttaaatacagatga

SEQ ID NO: 97271 - DNA, 291 bp, Enterobacter aerogenes
atggatcaacgacctgacgtgaaagctgtcgggatcatttcagaaggtgactattttgaagagctgaaggaactgttcaccctctattgtgacagttgtccgggctgggaactgaacggtcgtctgattaaacattttacggttcagaatgaacctcgttttacgaatggccgctgggtgtcacatccctgctataaggtccaactgagcaacggtgagctgagaccgttttcggttgaaaaggcaatagacgccatcgtaaaagcagctgcagctgatcaacagaaatag

SEQ ID NO: 97272 - DNA, 261 bp, Enterobacter aerogenes
atgcaggatctgccagccggcccagtcgtcctccgccaggccatcttcaatcaggactatcgggaaatccttcaccagtcgctcatagtagcgagtcatttcttcagcactgagctgagcgttttcagtacgcagggtatatttaccatcggcgtagaattcgctggaggccggatccatacaaataacaatgtcttcacccgggcggtatcccgccttgctaattgcctcgacgataagctccagcggctggcggtttga

SEQ ID NO: 97273 - DNA, 291 bp, Enterobacter aerogenes
atggacgaactgatcgcaaaagcgtggcggtttgtgcgtgagcgttttcgcagctatcaggctgagcgtaaatctcacggccggaagcgggatactgcacggcgggatgcttcacggcagcgtaaggatatcgagacgcgcgtgcgtcagcaactgacccgggagtacgccaccggccgcttcaggggcgatcatgaagcgctcaagcgtgaggttgagcgtcgtgtgcaggagcgcatgctgatgtcgcgcgggaacaactacacgcgactggccactgtccccatataa

SEQ ID NO: 97274 - DNA, 360 bp, Enterobacter aerogenes
gtgggtcaacaccacctgagcagccgcttttgccacgtcagacgctgtctgtacggcaatgcccacttcagcttgtttcagtgccggcgcatcattcacaccgtcccccgtcatgccgactatacagcccgtctgttgcagggaccgcaccagacgaaatttttcttccggatagaagttagcaaaaccatcaaagcggagaggtgtctgcagatccctgaccgcatcgccgaagcggtcaccgagccctgtctggcggctgataactctggcggtatcaaccgtatcaccggtgaccatgattatcctgatacccagtgcccggatatccctgaccagggttggggcatcatcgcgtag

SEQ ID NO: 97275 - DNA, 252 bp, Enterobacter aerogenes
atgacaatttatctttcacgaacgccggcccgctgctggtcactccggccgggccggtttgttgtgttggccacagtgggcaatatcatcattgccaccgtactggcggccggtggtttccttatgacgccggtttcactgacactgctggccatcatgtttgctctggttttgctggccaccctgctgctcgatcagatcaaaatatggctcttcgccagaagagctgttgaggactcactgaaaagctga

SEQ ID NO: 97276 - DNA, 306 bp, Enterobacter aerogenes
atggtgaccgtcgacccggcttccgccgtcccgctcagagccggcgtcgcatcattggtcagcccgccgctggccagcggcccggtgtgctgctccgcatcatccgtgacctgcaggtcgctgaccggcaccacggtggtgtccaccgtgagcacaaagtccggcgagtggccgctggtgttccccgccacatcggtcaccgtggtgctgaagcggtgctccccttcacccagcggatccggggtgaagctccagtgcccgtcctcatccgccaccacggaacccagcaccgtactgccgtcgtaa

SEQ ID NO: 97277 - DNA, 264 bp, Enterobacter aerogenes
atgaatgctgccagtgatgcttcggtacagcaggttatcaagggcaccggtgtcgttaaagacattgatatgaatagtaaaaagattaccatttcgcacgaagcaatccctgctgtgggctggcctgcaatgaccatgcgcttcacttttgttaatgcagacgacgctatcaatgccctgaaaaccggcaaccatgtcgatttctcgtttattcagcagggcaatatctccttactcaaaagcattaacgttacgcaatcctga

SEQ ID NO: 97278 - DNA, 177 bp, Enterobacter aerogenes; identical to SEQ ID NO: 14876

SEQ ID NO: 97279 - DNA, 159 bp, Enterobacter aerogenes
atgattagcgatgccaacaaagcagtgaatgacctggagagtattgtccctctgctgggtggcagttcgtcccgcaaagattacgaagaggcacgtaaactcgttgagtatctgcttgaacatgatccggacagcccgctggttgacctgggaagataa

SEQ ID NO: 97280 - DNA, 339 bp, Enterobacter aerogenes
atgaatgcctatctgaaactgaataccaagagccaggagatgctgctgataccaagccaggccgttatcgataccggcaaagaacagcgcgtgattactgttgatgatgaaggcaagtttgtgccgaaacagatccacgttctgcatgaatcacagcaacagtccggcatcggttccggcctgaatgaaggcgataccgtggtggtcagtggcctgttcctcattgactccgaagccaatattacgggcgcgctggaacgtatgcgccaccctgaaaaaacagaaagcagtatgccagcaatgtctgaccagcctgtaaatatgcattcagggcactga

SEQ ID NO: 97281 - DNA, 177 bp, Enterobacter aerogenes
atgatgattgtatcagtaggaatgatgcttctttgtattatgcttggcggttttatgattagaagctgcactggaaaaacaaattcttcaagcgaagcaaaacaagcaatatcagatgttagaaaaatgatagataaaaaagcactgattaaatacaagaggaataatagaatatga

SEQ ID NO: 97282 - DNA, 165 bp, Enterobacter aerogenes
atggtactgatgctgagtaattttaatttgaacataacgcttctcgtacaggcagacctggtaaatggttcaaacgaaatccagagtattgatagggatactttaccgaacgctctctgtttgccgggtgacaggataatgacaatgttgtcatttttgctgtaa

SEQ ID NO: 97283 - DNA, 180 bp, Enterobacter aerogenes
atgacatttatcagaaatataatgagttatttactgcttttatttagcatgtggccagtttttatggtgttgcttattggagtttcattggccttttatggtgtattgatgcgtaaaactgccattttctgctttattgcaggcatcatcattggtttgactggatggttatatggataa

SEQ ID NO: 97284 - DNA, 132 bp, Enterobacter aerogenes
atgcacagcgggtcggtcatgccaaaagccgccgataccgtacgcttgttccgtcagatctacgcatttccgaaatttctgctgttcgccggaagaaatctttcgcgttatctcgtgaagagaatgaaataa

SEQ ID NO: 97285 - DNA, 177 bp, Enterobacter aerogenes; identical to SEQ ID NO: 5364

SEQ ID NO: 97286 - DNA, 150 bp, Enterobacter aerogenes
atgaccgtcggcctgcgggctggtcacctgaaaaccggcgcccccagccgtggggagcgcattgagaaatacaatcagctgatgcgtattgaagatgaattaggtgatgccgccatctttgccggtaaagccgccttcaaaaaacgctga

SEQ ID NO: 97287 - DNA, 132 bp, Enterobacter aerogenes
atgttcagaatgaacacactcgtctggaaaaccaccataatttggaaggaaataaatttgagaaagaatacaatgacaaaaaggctgaacagagagcgcttcctggagcggatacaagagacgaactcctag

SEQ ID NO: 97288 - DNA, 696 bp, Enterobacter aerogenes
gtggacaagaccagagatttcattctagaaggactctcccgctttaacctggctgatttgccaggacgaccttatgactgtgcttttgacctcttggctgcaacaccatcgagaaaacggctgattatgatgggctttaatggctcgttagctgattcatgcatgactaatcgccaggccatccttcaagattatgcacatccttttatttcaggtattcaacaaggggtacaaggaaagtgggggatcactcatcttgccaaaagactacagcaaatcccttcttgcctcggttatagctgggaggatgttatttataccaacgcattaatgatgtgttctcagaatgctgcaaccctgagaagagaggtagcttgtcacgacactacaatgaatgaaatcgaagcaaactcaatggcattttttgagcatgtaacagcccatttgagcgaaccagatttgatcgttgcatatagcaacagtctcctgtcactctcagccgcgagtttgttgctaaagcactttggcgatgcaactactctcaaattttctcagccgaaaggctaccacactactttcgcgtttatggccaatcttaacagtagaaatatcccggttatctgcgtgcgacacatgtcacgattcaaacctgaagagagttatatcagggcggctttcaaattaatggattgttaa

SEQ ID NO: 97289 - DNA, 2334 bp, Enterobacter aerogenes
atgaaaatgaacgtaacggacaccgtaaaacaggcgtgcggccactggccgcgcattctcccggcgctgggaatgaaagtgataaaaaaccgccatcaggcctgcccggtgtgtggcggtgctgaccggttccgctttgacgataaagaggggcgcggcacatggttctgtaaccagtgcggcgccggtgacggcctgaaactggttgagaaggtgttcggcgtgtcggcatccgaggctgccgggaaggtgaacgccgtcaccggccacctgccaccggtggccccggaggtgatggcagccgcagaggccggaacggaggccgaccgcaaagcagcggccgcgctggccgtcagactgctggagaaaacccgcccggccaccggcaacgcctacctgacccgcaagggctttgccggtcgtgagtgtctgacgctgaccgcgtctcacaaaaccggcggcgtggcctaccgcgccggtgatgtggtagtgccgctgtatgacgggaccggcgcgctggttaatcttcagttcattaacgctgagggtcttaaacgcaccctgaaaggcgggcaggtcaaaggggcatgccatctcatcgacgggcagaaacaggccgggaaacgcctgtggatagcggagggctatgcgacggcccttagcgtgcatcacctgaccggtgaaaccgtcatggtggcgctgtcgtccgtgaaccttctttctctggcgagcctggcccgcagcaagcacccggcctgtcagattatcctcgccgctgaccgtgaccttaacggcgacggccagacaaaagccgccgcggccgctcgagcctgcgagggcgttgtcgccctgccgccggtgttcggtgactggaatgatgcgatgatgctgaaaggtgaggacgccacgcggaaagccatttatgccgccatccggccagcggcacaaagcccgtttgacaccatgagcgaggcggaatttaccgccatgagcgccagcgataaggcgatgcgggtgcatgaacattacggcgaagcgctggccgtggacgccaacggccagctcctgtcccgctatgaaaacggcatctggaaggtgataacgccgtctgattttgcccgcgacgtagccggactgttccagcgcctgcgcgccccgttctcatcggggaggattgcgtcagtggtggagaccctgaaactgattattccgcagcaggaggcaccggcacgccgtctgattggttttcgcaacggggtactcgatacccaaagcggcctgttcagcccgcacagcaaatcgcactggctgcgcaccctgtgcgacgtggattttacaccgccggtggaaggggaaacgctggagacccatgcgccgaacttctggcgctggctcgaccgggcggccagtggcaacccgacaaaacgtaacgtgattctggccgcactgtttatggtgctggcgaaccgctacgactggcagctctttctcgaagtgaccgggccgggcggcagcgggaaaagtatcctcgccgaaatcgccacgatgctggccggagaggataacgccacgtcggcggatatcgacacgctggaagacccgcgcaagcgcgcctctctgattggcttctcgctcattcgtctgcctgaccaggagaaatggagcggtgacggtgccggacttaaggccatcaccggcggcgatgcggtctccgttgacccgaaataccagaacccgtactcgacgcatattccggcggtgattctggccgtgaacaataacccgatgcgcttcaccgaccgcagcggcggcgtgtcacgccgccgggtaatcatccacttcccggagcagatagccccggaagaacgcgacccgcagctcagggataaaatcgcccgcgagctggccgtgattgtgcgccagttaatgcagcagttcagcgacccgatgagcgcccgcgccctgctccagtcgcagcagaactccgatgaggcgctcagcatcaagcgcgacgctgacccgacgtttgatttttgcggctatctggaaatgttgccgcagaccaacgggatgtttatagggaatgccagtatcatcccgcgtaactaccgtaaatatctctatcacgcgtatctggcctatatggaggccaacggctacaggaacgtgctcagcctgaaaatgttcgggctgggactgcccatgatgctgaaagagtacgggatgaattatgagaagcggcacacaaagcaggggatacaaaccaacctgtcgctgaaagaggaaagctacggcgactggctgccgaagtgcgacgaacccaccgcgacttaa

SEQ ID NO: 97290 - DNA, 228 bp, Enterobacter aerogenes
atgaaacataccaccctcagcattaaagaactcgaatgccttgaacacctgcgcaacgtcggccactttgtcagcgcgatgatgcaggagcaggactgcactaccattcgccgcgacccggcgcaacagtcgcagcttacctccgtgatttacctgatgactgcccagctcgacggcgtggtcgaacgctgcaaccaccgctggttcaccggggagggcaatgtatga

SEQ ID NO: 97291 - DNA, 738 bp, Enterobacter aerogenes
atgaccgacaccccctttatccctgattacctgaaaccggcgctggagcgactggccgcagccagagcggcccatcttgaacaggcccgccggatggaggacaccctgacggccatcagccgcgcggaggagcagaaagcggagctggagcaggacaacggcagcgacacccgcacatggcgtgctgctttccgtgccgggggggccacgctgaccgatgagctgagaagcggccatatcgaacgcgtggcccgccgggagctggcgcaggagtgtgacaacctgaccgaagtgctggcctttgaacgtgaccagctgaaagtcgcctgcaacagcaccgcgcgggcattccggcaggcgcatcatgctgtgttgagtaaatacgctgaggaagagcttaaccgcgcgctgaatgacactctcggggcactggtccgggcgatggtgctgaaagccgaggtgatggaaaatccgctcgccaacaccaccggccatcagggctacaccgagccggagaaagaggtcatgcatcaggtggtgaccttcctgaccaggaaagtgagcgacttctccgtcacgccagcggatgagccggtgctctccctgaccggcttcccggccgtcgcgcttccgcatatggaccacgacgccgccagcacgcccggcgagcgtaaagtctggcaggagaaaatccgtcagcgcgaggctgacctgaaagcgcgggggctgctgccatga

SEQ ID NO: 97292 - DNA, 246 bp, Enterobacter aerogenes
atgatgcactgtccgttctgcaaaaagtcggcgcatgcccgcacctcccgctatctgtcggagaacgtcaaacagcgctatcaccagtgcaccaatattgagtgctcggcgacgttccgcaccactgaagccatcgacgaggttatccggcccccggcggagaaagcgccgcctgtcgcggagccggtcacacccccggcaccccgtaaagtgcagggctgctacagctcgccataccgtcattaa

SEQ ID NO: 97293 - DNA, 567 bp, Enterobacter aerogenes
atgaccacccttacgctacagcaggcctttgaagcctgtcagaagaacgaaaccgcctggctgaaccgtaaagccgaactggcggccgcagagcaggaatatcaggaacaggtgctggccggggatgaccgtataccggacagaatgcagacactgcgcgatattatcgatgtcaaaaaatgggagataaatcaggccgccgggcgctatatccgctcccatgaagcagtgcagcgcatcagtatccgcaaccggctgaatgactttatgcaggcgcacgggacagagctcgccgccacgctcgccccggagctgatgggactcagccagcagcccgcactcctgaccggccacgcgctcgaccgttcggcgcattacctgcgcgaagcgctgtccgtgtggctgagtaccggtgaagaaattaattattccgcagaagacagtgatattttaacggccatcggattcaggcctgacgcggcttcgcgggtggataatcaggaaaaatacacccccgcacagagcctgatttatgcccgccggcgcacggaactggccgaccggtag

SEQ ID NO: 97294 - DNA, 3114 bp, Enterobacter aerogenes
atggatattcctcatattttaagtcaaaacatcaactcaggtcgtgttgttctttttttaggttccggagcgactattggagctaaaacgcaaagcgggaaagaagcacctaaagggaatgatttggcaaatattctttcgaaggagtattttggagaggaaaaaactactaagacattatcctcggtagcggagttagcaatatctgaaactgatattcatacagtacaacagttcgttaaaaattactttgatgagtttgagccagctgagtttcatcttaagataccgacctttagatggattgcaatttatacgacaaactatgatttagtgatcgagaaagcataccaaagacaattaagtaaaactcaaaatattcaatgtatatataaaaatagcgatagagttgatgaagtattaagaacgactgactcaatttgttatgtaaaacttcatggatgtattaccaaaattgatgatctaaccatcccattaatactgacccctgatcaatatgtgacacataaacgtaacagagatcggttattcaatcggttagatgagcatgggcatcagtatactatagtttttgttggatatagcttagatgatttagatctcagacaagctcttttatccttgagcgaaactgttgaagagagaccgagattctatactgttacaccatcattgtctgatgctgaagtgcgtatgtgggagaagaaaaaaataacggctcttaaaggaacctttgaggattttattaattctttagatctaacagctccagtcgccttgcggaatgtgtctcgcgttaaaaaacagcatgagattgaacgtgttttaaataataacgatttggaattatcatctaaaacgttagagttgctctctagtgagcttgtttttatccgttcagacatacctactgataatcttactccgtccgacttttacaaagggaattcctatggttgggagtcaattaaggaatcttatgattgtcgcagagctctgacagatacaataattagcgaagttgttttactggaggaagtcgagagaaatactattgtagatttctttttagttaaaggtcatgcaggttctggaaaaaccattaccctaaaacgtatcgcgtgggactctgcagtagaatataatcgtattgctttatactgggagtcctcaaataaaatagatgttaatgctatctttgaaatatgtgagcgagcaaccgatagagtgtttttattcgttgataagccatcatttcatatttccgagataatggctttgataaaaagagggatctcttcaaacaccaagttgactatagtttcctctgaaagaggaaatgaatggaatatggagtgcgaaccattacattcttatacctctagggaatataaagtaccttatttgaaagagaaagaaattaaagatcttttagataaattagaaaagtttcaatgcttgggcctcattaaagatttatcccgcgaaaaacaagaggaggcattcagaaataaagcgggtaggcaaatattggtagcactttatgaagtcactatgggtaaatcttttgaagatattgtcttcgatgaatataataatattgagcctgagcaagctagattgatttacagaactatttgtgctcttaatcgtttgggagttcccgttcgtacaggtataatacataggatatttggtgttccgtttgaaatatttaagcagaaattttttagtcctcttgaaaatattgttcaggtcattaattcatctaataatgatgactatgcctatcaagctaggcatcctttaattgcagagtttgtttttgctcgtacgatgctcaatgaggtagataaagaagatttatacttcgatttgattggttctttagacattgggtattcatctgataagaaggcatatagagaaattattaaagctaagaatctaatggcactatttaatgatccgttaatcgttagaaggatctatgatgcagcaaggcaaatcggggagtttgatgattattatcatcagcagattgccatattcgaaatgaaacgtaagaaccctaactttaggcttgctgagcaacacctagatattgcagccgagattgcaccatataatccaacaattaatcatactcgctccgaactagagctccaaaaagcgaaaggaggaaatgttttagagcgtgagcggtttctttctcgtgctcgtgagtatgcattggataatatccgtagtggatatgataataataactcacatagctaccatactttatgtaaggttcacttggaaaaaattacaacaattctcaacgctcaggttattgatgaaaaaacattaaaagagttaatcaaagagtttgtaacaacattgcattcaggactgcaaaagtacccaagctcagagtttcttttggaggcggaatccaagctgagttctttgttaaatgataataaaggagcaatagcttcgttagagaaagcatttagtatgaataacgctagtacctttatatcaattgcgttatccaaagcttatataaagaatgaaaatgtaccgaaagctagagagataatggaaactgtgctggagcattatcctgcagataagacatgcaatggtcgactcgcaaaaataataactgatcactatcctcaagagaatgaacttgccgaatactattggcgacggtcttttaccgaaggtgatgcaaatatagaaaatcaattttggtatgctcgtcagctatatatcaataaaaaatatgaagattcaaagcactactttgcaataacaaaaagtaaaaatgttgcaccagaagttaaaagtaaaattcgtggtcctgtttttgataaagatgcttgtttattacaaataggtggatcgattgtcaggaaggatgatagttactgcttcgtgcgtgatttcgcatctggtgaggtcgcgtatctttctaaaagaaacattaaagacccgcttttatgggaacaaataagaatagatacccaaattttatataatcttgggtttaattattacggtgcatcagcctttaacgctaaagagttcgatttgtag

SEQ ID NO: 97295 - DNA, 1272 bp, Enterobacter aerogenes
atgaagctcaacgccagacaggtcgagaccgcaaagccaaaagacaaaacctacaaaatggccgatggcggtggattgtatctcgaggtttcggccaagggttctaaatactggcgcatgaaataccgacgcccttctgacaaaaaagaggatcgcctcgcttttggtgtttggcctacggtgacgcttgctcaggcaagagcaaagcgtgacgaagctaaaaagctgttagtgcagggcattgacccaaaagccgaacagaaagaagctcaggccgagaattcgggggcatatactttcgaaaccattgcccgtgaatggcatgtaagtaacaagcgctggagtgaagaccatcgatcacgagtccttcgctatcttgagctttatattttcccttatatcggttcgtccgacattcgccagctcaaaaccagccacctgttagccccgatcaaaaaagttgatgccagtggtaagcatgacgttgctcagcgtcttcagcagcgtgtcacagctattatgcgttatgcagtgcagaacgattacatcgactcaaacccagccagtgatatggccggtgcgctatcgacaaccaaagcgcgacattaccccgctttaccctccagccggttccctgagtttcttactcgtcttgctgcatatcgtggtcgggtaatgacacggatcgcagttgagctttccttactgacttttgtgcgttccagtgagttacgtttcgcgcgttgggatgaattcgatttcgataaatctctttggcgtatacctgcaaaacgagaagaaattaaaggtgtgcgttactcgtatcgtggcatgaaaatgaaagaggaacatattgttcctctcagtcggcaggcgatggctttgttagagcagctcaagcaaattagtggcgataaagagctgctgttccctggggatcacgacgcagccaaagttatgagtgaaaacacggtcaatagcgcattgcgtgctatgggctatgacacgaaaaccgaggtttgcgggcacgggtttagaacgatggcgcgtggtgctatgggcgaatcagggttatggagtgatgatgcgatagagcgtcagttaagccattcggaacgtaacaatgtgcgtgcagcgtatattcatacttctgaacatttggatgagcgacgcttgatggtgcaatggtgggctgattttttggatgttaaccgtcaaagcagcgtatcgccctatgattttgctcgagatggaatgtttagagaaaaataa

SEQ ID NO: 97296 - DNA, 651 bp, Enterobacter aerogenes; identical to SEQ ID NO: 91353

SEQ ID NO: 97297 - DNA, 162 bp, Enterobacter aerogenes
atgcggcgactggtaattatcggcaacggtatggcggcaacccggctggcagagaagctggcggcgcgcgcgcaggggcgtttcatcatcacgcttatcggcgatgaaccgcagccggcctacaaccgcattcagctctcgccggtactcggcgggtattga

SEQ ID NO: 97298 - DNA, 858 bp, Enterobacter aerogenes; identical to SEQ ID NO: 74968

SEQ ID NO: 97299 - DNA, 327 bp, Enterobacter aerogenes
atgggatttccctctccggctaacgattacgcacaacgagcccttacagttgacatgatatgcggtaccggcccaaacaccagaaccatagaaactgctaccggctatgctgtgattgatgtatcgctcaagccaaagcagaacagcacggtaatgatcgcttattccggaataactgattttgcgaaggtgatgggaaggacactaattaccagggatggggaggcgatcgaaggggaagcgcttaacgatgtcgaggttaagggggttgtgacgttcatcatcaacaaggcaacccaagacgatgatgattgcccggtaatttga

SEQ ID NO: 97300 - DNA, 729 bp, Enterobacter aerogenes
atggctggcgttcgtattctttgcaatcaagtcattcctgtcaccgactggaaccacgactatgtgaccatcaaatcaaaactggaaagcaaatcaccgctcccgaccattgccagtttcgacctgctgaacccactggacaacagcgggcacggctataccgtcaaaccaaatggcggtcaaattcgcgactggggcctccattaccctaacggtgcaaaaccgtcagtgactgacctggtgaaggccggacagggcgccgtatcgttcatcgtcgcgtttaagctggaggcagctgaccgctatatcaatatcctcagcaaccgcgtgaacagtgccgggtttaacttctattacagcggcggcttctacatgtcctatatctacccgagtggcacgccgggaaccattgctgccgccggtgttatcaacgcggaaatcggcaaatggtatgtggctgtaggcgtatttgacccggtcactaaagcggccagcgtgcggatcagtgatgccggattgcagtatggtcctatcggtaccggcttcccggaaaacacgtcgcttgatacggctgtctgcatcggtggcgatcccaacggcctcaccacctcgtcgatgtacggtgacattgcatgtgttgcgtactatgacggcgcattcactgcagatcagcgtgatgcgatggtgagcgtggggatggacattctgaatgagagggggcttatctga

SEQ ID NO: 97301 - DNA, 2229 bp, Enterobacter aerogenes
gtgcgtgatgttgtgggcgagcgcatcaatggccggttcattgtcgatgcctccgatacgacttcgccagatgatggcggtggagtgctggtcggtacggatgggcgccgctggatccgccagtgtgactttgtctcttatgacatgttcggtgcgccccggatccctgagtcggtctatcagaattatgccacgctttccgcgcagggtaatgaatctgcggcgcaggcgttgctggctgatatcgagccggcggatcaggccattgcccgttgccatgcctttgcggcaaagcatgctatcccggttgttcagaatgtcgggcggttcctgtgggtgagcggagaaattgtggtgaggacgtctgcttatctgagcggctctacaatcgtcacctgcaatcgcagcggaacggatgaaacccgctgggggaaagtggatggtgtggatgatggcgcccccgacccgatgtatatgtttcgcatccggggcaaggatcgtgtcaacttcaccgcggctgaacttaacgaactcaatacctcttattcgtcctatctgaagcgcgggagcatggatatcccgatgccgaagttaagccagtaccggggagggctgtttggttttatttcttcatccgtcgagctgtaccgcagcgggaataaaacgaatgcccgtaaccaggtccatttccgggacttcacccgcataggtcgtaatggcgcggtttctgatgtactggtgaaaaatatcccggcgggcaccatcacggaagcctggatccagccgaaagaaaatgcctggcttaactttgagcccccggcgttctttgaagcaggcaacggtcgcaaattcgtgaacattcaggttgagcgctcgcaggtcaacattgaaaatctggtgatggataactgggcgacgggcgatatcgagtcccgcgtggcgatcggctcgtatggcgtgaccgatattcactgccgtaacggagcagctgaatgtatcccgaacacttccggtggcgcgtatgtggtttgcttccgtaacagcatcgatattcacatcagcggatattacggcctctacggctggggattccaggggcatcatggtctgaagcgggtatttatcaccgaatcagttatgaaccgctttgattttcactcattcggctatgacgtctacatcagcaggacgaaattcaaggggcgccagattttcctgcagggcggtggccagttcgcacttcgggactgcgactttaacattacgcagtacagcctggggcagaccgggcatatcgaagaccggctgaatttctttatcaatatgcgggaggactacgccggggactgtgagtgcaatctgactatcgacgggctggtggtgcgttttgatcgcaacatcacgaatgcctgggcgtctgacgtgctgtcgtttgatattgttcgcatgaacagcggagaatcggttgattatggtgtgtctaccaaaaccccgcatgttatttccgggaaagatatcgtctttgatttggatggtgtgccggcttccctgcctgataattttgcgttcaccttctgccgcccgttccgtagcctctacaactccgcgcagaaaacctatctgccggatatggtgaaagtgcagggcatgaccgcaattaacgtacctgacggtaaaaatgcggtgatggcggtgtttcgctgcggagccgacatggcgcagaacccgttcgccagccggactaaactccgcccgaacgggacgaacgctgagatcatcgcagaggacgtcatcagcatcatcaataacccgatcatcgcgcagaacgcctgcccgacggtgtacatgccgggcgcggcctcttcctgggataccgttgtcggcggcacgacgtaccgcaccagcgaatactcataccgcccgaaagtgacgctgcgtaactgctatccgtcgattatcaatgccgccggggtaaaagccgaattcgatatttccggcggcttactggcgcgctacagcgtcggcgataccgggaaccgctgccgggtaaccggcgcggatattcagcttatccctgactcagcaggggctctttatttcgatacaaccaatgtccgggcgacgggctgtgactggttcgacccgatgaacggagcaacctataccggcaccctgaacggtaccggcaacgaaaaccgcggcaccccggaacactcacccaatatttaa

SEQ ID NO: 97302 - DNA, 195 bp, Enterobacter aerogenes
atgcagtatttgggtaaagtgattggtgtagcggttgcattattgatgggtggcggcttctggggcgtggtgcttggctttttagtcggccatatgtttgaccgggcccgtagccgtcgcctgaatttatttgccaaccagcaggagcggcagtcgctgttcttttccaccacttttgaagtgatgggcatctga

SEQ ID NO: 97303 - DNA, 1134 bp, Enterobacter aerogenes
atggcaaacatcagcgacgaactagcggcaagcattcaaaaatgcttcgaccgcacttatgtggatcttgctaatcagcaacagtttttgttcggtgctggcaacgtgacgatcacgaagccagacggaacgacggccaccgtcaagtcgtgggcgcagttcctgagcgaatacgccacgcgacagcagaacatcgacacggcgctgaaggacgtaacgaagacgacggcggccaacacgtggacgcaggcgcagacgtggaatgtaagcagcacctttaaaaacaacctgacggtcgacaagaacctaacggttaacggaaatttaaacggcgtacagattgccgggtctcatatcgagctaaccgcgccaacgccttacattgattttcatcatggcaacagcacgacggattacactcacaggatcatcactgaggacggagcgctggccgtctatcctgggctacgcgttagggggaataccggatgttatggtgctgtgactctatacggcgatctgtggtggggttacacagcaacaagagaaacagacccggtaaatccagcgatcggaaccctgattaactccccgaacctgacattaaggttcaagcaacgaggtgctgacaacaaaggggcaaccgctggaatgtcggcgctgtactttgaggaacaggtagggtctaaccaccgtctggcgatcaccgttcaggggttcaacgctaaccagcagtggtggcagttcctgagcgatggcaggatctacggaagccagaatgggaacgtccagttccagggaacgtctgacgcgcgcatgaagcatgacattaaaccgacggacggacagctatctgtcgaccgcatccgggcgcttgagctggtgacgttcgtctataacaacgacgagcagggaaggacacgcaggggaattatcgcgcagcaggcgcgggacgttgatccgcagtatgtgaagcagactaacacgtcatatatgcgtaacggcgaacgggtggacgacgaccgccttcagttagataacaacgtgattatgatggacacattggctgcggtaaaagtattgattaagcgagtagacgaactggaggatagattgaataaaatttcagattaa

SEQ ID NO: 97304 - DNA, 264 bp, Enterobacter aerogenes; identical to SEQ ID NO: 88828

SEQ ID NO: 97305 - DNA, 3060 bp, Enterobacter aerogenes
atgcgtcaggcggtagacagcctgaatgcgctgagcgatgttcctgatgatgaggtcacccgtaaaaccctgagcacgttatcgttgcgacagcttgaatccagggtgtctcaggcgctcgacgatctgcaaagcgcgcagaacgatctggcgacctacaacagccaattggtctcgctgcagacgcagccggagcgcgtgcagaacgcgatgtactccgcctcccagcagctacagcaaattcgtaaccgtctcaacggcaccgcgccgggcgaagagacgctgcgcccgactcagcaggggttgctgctggcgcagcaggccttgctgaatgcggagatcgaacagcagcgtaagagcctggaaggcaatactgtgctgcaggatacgctgcagaaacagcgcgattacgtgaccgcccacagcaaccggctggaacatcagctgcaactgttacaggaagcggtgaacagcaagcggctgaccctcaccgagaaaaccgctcaggaagcggtctcgccggaggagacctcgcggatccaaaataacccgttggtcaagcaggagcttgaagttaaccatcagcttagcgaaaagctgattcaggcgacggaaaacggcaaccagctggtgcagcgcaatatcagagtgaaaaactggctcgaccgcgcgctgcaatccgaacgcgatatcaaagagcagatttcggtattgaaaggcagcctgctgctgtcgcgtatcctctatcagcagcagcaaacattgccatcagcggatgagctgcaggatatgactaaccgcattgccgatctgcgcctggagcagtttgaagttaaccagcagcgcgatgcgttattccagagcgatgcctttgtggcaaagctggaagagggccatagcagcgaagtcacgccggaagttcacgacgccctgttggaagtcgtggacatgcgccgagaattgctcgaccagtttaacaaacagctggggaaccagctgatgatggccatcaacctgcagattaaccagcagcagttgatgagcgtctccagcaatctgaaatcgatcctgacccagcagattttctgggtgaacagcaataagccgatggattgggagtggatcaaatccttcccggaagcgctgaaagcccagttcaaatcgatgaaaatcaccgtcaactgggagaaagcctggccggcggtatttatcgcgttcctcgccgggctgccgctgctgttgattgccgggctgatccgctggcgcttgcagtggctgcgtgattaccaggctaagctggcctcccaggtaggccagttacgcaatgatactcagctaaacacgccaaaagcgatcctgatagatttaatcagagcgctgccggtggtgctgctcatcctcgccgccgggcttatcctgctgacgatgcagctgaatgtcagcaacctgctatgggcctacagtaaaaaactagcgatgttctggctggtgttcggcctgtgctggaaggtgctggaaaaagacggcgtggcggtgaagcatttcaatatgcccgcacagctcaccagccactggcggcggcagatcgtccgcgtcagcctggcgctgctgccgctgaatttctggtcggttgtttctgagctctctccgcttaatttgatggacgacgtgctggggcagtttgttatcttcgtcaacctgctgctcattgcggtgctggtgtggccgatgtgccgcgaaagctggcgtgacaaagagtcgcacagcctgcgcctgctgacggtgaccgtgctgtcgattgtgcccgtcgcgctgatggtcctcacggcgaccggttacttctataccacgctgcgtctggctggccgctggattgagaccgtctatctggtgatgatgtggaatctgctataccagaccgttctccgcggcctgagtgtggcggcgcgacgtattgcctggcgccgggcgctggcgcgtcgccagcatctggtgaaagaaggggcggaaggcgccgaaccgcaggaagagccgacgatcgcgcttgaacaggttaaccaacaaacgctgcgcatcaccatgctggtgatggtggcgttgttcgcggtgctgttctgggcgatttggtccgatctgataaccgtgttcgcctatctcgacagcattacgctctggcactacaacggcaccgaagccggcgccagcgtggtgaaaagcgtgacgatgggcagcctgctgtttgcgattgtcgcctcgatggtcgcctgggcgctgatccgcaacttgccgggcctgctggaagtgctggtgttgtcgcgtcttaatatgcgtcagggcgcttcctatgccatcacgacgatcctcaactacgcgattatcgccatcggcgcgatgacggtcttcggctccttaggcgtgtcgtgggataaactgcagtggctggccgcggcgctgtcggttggtttaggtttcggcttacaggagattttcggtaacttcgtctccggcctgatcattctcttcgaacgcccggtgcggatcggcgatacggtcactatcggtaccttctcaggcaccgtcagtaagatccgtatccgcgcgacgaccattaccgatttcgatcgcaaggaggtgattattccaaacaaggccttcgtgactgaacggctgatcaactggtcgctctccgataccatcacccgcgtggtgatccgcctgggcgtagcctacggatccgatctcgataaagtgaaagaggtgctgctgcaggcggcgcatgaacatccgaaagtgatgcaggaaccagcgccgtcggtcttctttaccaccttcggcgccagcacgctggatcatgaactgcgcctctatgtgcgtgaactgcgcgatcgcagctacgcggtggacgaacttaaccgctcgatcgatcgcctgtgccgcgaaaacaatatcgatattgccttcaaccagctggaagttcatctgcgtaacgagaagggagatgaagtgacggaagtgaagcgcgataataaaggggatgatacggcgccaggcgtcgcataa

SEQ ID NO: 97306 - DNA, 1512 bp, Enterobacter aerogenes; identical to SEQ ID NO: 89779

SEQ ID NO: 97307 - DNA, 483 bp, Enterobacter aerogenes
atgatccgggcattcgtcaaagcgtattggaaacagttgcttatcgtggtgatgcttgctgctctggtggtcggcggcattgtagcctggaatgttcacggtgacaggcagtacgacgccgggtacgcacaggcgaaggcagaccgcaaagcagaagatgataaagcccgtcaacatgacgaacaggagaaagcaaccaatgaacgtgaagcgcagcagaggatcgaccaggcgcgcaatgatgctcttgatgctgccgctcgcgctggcaggttgcagcagcagctcgttgccatccgtgagcagctcaggcagtataacgccactgtcggcgctgggtcgtcagccgcagacaccggaattttgcttaccgacgtgttcgaaaaatctctcgaacgaaaccgacaactggcagaatacgctgaccgggcatcagaagccggaagggtctgcgaaaggcagtacgatcaactgaccaggtag

SEQ ID NO: 97308 - DNA, 183 bp, Enterobacter aerogenes
atgacaaccatattttctaacttcctttgcggagttgcgctgccatggttgggatacctgatcagtatgttcctcatttgggaactgccttcacgtgctcacacggtcttttttgtccggttgtcgatacttttcggcgttttgtgcgcgctggccatggcgctcaaggacggtgctgcatga

SEQ ID NO: 97309 - DNA, 591 bp, Enterobacter aerogenes
atgactaagtacactctaatttatgcggatccgccttgggtataccgcgataaagccgcagacggtaaccgcggcgccgggttcaaatacccggtgatgaatgtactggatatctgcaggttgccggtatgggagctcgccgccgacgattgtctgctggcgatgtggtgggtgcccactcagccggttgaggcgctgatagttgttgaagcgtggggattcaagctgatgaccatgaagggattcacctggcacaagacgaacaagcacaaaggtaacagtgcgatcggcatgggccatatgacccgggcgaatagtgaagattgcctgtttgcggtacgtgggaaactgccggcgcgcatggatgcctctatctgtcagcacgtcacagcgccgcgcctggagaactcgcgcaaaccagacgttatccgcgagaaactggtgcaactgcttggcgatgtatcgcgaattgagctatttgcccgccagtcatcgcacggtttcgatgtgtgggggaatcagtgcgcggcgccggcgatagaactgctgccaggctgcgccgtgccgatagtgaaaacggaggcggcatga

SEQ ID NO: 97310 - DNA, 498 bp, Enterobacter aerogenes
gtgggcgaagcgctgccgggacgggaggtaaaaattgtcgccggcgagatctggctgcgggcggcgagcatggccgcaggctactggcgcgatggtcaactgctgccattaaccaacgatgaaggctggtttgcgacgcgcgatcgcggagcgttacgtgccggtcggctgtcggttattgggcggctggataatctcttttttagcggcggcgaaggcattcagccggaggaggttgagcgtgtgatactcgcccatccgcaggttcagcaggtgtttattgtgccgcaggatgatatcgaatacggccaacgcccggtggcggtggttgaatgcgaggatggctgcgaaatggccacgctggcggcatggagcgctgaacggttagcgcgtttccagcagccggtacagtggctacggctgccggaaacgttaaagaacggcgggattaagatttcgcgccgggcgctgcgcgaatgggtcaattcgccggtttag

SEQ ID NO: 97311 - DNA, 123 bp, Enterobacter aerogenes
atgagagttaaaggacttaccaaaggattttttatccttattttactgatcgttaccctggcttttttgacgtactctccccttactattccgctatcctgtgggcagctatcctggcggtga

SEQ ID NO: 97312 - DNA, 546 bp, Enterobacter aerogenes
atgcatatgcataggttgataacaccaggtttagccgacttaggcgacaatatgtcctacttggatgttgagtttacgttttctggtgacgaatcgagaaaagctacctatcggctgacattttgtcctccttcattggatcctgtttctgcagaaacaatgcaccagatgttaggcgaagaggtttatgcattatgtgtgtcggttgttacttacgccgatactgtacagcttgacagattctttcaacagatggagaatcctgtcccaggtgaggttccgctgaacatgttcggtaaaccagatgatggtttcgaccttactattgcggaactccagtatctttacggtactttagttgacttcatgttgaaagttgccgacaatgaaggcatacaagttttgttctttgctgctgaacgtgaagaactacatcccatatacgataggtatgtgaagaggttagcttcatcacgaggcgtaacctacatcaatgacggagctgcttatgcgatacggaccaaacactaccccgacaaagggtaa

SEQ ID NO: 97313 - DNA, 147 bp, Enterobacter aerogenes
atgcgatacggaccaaacactaccccgacaaagggtaagattgattttaaagctatccatgaaggcaaagttgagatgatgaagcgtttcatgaccgctaaagctgaagctgagcgcaaaggcgaagtggtctttaagccactctaa

SEQ ID NO: 97314 - DNA, 216 bp, Enterobacter aerogenes
atggctaaatcagcaatgaaatatatggtccgcgcctggaataaagagctgaagaatcctgcgtggtgcatgggtagccgcaagcatcgaaaatcatgcgctagagattggggtgctatcaccgccgcctccgctgagtcatggcatgagcctattgatagccaggacgcggctgacgaagccgtagctgaagatgtgagtaactggaacgcttga

SEQ ID NO: 97315 - DNA, 339 bp, Enterobacter aerogenes
atgactgatatcacccgactgttaaccagcctcaagcgccgctcagcccacgtaaaagaattcggcgacgatattacgtttgtaaaacttgaagaccttgatgtgctggtagaggcgctggagaaggcgcagcagcaaaatataagcgactttgaaatcaaagcccgtctctgcaaagagagtaatagcctccacgacaggttgagagaagcagagaagcgcatcgccgagctggagtcccgcaccgttgcagccgagttgttcacctgcccgcgatgcggaaggacaacaacccatccggaaggttggcactattgccataagcgggaggctgactaa

SEQ ID NO: 97316 - DNA, 675 bp, Enterobacter aerogenes
atgaaaacgatccaggaaatcaggcgtttaaacgccagaaagttgagagatggtgttggcggaaatacatttttcgccaatatgattgatcgcgagcctactcaaacaagccggttcatgggggacggcgcgacaaaaaacatcggcgatactatggcaagacacattgaaaaatgtttcgatttgcctactgggtggttagatcaagaacaccaaaccacgaatgtggcaaaagctcctgatgtctccgatacaaatagaaatataacgatggttccggttatatcctgggtgcaggcaggagcatggaccgaagttggttatgctgaggtagatttgaatagtacggaaaactatccttgtcctgtcccttgtggccctatgacatatattcttcgagtaatcggcgactccatggttgacgagtaccggcctggcgatatgatttttgttgacccagagatcccagcagttcatggcgatgacgttatcgccttgatgcacgactctggagaaacaacatttaagcgcctgatcgaagatgccgggaaccgctatttaaaagctcttaattccaactggcctgagccctatatcaaaattaacggaaactgttcaatcattggtaccgtgattttttcaggaaaaccaagaaggtacagtattaaaaaataa

SEQ ID NO: 97317 - DNA, 201 bp, Enterobacter aerogenes
atgaaagagttctgggattcgttaaccaaagagcaacagagcaaattagcaacaaacgttggctccacaactggttacctacgtttggttttcaatggctacaagaaagctggttttgacttagctaaaaagttggagaaaagcaccgctggtgcaatcaccagatcgcagcttaggccagatatttattccaaaacataa

SEQ ID NO: 97318 - DNA, 1050 bp, Enterobacter aerogenes
gtgagcgttaaattatccgcatatgtctgggatggttgcgctgcggcaggcatcaaaggcaataaattactgatcatgcttcgcctggctgattatgccagcgacgaggggatcgcatacccaagcgttgcgactattgcccgccagctcggcgccgggcgcagtaccgtgattactttgatcggcgagctggttaaagatggttggctgaccaaaaaagaacgtcgcctgggccagcgcagcaccagcaacctttacaccctgaacgttaccaagcttcgtcaggctgcaaatgaacattatgagggtccgaaatctggacgttcagaatctgaaccttcggaatctggacgtccagaatctgaacgtccgaaagagccaaaaaagcagggttctcagggtccagaaactggacacgatccgtcagtaaattcaaatacagatccatcagtaggatctaaaccttcttgtccggttcctgcggaaccagacccgcaagtggttctcactgatttagcgaaacaggttctgtcccatttgaaccaaacgacaggatcccgctttcaggtttgtgctacgtcgctagagcacatcagggctcgcctccgcgaaggctttaccgttgcggaaatggagctggtggtggattacaaaaacgaggactggaaagactcagagcaggaggaatatctccgcccaaccaccctgttcattccgaagaatttccctggatatctcaagcgcgctggaaattgggacaaggcagggcgcccggcgaagaaaaacggtaagtgggagaagggcaccaattcatccaccagcgccagcttcagccaggatgcaggcgtcgatattgccgaacgtgatcttgcctggcgtcggtaccacgaccttgaaactgataacgagccgaagagcgaaatcgaggtaagggttcgcgagagggccgatcgcgatgggctgaaagcaaaggggcatgaccacggtttagctcagtttggatggaacaatatctggtctgtagtggccaagaacggaggagcggcatga

SEQ ID NO: 97319 - DNA, 1848 bp, Enterobacter aerogenes
atgcgtgagctcatcgttgataattttgctggtggtggcggagcttcaacagggattgaaatggctactggtcgtagcgttgatattgctatcaaccatgacgaaaacgctgtagccatgcatcggactaaccacccggacacgcttcattattgtgaaaacgtttttgatgtcgacccagttgctgcgactggtggaaaagctgtcggttttgcatggtttagccctgactgcacccactattcaaaagcgcgcggtagtaagcccgttaagcgtgaaattcgtggtttggcctgggtatctgtccgttggggattggatgtgcgcccccgggttatggctctcgaaaatgtggaagaatttaaaacgtggggaccattactttcctgtgaaatgcgtcccgaccctgagcgttcgggtgaaaccttccgggcatttgttggaatgctttccactggaataccagcggatcacccagcgctttacgaatgctgcgattttctcggtatatcgccggatagcaaagatgccaaacgcctgatcgccgggttgggttataaggtcgaatatcgtgaattgcgtgcaagtgattacggtgcgccgacgatacgtaaacgattcttcatgttgatgcgttgtgatgatcagcccattgtctggcctgaagcgacgcatggagatccaaaatcagcagcggtaaaagctggaaaactggctccatggcgaacagctgcagaatgcattgactggtctattcctgcgccatctatattcgatcgtaaaaagccgctggctgaaaacacgttgaagcgtatagcgcgggggatccaacgatttgtagtcgatagcgctgagccatttatcgtgaaatgtaaccacacttcgacgaacgggaaatatgattgtttccgcggtcaggagttaggcgcgccgattcagactataaccaaaaaactcggctatgcgatcgccgttccgagattggtaccgtttatggctggaaatggggggagccagtaccaggcgaaaccgcgctctatcgacaaaccgcttcacaccatcctcaaacaatcaagagcctgtgtggttgcgccggtagttgctcgtcagtttggtgccagcatcggccaccgggcggatgagccaagcgcgacgattaccgcaggcggcgggggaaagtcacagttagtatcggccacacttattcagatgggctatggcgagcgcatagggcagtcgccgcgtgtgctaaatctgggtaagccattgggaaccgttgtcgctggtggcaataaatttgccgtaacaacggcgtttttggcgaaacactacggcgggaactataacgggccgggtgttggtcttgatgagcctgctcattctgttaccacagtcgatcatcatgcattaatcacctctcatctggtgaaacttcgcggtacctgccgtgatggccaacgcagcgatgaacccatgccaacaattactgccggcgggcaacatgtcggtgaagttcgcgcgctgttggcggcaaatgactatgatgagcgccgggcggatcaggttaaagaattcctgaattcgtttggaatcagtgaactggttactattaaaggcgttgtttaccgtattgttgatattggaatgcgcatgctgcagccgcatgaactctatcgcgcccagggattccctgaagggtatgttattgatcgcgactaccgcggcaataagtattcaaaggaaaagcaggttgctcgatgcggtaatgcagttcctcctcctttcgccgaggcactagtgagagcgaatctccccgaaatgtgtaacgtccaaagggaggtggcatga

SEQ ID NO: 97320 - DNA, 513 bp, Enterobacter aerogenes
gtgaatgcaacctacttaaagccagccatcgccattgtgattgttgccggtgcctttgttgctggttcagtctggagcgatcggacatgggaaaagcagtgggcggaacgtgatagcgccgaatcggctcaggaagtgaacgcgcaaaccgccgcccggatgattgaacaggggcgtctgatcgcccgtgatgaggccgtacaagatgctcaagcccaaaccgctgcagcgcgcgctgctgccgctaatctctctggcactgttgaccagctgcgccagcaggcaaaaacccttgccacccgcctggacgccacaaagcacaccgcaagtcttgccgctaccgtcagaagcaaaacaaccggcgccaccgccggaatgctcgccgacatgcttggagaccttgcagaagaggctcgacgatatgctgcaatcgctgacgaacgctacacagcaggaatgacctgcgagcggatttacgaatcggtgagaacgtctatcccggctaagggataa

SEQ ID NO: 97321 - DNA, 246 bp, Enterobacter aerogenes
atgaagattaaggcagagttctctcgtataagttggggatatgtaattcgggagggaggactgcatcgacatggaataatgattgtcaatatagaagttgataatcttgtcggcactgaaccagatttcgtattgaacttagagtatcagcgtcaatatgatgaaaagataaccatgaaagtgctagtggatgaagcagaacaatgggctcggtcacaattgacgcgatttagagaatttaaataa

SEQ ID NO: 97322 - DNA, 540 bp, Enterobacter aerogenes
atggctacaaagtgtaaggttccctttcagcccgccgttggtgggacatcggtgatcgctattttgtcgggggaatggctgaataactccgttcaaggaatgcaaatgtttggacttcaccaaattaaatttatggactttgaagggaatataaacaatacccctttatcccctataatccccgtagtaaaaataagcatatcgaaaccggccaacacgccagttgagctgtatgcacttattgatacgggggcgacccattcagttattgattcaacattagctgacgcattaaatctgagagttattgaaaatacgagtatccgtagcgttacagatacaatctcaacaactattcgagaggcagcaatacatatcgggagttcaggaaccatatttgcgccatttatagcgtcaccattgattcaaagcaacgagcataaaacttatactgtcattctcgggatggatattcttagccaaggtctggtgatccttaattttaaagaaaattcattctctcttgatttaagcagataa

SEQ ID NO: 97323 - DNA, 348 bp, Enterobacter aerogenes
atggcaattgaaacattctcatggcgcattcaggctgccagccaaccgacgctaaaaagcaaagataatattcgtaaggttcagtttggtgacggttatgcccaggtatccgggaatggcataaatgatgaagcattaagttatgaattttcattttccggcgaccctgatactgcgctggatatttataaatttttgcgtcgccataaaactaaatcgttttcctttaaaccaccatcaggtgaattagcactttggcgggttgaagcggacagtctgcaaaaagttattcagggaaagaaaatcatcaccatcaccgcaacatttgaacaggcatttgcaccatga

SEQ ID NO: 97324 - DNA, 753 bp, Enterobacter aerogenes
atgattaattctgattatcaaaagctggagcctggtaatgaaatcaggctatttgaaattgatggcagtagttttggactagataatgttctgtatttccactcgcataatattgcccatacagaagatgaaataattgctgcaggaggggatgaggataagttacctgcaaaaagtatctggtggcagggtactgaatataaagcctggccgtgtgagatagaggggattgaggcttccactagtgggacggatgcccagcctacgttacgggttgctaaccttgatgcgtctgtaactgcgctgtgcctgcattatgatgatctgatgcaggcaacagtcactatccacgatacgctggcaaagtacctcgatccccgtaattttccctccggcaatgctaccgccgatcccacccaggaaaaattgcaaacctggtatatcgatgcgaaaaccgatgaaacggatgaggtggtggagttcacccttgccagcccgatggacctacagggaatgatgatccccacccgccagttgcattcgttgtgtacctggtgcatacggaataagtatcgttctggtgatggctgtgattacgcaggctcgcggtattttgaccaaaacaataagccggtcgatgacccctcgaaggacgtctgcaacggtaccctcacagcatgtaagttgaggcacggtgacaccagtgaattgccgttcggtgggtttccggggacttccttaatcaggagctga

SEQ ID NO: 97325 - DNA, 711 bp, Enterobacter aerogenes
atgcgtcaaaaagtcattcaggcgatacaggaacatgcggcggcggaatacccgagagaggcctgtgggctagttgcccagaaaggccgggtcgtgcgctatttcccgtgccgtaatattgccggtgaaccaactgagcattttattctggcgcctgaggattatgctaccgctgaggagtggggggtagtgactgggatcgtacacagtcacccggatgccacgacccaaccgagcgaactggacaaggcacaatgtgatgcgaccttgatgccctggcatatcatcagttggccggaaggggatttccgtactatccatcctcgaggggaactaccgttactcgagcgaccgtttgtgcttggccattatgattgctgggggttggtaatgagctacttccggcagattcatggtatagaactgcatgactaccgcgtcgattatccctggtgggaaaaacagtatcccgataatttttaccacgattgttggtatgaatgtgggttccgtgaatttgatgggcccccacagccgggggatatggtcatcatgcaggttcagtcggataagtggaatcatgccgggatcctgctggagggaaatatgctgctgcaccatctttatggtcacctcagcaaacgggtgccgtatggcggttactggttagagaggactatgaaggttctgcgatatcattcattgtgctaa

SEQ ID NO: 97326 - DNA, 792 bp, Enterobacter aerogenes
atgacaaccattattcgcaataaagacgtaatcattgctaaccctcagcttaaaccgatttataccccgttcgtggctgagccaggcttgttggctgcatggcggttcggtgatggtatggatgacctgagcggcaatgccaataccctgacggcgattggctccccgacaaagggggagtattttatcagcggtgacaaagataacggctttattacctccgtacctgacggactgcagcgtacgttaatcgccgtatggcgaaatcattcaactaccgacgcatacgcctacccggtaggaaatctgtcgcagcagtcggctgcatcaggtgtcggcattggtctgaaaagtaacagtagttcttcggctaacctggctcgctacagcggcaatgctggtgggttaacctactcaggaaatctgtacgccgttgcggatggaccggctgatagctacgcgaacagaatgaatttccgctgggctgcgttttcggttgatggagctggcaacgttgcaaacttatatctgccaaagcaaaacgctgcgttaattccggcaacaatcgcttcaggggcaaatctggcaactcgcgatattacagaagggggtgttagtagcctttaccgcttgattgcgttccgctcgccaaccatcccgccaaatctatcagggactgatatcgacgttgctgaggtgcttgtttttgacaatgctctgaactttgcggccttgcaaaggacttatgcacgttcacaggcatacctggcttcgttcgggcaggttatttaa

SEQ ID NO: 97327 - DNA, 1668 bp, Enterobacter aerogenes
atgccgtcacaaatggctgttgataaagcagccaactcagcacaacttgcaggtgtaacagttgaagagccgatttacgatgaagagggagtagagatcgttcacgcgcttgctgatgctgacggaaaagcaccgctgaccaccaaccggctgggggctgtaggtttagcaagggcagaggttgcagctcttggcgggaatgcggtgccgtgggcgattacagattctcgccgtattccttatatctctggtacgccaatgggcggcgtacaaattggtaatgttgagatcgtagaaattccggggccaccgggtattgtcttttgcgatgctaattacatcccgatggcctgtacgcccggattcgacagtgatcaggatattcctgtcattggcggttctggcaacatcccggagacgccagtaattccgatttatcttcgtgactggaacggcgtgaggtcgcagggccagtctctgtctattggtgaaatgcctccggcatcagcggcggctaacccaccactttcaaccactcagccatacgggaatctggggttcagttcaaataacaacagctattcctcagcaacggatacagccgttcccctggttgaatcggcttatatgccgtcagagggaacgtatccggctggtgaatcgccttgctccggcgctgcgaataaactggttgatcgcattcaggctgaaactggttttgactggcagcaacaaggcgctgtgtttttctcgtcctgccccggtcgtggaggtacccagatagcgaacctgtcaaaaggtactgcgtcttaccaacgagcgctggatcacgttaccaacagcgtgcgcctggcgaatgcagccggaagaacttttgccgagttggctattctctggactcagggggaatcggatatcggtggcggtgtcacacgagctgattattactcgatgctcacgcagtacatttctgatatgacaaccgatacggttgctattaccgggcaggactttactccattctttatttcttaccagatggcctcacacagacaatacagggtaacaaacccgttgattgctctggcgttgcgggatgtcgctctgacgggcttatcccgcctaagccacccggcgtatatcggtgactatgttgataacgttcacggtactaaccagacctatctgatgtttgcgaagtattacggtcgcgctgtccacaaactgctgcaggataaccaggcagggaaaaaacctggtatgcactggctggataaaatcggcgaaacgcggcagggaaacattatcaatcttcagttcaatgtccctcatccaccacttgtgattgatacaacctgggttacggaaacggaaaattacggtttctacatccgcgatatgacgactcagaattttgatgttgtggatatcatttctgccgttgaaatcgctggtcctgatcgcgtcaggattatttgtagccgggccccaacagctaatgaacaggttacgtacggatggggtaaggcgggggatccgatgactaccgggaggacaaccggcccacgcggaaacctccgtgatagtgaaggggatttgccaggtgaaagctacaccgatacatccgggacgctgagaaaactccataactggtgcgtaattttttaa

SEQ ID NO: 97328 - DNA, 1290 bp, Enterobacter aerogenes
atggctaaaacagcttacccaacaggcgttgaaaaccatggcggatcacttcgcatatggttcatttataagggatgccgggtcagggaaagtctcggcgttcctgatacaccaaaaaacagaaagttggccggtgagttgaggtcgtcagtatgcttctcgataaaaacgggaagctttaactatgctgaaaagttcccatcttcgccaaatctgaagaaattcggtgctgaaacaaaggaaattactgttttcgagttagccaacaagtggcttgaactgaagaagatggaaattaccaccaatgcattctgcaggtacaagtccattgttcgtaatatgatcccgcgcataggtgaatcgcgactcgcatcatcggttacaaaagaggatttgctgtttatcaggaaggaattgctaaccggatatcaactactcggataccgtaaaaagagtgtcgtcaaaggccgttcagttcctactgtgaacagctacatgactgtatctgcaatgatgttccagttcgcagcggatagcggatacattccagcaaatcctttcgccggaataagtcctctgaagaaatcgaaggccgaaccagatccactagctcgggatgagttcgtaaggttgatagaagccatgaaacatcagcagataaaaaatatgtggtctctggctgtttatactggcgttcgtcatggtgagttagtttcccttgcgtgggaggacatagacctgaaggctggaacaatgatcatcagaaggaacctcacttctcagaaggaatttactcttccgaaaacagaggctggcaccgacagagtgataaacctgatttctccggctgtcgatattctgaaaaatcaggcggagatgaccaggttaggaaagcagtatcagattgaggtgaaattgagggagtatgggagaagcgaaatgcatccatgcactttcgtattcaacccgcagatagtgacgcgcaatggcctggcggggcatcattacgctgtcagttctatcggtcagatgtgggatacagcgataagacgttctggcattcgccaccgcaaagcatatcagtccaggcatacatatgcatgctggtctttagccgcgggggctaacccaaacttcatcgctaaacaaatgggtcatgcagattcacaaatggtttatcgcgtgtacggatcctggatggctgaaaacaaccaggaacaggtaacaatgttgaaccagaaattatctgattttgccccatccatgccccacgcaataggatcaaactga

SEQ ID NO: 97329 - DNA, 246 bp, Enterobacter aerogenes
atgagcgaaataacctttatcgtgcccaacgaatgggtaaccgtagaaaagctcgtcgaaattacagggcttcgcccgggtaccattgaagctgcacggacaaagtcatggatggttggtcgggaatatattcatatttcccctgatggcgtacccaagaaaaacagtgagtgtatgtacaaccgcaaggccattgatcagtgggttgagagcctcaagaaaaaccaaccgggtgcacgccaatga

SEQ ID NO: 97330 - DNA, 189 bp, Enterobacter aerogenes
atgcgtataaccttcaacatccattcgaaggcagatatcgaatcggccatatccgcccttcgccacttcatcagggagaagaagtcaggtgatggcacgagtgatacctgggggattggtatcactggcggaacttactttgccgtgggcgttaaaaccaacggcaactacacagtgaaacagcaatga

SEQ ID NO: 97331 - DNA, 192 bp, Enterobacter aerogenes
atgaagagagcctcacccgttgatttgaggaaatgccttgaggctgcacatgggctcgctcatatcggcatccgttttgtgccgatccctgtagcgacagatgaagagttccatgctctatctgcggagctttcacgaaagcttgagcagatggcggtcgaaactgagaagaatgaaggtggcacagcatga

SEQ ID NO: 97332 - DNA, 2007 bp, Enterobacter aerogenes
atgatttacggatcaatatgcagtggcattgaagccgcgaccgtcgcctgggaaccgctcggatggaaagcagcctggttctcagaaatcgaggcgttcccgtctgctgtacttgcggaacgctggcccgacgtcgtgaaccttggcgacatgacaaaaatagccgcggcggtgcgcgccggtgaagttcaggcacctgacgtaatggtcggcggcacaccttgccaggcattcagcattgcaggtctgcgtaatggcctttccgatgcccgagggcagttaaccctttcatatgtggaattagcgaatgcaatcgacgataagcgcatcgagcgcggagaagaagaagcaatcctcgtctgggaaaacgtccctggcgtcctcacaagccacgataacgcctttggttgttttctggcaggacttgccggagaaagctgtgaacttgagccatcagggggtaaatggtcgcactctggttgtgtgtatggaccccaaaggacaatcgcttggatcgtcaaggacgcccaatatttcggagtggcccaacgacgcaagcgtgtgttcgttgtcgcaagtgctcgaaaaggattcgatcccggccaagtactttttgagtccgaaggcgtgcgccgggatactccgccgagcagagaaccgcaaacggcagttgccgcccttactgcgagaggcgttggaacgtgtggcgcagatgacaatcaggcccaagcaggacacatcatcgccgaatgcgccaacggagatatcagccacaccctgaaagcagaaggttttgatggaagcgaagacggtaccggccggggaattcctgtaatcgctttcggtggtggaaatactggaggaaacatcgatgttgccgcctgcctgactgccaagggacagcgtattgatttcgaagttgagaccttcgctgtacatggcactcaggatcctgacaccaatctggaactggcgcatacgcttggacgtaaccacgggcaagagaatgcctgtattgcgttcagttacaaagaccatggagcagacgcatcggaagacctgtctccgacattgcgcgctggaaattcagataatagcaactctaacagcgggcagcctccagcgattgcttatgcattaaaaccggggcaaggcgcaaaagcaagaaacattggattcgctgaaaagcaatcgccgacacttacgagcgcaagcagcggcacaaatttaacacctgccatcatgcagggagtatccgtaagacgtcttatgccagtcgagtgcgagcgtctgcagggatttcctgacaaccacacgctgatttcatggcgcggtaaaacagtaactgattgccctgatggcccacgctatcgagctatcggcaacagcatggcagtgccggtgatgcgctggatcggcgagcgtattgcggccgcattgccagttaaaaaatctgcgggtgattatggcggcagcaaaacgccagcggatcagcgcgacctttggcgcactccgcccgccctcttcgcatgcctgaatgctgagttctgcttccagcttgatgcagcagcagcagcgcataacgcgctgtgtcgcaagttcataacagccgagcagaacacacttgaaacgccatgggctgattacctgagcattccgggctacatctggctgaacccgccatacagcgacatcacgccattcgtgaagaaagcagccgccgagagcgacaatcagatcggcacggtgatgctggtacctgctgacacttcggttggctggttcaaggaggcaatcgagacggccagcgaagtgcggttcatcactgccgggagattggcgtttatcaaccctgtcaccggtaagccagtcagcggcaataacaaagggtcgatgctgattatctggcatccctaccctcgtactcactgccagttcacgactgttgaacgtgacgctttgatgaatttcggggcccgtttgatagctaagcgggaggccgcatga

SEQ ID NO: 97333 - DNA, 483 bp, Enterobacter aerogenes
atgacagctctttatcagatcgccaacgatttcgccaagctgactgactccggcatggagcctgaaatgatagccgacactctggatgggattgagtgggagctggaagcaaaagtggagcagattcttgctatctgcaaaaacgaatctgcttatgcggaatcgttaaaggaagagagtaagtgccttgccgagcgcgctaaagcagctgaaagcaaagtagcaagcatgaaggaatatgtcgccaaatcccttgaaacggcaggcaaaaaatcacttaaagctggaattcatcaggttacggtcagggcgccatctaaatcagtagagattacggacgccagcatattgcctcctcaattcgtcgaatacgagacgaatatcaagcctgacaagttggccattaagcatcagatcgaggccgggttagatgtgcctggggcgcaaataaagctcggtaagccgtctctgattattaagtag

SEQ ID NO: 97334 - DNA, 903 bp, Enterobacter aerogenes
atgagcttcgatcttattcaattcgttaagcagcaagagtcgctgtttaacggcgctcttactgaccagagcctgacgtgggcaaaagaatgccagtttgcgattcagttattccagcgcaatgacaagctggcgcaaacggcaatcagcaacccagtcagtgctcagaacgcgatcattaacgtagctgcggtcggtatcagcttaaatccagcaagcaaactggcttatctcgtcccgcgtgacggaatggtatgcctcgatatcagctatatgggccttttgcatatagcccaatcagccggggtcattaagtggggtcagtgcaaactggttcatgcatttgacgcttacgaaaccattggccttgataaagctccagcccacaaatacaacccttttgccactcctgaagagcgcggagccgttatcggtggctactgcactgttaaaacatcagacggcgactacctgactgaagagatgagcctcgccgagattgaagaaatcaggaaggtgagcaaagccggcacatcaccaaaaggcccatgggtcaatttctggtctgaaatggccagaaagacaatcgtgaagcgcgcctataaatactggccgcgcgccgaccgtctcgataatgcagtggacatgctcaacgagagcgaaggtatttttaccgagccggttatgcaatacacgcctgaaagtgaagttatccagtcgaaagaaaatgctgagcaagagcttatcaactcagtccgctcgctatgtgaagacatgaagcaggcagcaaacatgcatgctctcaaaacccattttcaggcggcgtacaagatgactgcaggaatgcggctacaacaagaggttcaggctgtttacgccaagtgtaaagccaaatttgagtag

SEQ ID NO: 97335 - DNA, 207 bp, Enterobacter aerogenes
atgattagtcagcactacggtacccagaccgttaaccgcggcgccgttcagccaggcatgctggttaagcatcgcgacggcacatggacggcatcagcccacaagcgcggcaagttgtaccttcaccgcggctgcgaacgtacctacaccaaagccctgcttatcgagatctacctcgatggacgcggaaacggcttaagcaactaa

SEQ ID NO: 97336 - DNA, 138 bp, Enterobacter aerogenes
atgaatcacgatgaatttgatgatggtcgttgcggtatgtcgcgccggtgctggcgatacatggtccgcttctgcattggcttgatagcaatatacctgctgattgccttatttgtgatggaggtcttccatgattag

SEQ ID NO: 97337 - DNA, 867 bp, Enterobacter aerogenes
atggaaagcactagcatacaagatgtaaattttactcttaggtatgatggactggatgctgagaagcatgagattgaactctcttcgttgggtgagtctctgaagggattttcaaagatcttagcgaccgcgggaacattcgctttaactcaaaagtattcacggaacacctccagccaagaggtaaaaatatacgcaactgaagctagagcgaactgtttttcccttgatacggtgatgaattttatcagccagtctcaattgttctcaggatctgccggggctatacttggtgcacttataccttatatcttcgcaaaaaatgcgcagaagaaagaggaaatgaaataccttaaagacgcacttgagaaggctattgaagctctcggaaacaaagacaaagataccatcgaaggtttgatatcagttatcaacaagatggccggagagttgcgcccatctgttaggcaagcagtttcaccgattgggaacacttgcaaaaaaattagcgtctcacaaggaaatggctttaaacctgcagtaattgatgaagatgataaagctataatcgataagcttgatgatgatgaagtccttggactgcgagaatatagaatattctttactgaatttgatgcacataggatgacggccaaagtcatcatcgatggtgatgattctgacaagaggataccagcacaaatcagcgatccatctgcgtcaaagtcagataatccatatctcttatccctaagccgtttcctgtctaatggtattagtcctgaatctgccgtgaaggtcacagcgaaagcttcggtcaggaaaggcgctatttgtaaattgttcattgtcgatatagagatttaa

SEQ ID NO: 97338 - DNA, 378 bp, Enterobacter aerogenes
atgatatccgaattcgtcgaggtccttcacgccattgaatttaccactgaacatgcacgttctctgtttggtaaccgctcacaagcagatgtgaaagtaatgactgttgacggcgatagtatgtgtccaacaattcaatcaggggatcgtctgttctttgacgtttcagtaagaagcttcaaggttgatggtgtttacgctttcgtatttggacagcattttcacgtcaagcggcttcagatgcagggcttgcagttagctgtactatcagataacccggcgtataaggattggtatgtgactgaggagaaccaagaccagctttacatcatggggaaagcactcattcacgaatcaattgcttacaacaagctatag

SEQ ID NO: 97339 - DNA, 228 bp, Enterobacter aerogenes
atgacgaacaaaaccatccagcgtgcgattgatattgctggtagccaaaaaaagttagccgacttgtgcggagtagcgcagccgacggtatggcgctggttgcatggcggcggcatcgacgctcgatacgtaatgaagattgtctctgctaccaacggaaaactaaaaccagcagatatccgtcctgatcttgctcaactgcttggtgctagtaatacagccgcctga

SEQ ID NO: 97340 - DNA, 1368 bp, Enterobacter aerogenes; identical to SEQ ID NO: 90352

SEQ ID NO: 97341 - DNA, 366 bp, Enterobacter aerogenes
atgcgcgcgcataaaattcagcgtcgctgctcggcggtgggctttgactggacctcgcttggcccggtgctcgataaagtgcatgaagagatagatgaagtcatgcatgaagcgcagcaggcggtggttgatgaagctaaacttgaggaagaagtgggcgatttgctgttcgccacggtgaatttgtcccgtcatttaggggttaaagccgaggtcgcattgcagaaagcgaacctcaaatttgagcgccgcttccgcgaagttgagcgtattgtcgccgccagaggtctggaaatgaccggcgttgacctcgaaaccatggaagaagtgtggcaggaagtaaaacgccaggaaactgatctctaa

SEQ ID NO: 97342 - DNA, 1320 bp, Enterobacter aerogenes; identical to SEQ ID NO: 89174

SEQ ID NO: 97343 - DNA, 852 bp, Enterobacter aerogenes; identical to SEQ ID NO: 87779

SEQ ID NO: 97344 - DNA, 852 bp, Enterobacter aerogenes
ttgctgtttatctccggctttgccgcgaatcaggcgttgattgccgcgctggcggaaaaagacgatcgcattgtggccgatcgcctgagccatgcctccctgctggaggcggcaagcctcagcccggcgcagctgcgccgctttacccacaatgacccgcaacagcttgctcaactgctggcgaaaccgctggacggccagcagttagtcgttactgaagggattttcagcatggacggcgatagcgcgccgctggctgacattcaggcggcagcccgcagcgccggcgcattattactggttgacgatgctcacggaatcgggacgattggcgatgaagggcgcggaagctgtcatacgcaggcggttcgcccggagctgctggtggtcaccttcggcaaggcgtttggggtgagcggcgcggcggtactgtgcagtgaatcgatggccgagtatctgctgcagtttgcccgtcatctcatttacagcaccgcgatgccgccggcgcaggcggtagcgctgagcgcggccctgcgggtcattcgcagcgatgagggccagcagcggcgggaattcttgagcgcccgcatccgtcagttccgcgcaggaatgggcgatgttgcgctggggctgaccgattcccggagcgcgattcagccgctgattgtcggcgacaacgcgcgagcgctggccctggcctccagcctacgcgaggccggctgctgggctaccgccattcgtccgccgacggttcccgtcggcggcgctcgcctgcgcctgactctgactgccgctcatcaggatgatgacattgctcgtttactggaggtgctgcatgaccacggtgaataa

SEQ ID NO: 97345 - DNA, 789 bp, Enterobacter aerogenes; identical to SEQ ID NO: 89327

SEQ ID NO: 97346 - DNA, 330 bp, Enterobacter aerogenes
ttgcgtaaaacctcactggatgaactgccgcagtttttcaacgtgctacaggggcggatgtcgatcgtcggtccccgcccgcacgcggtggcgcataacgagcagtatcgcgtgttggtggagaactacatgattcgccataaggttaaaccaggtatcaccggactggcgcagattaacggcttccgcggtgagaccgacacactggacaaaatggagaagcgaattcagtacgacctggcctacatccagtcgtggtcgctgttcctcgatctcaaaatcgtctttttgactttcttccggggctttgttggcaaaaatgcgttctag

SEQ ID NO: 97347 - DNA, 573 bp, Enterobacter aerogenes; identical to SEQ ID NO: 91182

SEQ ID NO: 97348 - DNA, 1611 bp, Enterobacter aerogenes
atgatttcattcgtcgcctttttcatcatatgggcggagcggatggggtgggaggttcccgactgccattatcgagcctgccactggctggagcatcgcggagatctcgcggtgcttcgctgtttccgtggtttcggtaaatccaccattctggcggtatataacgcatggcgatattaccagaaccgccagtatcgcatccttcaccaatcagaggccgatggcactgcgtacaaaactagccgtgatacgcagaacgtattacgcaaccacccactgaccaaaggcatgctgccggatggacagggcacggttgagcagtggtgggttaacggctctttggatatgcgtaacggcagcatgtacgcaaaggggatcctctctaacgttacatcagcccgcgccgatgaatgccagaacgatgacgtagaagtgccccgtaatatccagacgccagaggcgcgggaaaagttgcgttatcgcctcggtgaacaaacacacattcttgtccccggcgggcgaaagctgtttatcggcacgccgcatacccacgatagcctttacgatgaggttgaatctatgggcgccgactgtctgaccataaaactattcggcaaagaatttcgcatagaagaaaaacaggctaccgctagccgttactcgttaccgttccggcctgaatatgttttcgtcggtattcacattggcgcgagactgctcgttgaaggtgttgattatcgtcttaacgatgacggtatcgagtttgctgaggctcccggcaccacggttgactgttacgcggattgtgaatggccggaaaggtttactccggaggaaatgacaaagcgccgtcgcgagactcgcacaatcaacgaatgggacagccagtaccagctgcatagtaaaccggttggtgaggttcgtctcgatcccgaccgtatccgcgagtacaacgtccagcctgaaattcgctatgcaaaccgttcctgctcgatgtggctgggccagacgcaaatcgtcggcgctgtcgcctggtgggatgtggccaccggcaaagttaaggccgacgcctcggcattttctctgattttcaccgacgcgcgcgggcatctgtactggcatgtatgccaggggctcacaggcgagctggcagagtttgacgacaacgacaaaatcaccggtgggcaggtgatgcagattaaagagctggtgctgaagtaccagatcccgttggtgtgcgtagaggtaaacggccccggaagtttcgcagggaagttgcttattcaggcgctgaagggtaccggctgcggcgtgcgggaagaatttagcgtcaccaacaaacaaaaacgcattctcgatgcattcgaagcgccgctgtcgtcccggttcctgtgggcgcataccgacgttctcgacggccccatgtacgaccagatgcgggatttcaacccggcgttaactaaccagcctgatgattatatcgattcgggatctggtgcgatcagcgctacacctgtgcgcatcgggaaattagtcgggattccgaccgcgcaggcgagggagcattggcagccatacgatggcgacatttcggtcgctgtagattactag

SEQ ID NO: 97349 - DNA, 522 bp, Enterobacter aerogenes
atgaaaaaactcatcccattattgctaatttttccttttactgcctctgcctccacagatttaattgaggattcaggatatatcgtcccaatatcaggcccaggaatacaaattactaacccgtacactgactataaggtcattagcggtatcgataacggtaaaaaaattgtactaaatgtgtcagtattaaacctacgttcctacaaggagaatgcagacctaagcgaatctaataaaaattatgcggaaggaagtaaaactgtattcagttacggcgataacgcttacacaaaggattttataaaattctcctcggaagcagctataaattcgacaaaagaagacctaaaaaaattatattgtacgcctgatggtatttaccctatgtcctcacaggagagactattctacgaagcacggaaagaacataagacaataatgctcaattactacagtgattcaggaaaaaccctcatatttgggtttggggtttctccagaatcatgtaaatcgaaatag

SEQ ID NO: 97350 - DNA, 192 bp, Enterobacter aerogenes
atgttaacaaccgatgcaattaaatacttcggcagtaagcgaaaactagcagaggctgctggggttaaagccccgacggtgtatgcgtgggggcgcttagtgcctgaaggaaaagccgcccgcttgtccctaatcaccaacggagatttggtatacgacccgacagcatatcagcaggccaaatcagcttaa

SEQ ID NO: 97351 - DNA, 312 bp, Enterobacter aerogenes
atgagcctgacgatccgcctgaccggcaccggcggcgcccagcaggtgccggtcttcggctgcgactgcgccgcctgccagcgcgcccgcgtcgatgcacgctatcgccgccgcccctgcagcgcggtggtgcgctttaaccatgcggtcacgctgctcgacgccgggctggcggatctggcggaacgccagcccgctggcagcttccagcagattttattgacgcattaccatatggatcacgtgcaggggctgttccccctgcgctgggggggggggcgatccgattgcggtgtacggcccgccggatga

SEQ ID NO: 97352 - DNA, 2286 bp, Enterobacter aerogenes; identical to SEQ ID NO: 91650

SEQ ID NO: 97353 - DNA, 1125 bp, Enterobacter aerogenes; identical to SEQ ID NO: 87945

SEQ ID NO: 97354 - DNA, 270 bp, Enterobacter aerogenes
atgccatcaaaccttcgggaattaattgctgaagagatcgggattctttttagcgatgatgacgctcaaagtgtgtgggatgtgtgccgccgcgccgccatgctccaggctggcaactctccggtaattccagatggttggaaaatggttcctgtcgaaccgaacggcgacatgctggcggcggctcaagatgcattcggcgaaactgatggcgatatcgcaagcacgctccgcgccgccatcgtagccgccccgcaggaggtgaagtaa

SEQ ID NO: 97355 - DNA, 198 bp, Enterobacter aerogenes
atggataagtgccaaggtgttttcggcaaaatttttggtcattcattccgggtggcgataacaaaaggcgctccggctatgaatctcaagtcggcagaagcagatatttcgtcaattatgcaaatgatggaagcatctagaccagaaacttatcacggaatttactgcaagcgctgcgggaaggttatcgatggctaa

SEQ ID NO: 97356 - DNA, 363 bp, Enterobacter aerogenes
atgaatgaatatcgcatcagtctcccatggccgccgagcaacaaccgctactaccggcataaccgcgggcgcacgcacatcagcgcagaagggcaggcgtaccgcgacagcgtcgccagaatcatcaaagactcaatgctggatattggcctgaccacaccagtaaaaatccgcatcgagtgccacatgcctgatcggcgtcgccgggacttggacaatttgcaaaaggccaccttcgacgctctgacgaaatctggtttttggctcgatgaccagcaggtggattactacagcgtgaagaggatgccgatggttaaaggtggtcggcttgaattaaccatcaccgaactggaggccgaatga

SEQ ID NO: 97357 - DNA, 399 bp, Enterobacter aerogenes
atgtctgagccattaaccattgcaggcggagttgcatccgcaaccgtcggtgtgacgttcgcctctatgttcccggaggcgacgcccggcgtaatgttatgcgcactcgccggggcagcaatgtatgtgctgacctcagaacctcatcaactttggaagcagttcctgtttgctgtgatttcattcatgggcggcgttttcttctcgacatcgatggcgaaaatcctggccggtttgatcaacgcagctctcagctttttgcagccgccggtagtgatagaagtatcacctaatatcggcgcgctggtggctgcttccatttccgtggcagttctgctgcgtattctcgcaaagtcaaaaagcgtgaagatgccagggctggaggaggaagacaaatga

SEQ ID NO: 97358 - DNA, 279 bp, Enterobacter aerogenes
atgacatggcaaaccatctttctggatgtgaacgccattgtttgcgtgctcatcgtagtgaggttgatgttcttcagtaaatcaggaagacgtcatcgcccggccgtcgcggtcatggcttacctgataattctgtctgctggctacatagccttcagcattcttttcgggaagtacttgcaggtcgatcccggtgagttattcctgaatattggtgtctgcatcgcagtctggcgcgcggacgggaaccttgcaaaagtggtgaaggtgagtcagtga

SEQ ID NO: 97359 - DNA, 543 bp, Enterobacter aerogenes
gtgactaaagacaatattttcgatgccattcttggtaaagagggcggatatgtcgatcacccaaacgacaagggtggaccgacgaactggggaattacccaggccacagcccgggctcatggctataccggagatatgcgtaatctcacccgcgaacaagcgctaagcatccttgaagcggattactggtacggtccacgatttgaccaagttgcatcggtttcttcagcaatcgctgcagaactttgtgataccggcgtaaacatggggccatcagtccctgtgaaatggttacagcgttggttgaatgccttcaacaatcagcaaaagctctaccctgacttggttgcagatggacaaattggaccgcgtagcataagcgccctgaagtcatatctggcagcgagaggggaagatggtgaagaagtaatgcttcgcgcactgaattgcagtcagggccagcgttacctcgaactggcagaaggtcggccggcaaacgagtcatttgtatatggctgggtgaaagagcgcgtaaagctatga

SEQ ID NO: 97360 - DNA, 222 bp, Enterobacter aerogenes
atgtacagcagactgttagccatatgcctgatgacgatgttgatcgggagctgcgcgaacaattcacccgtaaaacctgaagtcatcgataccgcctgcaactgggtacgaatcatctacctgaccgaccacgatatcgatgtactggataagcagaccaagcgcgacattctggcgcacaacaaatcggtgcaggccaactgccagcaggagaagaaatga

SEQ ID NO: 97361 - DNA, 387 bp, Enterobacter aerogenes
atgaacgagcaggccaacaagattcttgtcgagttgatgcaaagagcagtgaaaggagttgatgcggcaatgtcatttagccaggcgcagatcccagatgtggtgcatcagttgctggtctggaattttgcagtatcactcattctctccgtgcttggcgtattgcttttttttgcggctcaatttgccgcatggaagggattcaaatacctgcgaagagaatggcagggcgatggatgggttgaacaccctgaaattatgtttatcacgctagcctatatcgcgacattctgccccctagcttgggtgtctctagactggttgaaaatttggttggccccaaaaatttggcttatcgaatacacggctgaattactgaaaggttag

SEQ ID NO: 97362 - DNA, 237 bp, Enterobacter aerogenes
atgtcagaaattacacctgcagaacaaatccgcctgactatcatcaagaaagttaattacgacaccgccgcggcgaagctggccattgactgggttggcgatagcaatctcaaagctgagctgttcgcagactctttcgatcgtgtttacacggaaagtgagattgtctcgaaaacccgtaaggcgattcaggaagcgaccgaagcgctggcgttgtttgataccaccactgagtaa

SEQ ID NO: 97363 - DNA, 201 bp, Enterobacter aerogenes
atgccgatatgcacgctttcagtagaagtaaaaagtcgctggtggctgccgctctatctcaaaacgctgacgttattctgccagatggtacagcgagagcctgattacgaaaaggtatctgcattcatcgtgaagtatggcattagccagaaaatgaaggctgaaccactgggaaaagaacggagcaatacatggcgataa

SEQ ID NO: 97364 - DNA, 201 bp, Enterobacter aerogenes
atggcgataaataaagagcttgagcttcaaaggctggtgctactaggagctttatcaaccctggatgagtctgttcgaaatgaaatattcgaactcaaagatcagattttaaaaatgctgagtaacgccagtgagaaagaatatgcgctcaccgccttatccctcgcgtcaatcgaaaagcataaagaaatttcggagtga

SEQ ID NO: 97365 - DNA, 1350 bp, Enterobacter aerogenes
atgactgacaaattaactctcgccgtcaaccatgcgttgaacgatgcgcggatggcgcgcgctcgtatggggatgctggcgccaacaatggggctcgataacaaacgcagctcggcgtggtgtgaatacggatttcctgaactggtaacctatgacaacctttattcactttatcgtcgcggcggtattgctcatggcgcagtagagaagctggtgggcaagtgctggcagtcaaacccggagatcatcgagggggatgatgctgatgagagcaaggatgaaaccgcatgggagacgaaatccaagcaggtatttaccaaccgattctggcgcgcgtttgctgaagccgaccgccggcgtctggtagggcgttatgcaggtttgctgctgcatgtgcgcgatgataaagactggaatcttcctgtcgaaaaaggtcgtgggttgcagaaagtatcggtagcctgggctggttctctggcagttggagagtgggacacaggtcttaactctaagacatacggtcaaccgaagatgtggcaatacacggagcgccttccgaacggttcgacacgccgcgtcaatatacatcctgatcgtgtattcatcctgggtgattactcagatgatgcgattggcttccttgagccagcctataacgcctttgtgagtctggagaaagtagagggtggatcaggtgagtcattcctgaaaaacgctgcgcgccagcttgctctgagtttcgatagaactatcgatttcagcagcctggcatcgatgtataacgtcagtgttgacgagttgcaggacagattcaacgaagctgcacgtgagatgaatcgtgggaacgatgttcttctcgcgcttcagggcgcagacgtgacgtctcttgtatctccggtttctgacccggggccaacctacgacgtaaacctgcaaaccgctgccgccggggtggatataccgacacgcattctggtcgggaaccaacaggccgagcggtccagcaccgaagaccagaagtacttcaattcgcgttgccagtcacgccgagtagacctcgccttcgagatagaggacttctgcgacaagcttatcgacctgaagatcatcgactccgtcagcaataagaccgttatctgggatgacctgaatgagcagaccggatccgagaagctgaccaacgccaaaaccatgggcgagattaatcagaccatgcagggtagcggtgaaaatccggcattcagtcgcgaagagattcgtacggcggcgggttatgacaatgacgacgaagaaccattaggagaagaggatggcaacgaagaagacgaagccaccgattctaccgcgtaa

SEQ ID NO: 97366 - DNA, 450 bp, Enterobacter aerogenes
atggcacgttatcgtcgcgtcaatattgacggtcagtctctgtacaagactgaaacccgcactacgtctgccgcgttgcttccaggtactgcggcaactattaactcatccgatcaatttgctcaggccaccgcgctaaccggccgcctgtatatcatcgatgttggttatcaccagggcttgaccatcactgaatctatccctgccggtgattcagctgtcggcaactacgtcgaagaagggcgggagctggcgttacgctgcatgcctggtgcttacaagaaagacagcccgatcaaactggggactgctggtcagttcaccctcgcaacctccgatactgattcagtgatcggctacagccaggatgaatacaccattgcggccagcaccaccgacttcattcgcgtgcgcatgcgcgttggcaccgtcgccgcagctggcgcgtaa

SEQ ID NO: 97367 - DNA, 1077 bp, Enterobacter aerogenes
atgtacttctctaaagagacgctggcgactaactcccgcctcggcgggcactggagcgagctgtgggcaaaccgcaacatgtggaaccggcagaacgattccatcattgcggctaaccgcgaaatcatgactcctgacatgctggcctgtaacgcagttggtggtttctcccgtgacttctgggctgagattgataaccaggtactgcaactgcgcgatcaggaagttggcatggaaatcgtgaacgacctgatcggcgttcagacggtgctgccggttggtaaaaccgccaaactgtataacgttgtaggcgacatcgcagacgacgtgtcagtaagcatcgatggtcaggcgccgttctccttcgatcacactgactacgcgagcgacggtgacccgattccggtgtttactgtaggctatggcgttaactggcgtcatgctgctggcctgaactctgtcggtattgacctggtgctggactcgcaaatggcgaagatgcgtaagttcaaccagaagcgcgttaactactacctgaacggcgattctaaaattcaggttcagtcttacccggcacagggcatcaagaaccaccgtcacaccaagaagattaacctcggctctggtgctggtggcgcgaatatcgatctgaccactgctgacatgaccgcgatctttgcgttcttcggtaaaggcgcattcggtaccaccgcacgcacgaacaaggtcgccgcatacgatgtgatgtgggtttctccggaaatctgggcgaacctggctcagccgtatgtggtcaacggtgttgtaagcggaactgtactgcaggcggtgctgccgttcgcaccggtcaaagaaatccgcatgagcttcgcgctgagtggtaacgagttcatcgcgtatgttcgtcgtcgtgacgtgatctctccactggttggtatggctgtcggtgttgttccgctgccgcgtccactgcctaacgttaactacaacttccagattatgtctgctgaaggtctgcaaatcacagcagacgatcagggcctgtctggcgttgtctacggcgctaacctggcgtaa

SEQ ID NO: 97368 - DNA, 294 bp, Enterobacter aerogenes
atggcaaaatacgaagttgtgcgaccgtggttcggtgtgaagttaggtcaggtggtagagatgaatgaacttcatccggcgctgaagtcaaacgtccgtctgatgtgcggtgaagctggcggtgaactcaatccggcaacgcctgaaggcggtaccgataacaagtctcgtaaagagattatccagtcgcgtttgacggaattaggcatcgagtttaaaggcaaccttggtgctgagaagctcagcgagttgttgcctgatggcgaactcgaaaagcttttccctgctgaataa

SEQ ID NO: 97369 - DNA, 513 bp, Enterobacter aerogenes
atgaaatatccaaccgtatcagttaacggcgtttccgttcgtgtagacgatgaagggcgctataaccttaatgatctccatgctgcggctgtggcggaaggcaaagccaccgaatcacagcgaccaggtgaattccttaaaacaaagcaagtaaggcggtttgtgcaggccctgagcgatgcgaagaaaatcgcatcggtgttaaccatcaaaggtggaccgcttcaggggtcatggggactcgagctaattgctatccgttatgctgcttggcttaatccattgtttgagataaaggtctatgaaacattccagatgctggttagaaatggcattgatgcaatgtcccgtctgaacaaaatcgaccacatcatcaacactgaaaccaaagcaatcagccagtgcgcgagccagatggcgaagtggggagtaggtggtcgcaagcaattgctccatgcagcgcgcgatcgcgctgctgatgaggtccagttatatttacccggtatcgcatag

SEQ ID NO: 97370 - DNA, 381 bp, Enterobacter aerogenes
atgaagaaaattttagtcgcctctgcgattgttttaactttggtaggctgtgcttcctcaggaaatcagcaactcagcaaggaaactgaggtcagcgttaagtctaaactccaggaaggaaaaaccaccaaggctgaggttaaaacgacattcggatctccggatgctgtttcatatactgacggtggcaatgaaatctggaagtatgccttcgccaaagttaaagttaacgggactacattcattcctttctacggtcttttccataacgggactaacggcaccaagaaagaactcaccattctgtttaaagacgatgtagtagccaagtacacaatggctgaatcggctataaatacgaaatccggttgggctgactga

SEQ ID NO: 97371 - DNA, 396 bp, Enterobacter aerogenes
atgactcgcatctcagtagtagcattactctcacttatattaactggttgctataagtcagcgccatccgatcaagaagcaatcgacatagcgaaaaaagaagtgtcgatggctatatgtggcgataaagctgctagctgcatagatgttagcggcgggaaggcgcatattggcgaacggaaaaatgacaacaccaatcaagttactgtcaccttcaaaaacataaaggccaagcgtgacgcatcagtgaaagtaaacgtaaatgctggaatggtggtctatgatttcgacgctaaaacaggcgatacgtatattaaagagctttcactctggtctgaagatggagatcactctatagaactttgtggacataattataagttctgtaggaaataa

SEQ ID NO: 97372 - DNA, 1347 bp, Enterobacter aerogenes; identical to SEQ ID NO: 88094

SEQ ID NO: 97373 - DNA, 621 bp, Enterobacter aerogenes
atgccaaaggacccaaaacgaaaatcaacgcagttcaagccgctgacagtccagcaggaggcttattgccaggagtatgtgaaatgccctgagaaccagactcaggcggcaattaacgccggatactcaccaaatacagcgggcaagttcgccagccagaacatgcgcgatgcgcgtattcagaaacgaattgctgagctgatggaagaccgcaacaagcgcctgcgcgtcagtgccgattatgtcctgctgcgcctggtggaaatcgaccagatggacgtgctggatatcctgaatgatgacggcgggctgaagccgattgctgaatggccgaaggtctggcgtacctctctcagtgctatggatatcgctaccatcaagacgacccaagcttctctgcaaaaagagaatggcgaggcggatctctctgttgaggatgttgagcatattctgaagaaggtgaaatggcccgacaaggtgaagaacctcgagctaatcggtaagcacgtcgatgtcaacgcattcaaagagcgcatggaagttaacgtaaatgtcactatcgccgaccgcatggctgccgcgcgcaagcgcctgaaagagcgaaatggtggtgaccagtga

SEQ ID NO: 97374 - DNA, 417 bp, Enterobacter aerogenes
atgagtagatactacgactacagtaatcaagaggttaaatgggggacgattgttctccatgttgtgtttttctttaccgttctaatctctctttgcatggcaggctgcccatattacaacgtatggagcagcaacctcgctggaaaagcctctcttgcacgtgccactcaggatagacagatcgcggtgcaagaagctctggccaaaaaagaatccgcacgcatgttagccgatgcagaaattgagcgcgcaaagggagtagcaaaagcaaaccagataatcggcgatagcctgcgaaacaatgaagaatatttacgttacttatggattgatggattgcagcagaataagagtcaggtaatttacgtccctactgaagctaaccttcctattctcgaagccggaaagcggaaataa

SEQ ID NO: 97375 - DNA, 324 bp, Enterobacter aerogenes
atgagccagttacaaaaacagcgcatcgtccgctttgatggcaataaacagattgttgaggttccagatcctgccgctgcggttattggtccaccaacaactaccgattacggcggagttaagttgggcgccactatcgcagcagccgctgcggcaactgctaccgcagacactgcatcgagtgcctctgatgtagctggtctgcttactgaccataacgacctggtgacgaaatacaacgcgcttctgacggatgtcgcttcgattcgtaccacgctgaacgctgtccttgcgcagctaaaagccaaaacaattcctgtttaa

SEQ ID NO: 97376 - DNA, 561 bp, Enterobacter aerogenes
atgaataaaattatattttttgtttcaataatgatgtctgcattttcatttgcagggcaaaatgtcaaatgcgaacttcaatactttggggatagcgataaatttaaggtaactgagttttcttttatggggattccatctgattcatacctttatacctgtgcagactgtggagatgtccagataaacgtgttcccatctattcagtccgtcgcttcctactcatttgaaaacaacattgattttgaaaggaaaatcaatgcagaatacaacaggaaagacatagctaaacttgaaatggaaaatgttactcaaggtggtagaataaattactcaatcaccgagactggtttagcaaagttttacccagagggcaaaaagattagttatctctactttttagcaaagcaacaaaatggtaaagaacaagtaggttattcaggatttgttacttctaatggtgataagtcatgctcaattattgcgacatatccaggaaaagaaatatcttctaagggaagtaaatcgctaagctactttatgaaccatatctcaatgtag

SEQ ID NO: 97377 - DNA, 681 bp, Enterobacter aerogenes
atgaataccaaaccatctattttcagcttcgaatccggttctactattcgagccatcatgattgatgacaacccttggtttgttgcagctgatgtttgcatggcattgcgaattcaaaatgcaacacaattcgtagatagattagagagttatgaacggtctatgtttaacatagggcgtcaaggtagcgttaatattatatccgagtcaggcctatacaccctgattctccgttgccgagatgccacaaagccaggaactattccgaatagattcaagaattgggtgactcaagaagtgctgccgcagatccgcaagacaggcagctatatcaaaaatgcaatcccacaggaagaccgcatcaagttagttgctgatcaggtagccaatgccaccgcttcagcagtaatgcaggcgatgcagatcgagcagaagaactacagctacccactcaagccaggataccgtgagatgatccactgccctgagggtgttgtcggcctggctgagaagtcactactgatgaacctgctgcagcagcttgatgaagatggccacgacgtcgccggcgccgcggcagaattcacaacaatggtgagctatattgttggtgttagccgatgcctgcaggacatacgcagccacgcgcagtacatcaacaagaacgcctctgagttctga

SEQ ID NO: 97378 - DNA, 225 bp, Enterobacter aerogenes
atgctgcaacaaagaagtatgttgatgatggtaacgccggatctaattcatatgccgatgctttattccgcaaaactctacgtgttccagaggtttcggtacccgagtatttcattctcgaaacccgctcaaatatgcttgttgggtgtaatgaccgtggcgagtttgtacctattgcaggtcaaactgaaacagcagatcttgcaattaaattggctgctttaa

SEQ ID NO: 97379 - DNA, 723 bp, Enterobacter aerogenes
atgatccagtcatcccatgctcttgttaccctgaaaccagcgcgtcaggctgcgctgcaggctattatgtccgtggaagacgcgcgtcagcgcggtacccgcctgccatcaatgccccatgtccggacctttctgcgactgttgacgggcagcagtcgtattaacagcacggtggctcagtctattcccggccttcaccgtgatccgaaagaccgcctctccagcctgaaacaggtggaagaagcgctggatacgcttatcgccagccacggcgaacactgtccgttgccgctgtcgcaggatgttcaggctgaactgtttccggaagtccgtcatacccgtactgaacgcaggctacagcgccagaagattgtattcacccgcaagatgcgtcgtgaagcgcggcatgtcgaacaggcctggttacttcgtcagaatctcctggggcaggcggttaccgaactgaacttccagtctccggaaaccgttgtcagctggtatcgccggtgggccaacgagtttgacgcgagtgaacttgaacctgctttctggcgctggcagacgcgattcgcttctctcagggaactggtctggctgcgctgcagtaatgcaccgttgtacgaggtcatgcatgaaatcagttttattgtcagggagtccggagaaaacatccttgagcgggaacgctggctggttcccaacaaactgacaggcgggagataa

SEQ ID NO: 97380 - DNA, 432 bp, Enterobacter aerogenes
atgaaaactgtacttaatctggatgtcctgaaaaccatgtctgcggaagaactggaagactaccgcgccgccggtgaagattttcgccgtgaattaagccatgccgtgatgcgtgacctgccttcaccgtcaggctggtctgccaatgctgaatataaaagtgagtttggcggcttttttccggttcagatccgctttacgcctgcacatgggcactttgatgttgcagtctgcagccccggggaactgaatcaccgctggatggtggtatttgtcacccgtggcggtcagccgttttccgttgttcgcgcaatggatacctttaatccggaactgattactcatacgctggcgctgatagcgtgtcttgactcagatggctattcatttgccagcattatcagcacgctggcacaggagggcgcgcaatga

SEQ ID NO: 97381 - DNA, 2058 bp, Enterobacter aerogenes
atgtctgcaactgagtctaaggtaaaaactgctccaaaaaccagcaaaaaatcccttaaagctgctgaagccgaagcgctgaaagcggctctcgatgccgcaccgattgagtatgtcccggtgacggcactggtgaaatctcccctgaacgtcaggaccataccttatccggaggagaaagtacgctcaatggcagattccattgatgcgcttggcctgttgcagaatctggtcgttcattctctccctgacgggttgtgtggtgtggcagcaggtggacgtcgcctgaaagccctgcaactgctgcaggatgaaaaccgtatcgatgccggatatctggtaatggtgaaaaaggtacctgatgaactggctgttgccgcatcaatggctgaaaacgaacagcagatggcgatgcatccgtctgaacagatcgccgggttccgcactctggcagagcaggggaaaacccccgcgcagattggcgatttactggggttcggtacccgtcatgttcagcgcatgctgaagctgaccgaactggctcccgacattctggatgcgctggcaaaggatgaaatcaccaccgaacactgtcaggcgctggcgctggagaacgatcaggcccggcaggtcgaagtgctggctaccgcacgtaaacgtggatggaataacgaaccatcggttaccactatccgtgacctgattactaccgaagaagtctccactactggaaataaatttcgctttgtgggagaggcggctttcagtcctgaagagatccgtgttgacctgttcagtagcgaaacgggagggtttgtaaaaagtgcttctctcgataccgcactgctggaaaaacttcagaacatcgcggagcacctccgcgaagcagaaggctggtcatggtgtgatggtcgtcttgacccgatttctcactacgggaaggactctaaaatctggcgtctgcagtctgttcctcctgttgaatattccgggacagaatcagaacgtcttgcggagctggaagtactggaagcgcagtatgaagacgagaaccccggcgtgaatgatgacgtcgtggctgaggctctggaggccgtctgggaagaacagcaaaccatagtacaccgggcaaaacaccgggcatggacggatgaagataagcagacctccggtgtagtggtttcctggaatggtcatgaagtgacggtacagcgcggagtagtgctgcgcgccgatgaaaacacaaaggagaaggatgcatccaccgatcaggctcctgaaaaagtcgatccgctggactctgtcagtgtcccgctgctgacgcgcctttcttctgaacgcacactggcggttcaggccgccctgttgcagcagccgcagaaagccgtcgcactgatggtctggaaaatgtgtaactcggttttccataccacgacgtccgtcaaagagcccttctgcattagcgtgaacgtgtcgcattacgcgctgacccgtgaagcacctgacggtgaaaacagcgttgcgtttcaggcaatacaggctgaaaaagaacgccttgaagccctgctgccggaaaactggcgaaaggatatgacaaccttctttacgctcgatggcacaacactgatggcgctgatggctttctgcaccgcctgttccattgatggtgtacagggcaaggatgaatttggccgtaaacatcagagttcgctggatggggtggaaaacgccattcagtttgatcttcgcgactggtggaaaccgacggctgataaccttttctcgcacatgaagcagccacacattgtacaggcactctctcaggccggactgacaggcgcagcactggacgccgcgaaaatgaagaaaaaggatgccgcagaacatgcagcgcacttcctgtcaaaaatccgttgggttccggaatggatgaccagtgccgacaaccagaaacagcttgccgcaaaacctgaacccagtctggcaacgaaccagattgatacagacgctgattccgatgtcgataccgaccataacaacccggcttgtgccgcctga

SEQ ID NO: 97382 - DNA, 255 bp, Enterobacter aerogenes
atgagcaagtctctgaaagattttttaaaccagccagaacgtcagcgggagccgacagcggaagaactggaactggccactctgcttaacgcgaacgcggtatcacccgtcatcactgccccggtgctaccggacggggaattcacccggcaggacgctgatggcgtggtggcgttctataccaacgtgtttatcgaggacgatcagggtacgcattttcgtctggttgtgcgccgtgacggggaaatgatctag

SEQ ID NO: 97383 - DNA, 510 bp, Enterobacter aerogenes
atggcagcacgtggcgttaataaagtcattctggttggtcatcttggacaggatccagaggtgcggtatctcccttccggtggcgcagttgccaacctgaagctggctacgtctgagacgtggactgacaaatctaccggggagcaaaaggaaaatacggaatggcaccgtgtggtgctgttcggcaagctcgccgaaatcgccggggagtatctgcgtaaaggcgcacaggtctatatcgaggggcagttgcgtacccgcacctggcaggatgaacagaacatcacccgttatgtcaccgaaattctggtgaatcacaacggcaccatgcagatgctgggtggacgccgtgaaaacgcgccaacgccacagccagccgagccgcagttatctgaacctgctgctcccgctcagtctccggcaccttcttctccggcgaaaaaaccacgtaaaagccggactacaccaccgccgtcgaatctgcctatggatgacgatgccccgtactga

SEQ ID NO: 97384 - DNA, 261 bp, Enterobacter aerogenes
gtgaagccagtgtctcagtggaatattgccgctttctcaaaagaagatcaggataaagtttctgtcgataaagctgccgcagctgtcgcctggcaggaacgaatgaacaagccggtggtgcccgaaatggttgagcgtgagcagccggagtatcttcgcgactatttccgggagaggttgcggattcaccggcagaacagcctgcagctgccgcgtgccggttctcctgaataccagaaaactgacgaagaaaacaactga

SEQ ID NO: 97385 - DNA, 501 bp, Enterobacter aerogenes
atgaatgcaacagcaccggccgtgtacgtggggacataccataaatataactgcggcagcattttcgggaaatggcttgatctgacggattttgacggcgaagacgaatttctggatacatgccgtgaacttcatgctggcgaggacgaccccgagtttatgtttcaggactgggaagggatcccgtctcagtttgcgtctgaatcctccgtgaactggaagtatatcgcggccttcaaacaggcacaggaagaagggcgtaccgacgcgtttgtagcctgggcggaatataccggtgaatgcgattatgacgctttcgatactgcctattacggggaggcagaaagtgaggaagattttgcttatggctttgtggaggatcacggtctgttgaatgatgtgcctgaatccctgcgctgctacttcgattatgaggcttacgcgcgcgatttgttcagcagcggttacgtgtaccacgatggatttgttttttacaactga

SEQ ID NO: 97386 - DNA, 426 bp, Enterobacter aerogenes
atgtatcacgtccatcaaaccatgctgaatgttgaagagtccgaccgtctgtcgttcctgccggatctgtttggtaaagattttctggccggagagatgcaggtctatgcgctcgctgagaaacacatcaccgattactgcggaggattctggcatttcattcgtattccggagggtggcggctacatgatgcctgacggtgatcgtttccatctgactaatccggaaaactggtttgatcgttctgtcagtgccgatgcggcaggaatcatcattacggcgctggcgatcaaccgccgaatctggttgcaccatgaacgcggcgacgcagccctgacacgtcacctgatgctgcgggaatcgcagttgtggaatttcatcgactcccatgacgaatgcgctgctatttacgcggccctggactga

SEQ ID NO: 97387 - DNA, 231 bp, Enterobacter aerogenes
atgacggttaagacattcagggaacgtctggctggatacccggatgatgcgttgtgctgtgggacattctggttggctgaggatttcctggcgctcgatagtacgcttgatgaagagacgatagacgcagcgatggagctggcgcaggaaagccatgacgcgaacatcggctttaactgggcgtttctgcaggcgactattggtgaattaaagacgtctgatcccgactga

SEQ ID NO: 97388 - DNA, 930 bp, Enterobacter aerogenes
atgccgaactggtgtgctaacaggctgtatttttatggtgaagaggcagacattgcggggatccgcaacctgctgtcgggggagctgacctcgcattttcttcgcgccgaacaggaagggatccaactctttgttgcaggatgtgccggcatactccggccagtagaggattttacttatgcaccttttcccgcattgactcaggcgggcaaagggagcaattcaccggaaaatattgctttcagtcgctggctgacgtcgctgcaggaacaggtggaactgagcaaagataactgccatttgttgcaccggctgtggctgaatacgggtattggcaataaacgatggtcatcgctgtcacaggaacagcagggggtgatcgaaaaactctattctgataaatattttgactggggatatacctggcgaaaaggtgaagtcagtgaatggtggaaccgactttgcgataacccgtcgtttttccccggacgaccgctggacttccttcatgttcttccgacccgtctcgatgttgaggttaatggatttaatggaaaactgttagagggcatcccgtctgcatatgactggtatctccggcggtacggtactaaatggccgcagggaagcgaggtgaacatttctttttcttgtgagaagggaattcaggtcgattttgataccccgtggagtccgcctgatgaagccctgattgctgaactcagcaggcagtatcactgcagcattgagcactggtatgccgaacaggggtgcgatttttgtggctatgcctgctatgcagaaggtgagcagttacagcagctgcaggattcgctggaatgggaactggctgaagaaggggacgatgtgtattccgatattatcgggcctgaatggctgatcaacaatatcgctcactttggcggatag

SEQ ID NO: 97389 - DNA, 231 bp, Enterobacter aerogenes
gtgacccctggtttcagaaaaattctgcgatatgccggagttcccgttgatgcaactgagcctgtgcgtcggaaattcggtagccgcctgatcctgatagtcacttgttgccttctacctttgctgttccttgacgtcccccagtgggtttttgttctttcgcagatagcctggggggccgggatgtacgttggcatctcactggccagtgataagccagaacaccgttag

SEQ ID NO: 97390 - DNA, 429 bp, Enterobacter aerogenes
atgatgatgtttattcctgcggcatctgaagctaatgagttaaaaatcccactatttactgaacgttgcccggcgggtttcccgtcccctgcagctgattacacagaatccgaactggatctcaatgagtactgcattcgccggcgccacgcgacctactttgtcagggctatcggcaactcgatgaatgatattggcctcaactccggtgacctgatggtggttgataaagcagaacaaccccgtcatggagatatcgtcatagcggagatagaaggtgaatttaccgttaaacggctgctgctcaccccccgccctgccctgcaggcgatgaacccggcgtaccctgtcatgtatccggaccctgaaacactgcaaatcttcggcgttgtcacagcatttattcacaaaacacggagtactgactga

SEQ ID NO: 97391 - DNA, 1272 bp, Enterobacter aerogenes
atgtttgccctggccgacgtgaacagcttctacgccagctgtgagaaggttttcaggccggatttgcggggcaaaccggtcgtggttctcagtaacaatgacggctgtgtaatcgcccgtagcgccgaggccaaacggctctccataaaaatggggacgccgtggttccagctgaaagatgctcgtttttctgaaaaactgtatgtcttttcgagtaattatgagctgtacgcgagcttaagtaaccgcgtggtggctttactggaagagttatctccccgcgtcgaacagtattcaatcgatgaatgtttcctcgatacccggggaattgaccactgcatgaatctggaagatttcggcaggcagctgcgcgggcacgtcctcagtggcacaggcctgacaatcggtgtcgggtttggtgcaacgaaaacgctggccaaatcagcccagtgggcgtcaaaggagtggccgcaattcaggggagttctggcgttgtcaccggacaatccccgccgcacggcaaaattactcagtctgcaaccggtagaggaaatttggggcgtggggaaccggatagcgaagaagctgaaggtcatgaggatcaacacagccctgcagctgtctctgaccaatccaacatttatccgtaagaactttaacgtcgttctggaacggactgtgcgggagcttaacggcgaaagctgcatttcgcttgaagaagccccgcccccaaaacagcagattgtctgcagccgcagtttcggacaacggatcaccgtctatgaagaaatgcgccaggcagtctgccagtatgctgagcgtgccgcagaaaaattgcgtggtgaacggcagtactgccggcacatctccaccttcatcaaaacatctccctttgccgttaatgaaccatattatgggaacgtggccacggagaaactgaatacacctacccgtgacaccagggatattatcgcggcagcggtcagagcactggatagaatatggattgatggccaccgctatgccaaagctggaataatgctcaatgatttcagtccgaacggggtatcccaattgaacctcttcgatgaagtgcaaccacggccacacagcgatgcgctgatgaaagtcctcgacggtataaaccattcgggcaaggggaaaatatggttcgccggtcggggtattgcccctgagtggcagatgaaacgggaactactttcgccagcttatacgacgcgctggaaagaactaccgacagccaggttctga

SEQ ID NO: 97392 - DNA, 252 bp, Enterobacter aerogenes
atgccacgcataattctgagtgacaccactgccagtgtcagtgaactcaaaaaaaatccgatggccaccgttaacgccggtgatggatttccggtagccatcctgaaccgcaatcagcccgcattctactgtgtgccggcagagctgtatgaaaagatgctcgatgctatcgacgaccaggagctgatcaggctcgtctcagaacgtagcaatcagcagctgcttgatgtcgacctggattcctatctatga

SEQ ID NO: 97393 - DNA, 288 bp, Enterobacter aerogenes
atgacttataaggtcaagtttagagaagatgcgctaaaagagtggctaaagctggataagactatccaacaacagtttgcgaagaaactaaagaaatgctgtgacaatccgcatatcccttcagcaaaattacggggtataaaggattgctacaaaattaaactgcgtgcgtcaggttttcgtctggtgtatcaggtcattgataatcagctcattattgccgtagtggctgtcggcaagcgagaacacagcgatgtttacaatctggcaagcgaacgaatgagatag

SEQ ID NO: 97394 - DNA, 285 bp, Enterobacter aerogenes
atgaagaaacaaataacatggttttttatgttgctggaattaagtctcggtatcgcgctcatagtttacgggttagtgaaatatttttcacaacccgcaatttctgaaatatgtacggatgcatcactatgtgccacagacacaatgagttttttcactctctggctgtatcttactcttggcgtgatgctgatatgcttctggtatgtaaccacctggcgcccttaccagttcaaaatgaaaaggatggattcgacactcaagcctgaagatcttgtcaaatag

SEQ ID NO: 97395 - DNA, 129 bp, Enterobacter aerogenes
atgacaatctgtattctcttactgattatcgctattctgtgttatatgtgcttcgggatcgtaaccttcggttttacccgccgtcatacttttagatttgaaaacgaccagcgcgtatatgaatggtaa

SEQ ID NO: 97396 - DNA, 510 bp, Enterobacter aerogenes
atgtccgaggaaaaaacattaacaggccgcattgcgagccaccctggattcgcagttttatgcacgcttgcaggtgtcgcgctgactagcttttttggctggctgggagctcatcagtcagcggctataagtgaaaaaacgtcctgcatatccagaattgatgcaaatgaaaagatactgagggagcactctgcaaaatttatgtcatccattggcgatttaattaactatacggtatttcctccatcaaacagacccgaagatttatcgaaagttgctggccctgtcataaagcaaggttttgctattagcgcctatgcacctctccctctatcaataattgcattaaagatctcaatgacagtacagcaagcatcgttagcatcgatgggtcatgctaatcaagaggcagcaatagcttctataaacgaatcgtttgggaaatggccatcgactttcactcaatcaatgcagcaatttgaaaaacagcgaagccagtgtggcaaatag

SEQ ID NO: 97397 - DNA, 972 bp, Enterobacter aerogenes
atgaaacgcgcccctgtcattccgaaacacacgatgaaaaccataactgaagacagcgtacagtctccgtcccctgctgcaccaatggtcgactcactgattgctcgtgtcggtgcaatggcccgagggaatacgatttcacttccggtctgtggtcgtgaggttaaatttacccttgaaactattccgggcaatgctgttgaagaaatgtcacgtgtttggtcaggtaatgaacgcgatcaggaactgctgactgaggatgccctcgatgatttaattccttcttttcttctggctggtcagcagactccggccttcgggcgccgagtatcatgtgtaattgaggttgctgacgggagccgtcgtcggaaagcggcgattctgacttccagtgactatcgtattctggtcggcgaacttgatgatgagcaaatggcggcattgtcccgtctgggtaacgactaccgtccaaccagtgcttacgagcgtggccaacgctacgcacatcgtctcgaaacagaatttgcaggcaacatttctgctcttgctgatgcggaaaatatttcccggaaaattattacccgatgtttaaacacggcccggcttcctagaactgtcgttgccctcttctctcacccgggagagttgtcggcacgggccggagaatcacttcttaaagcttttgctggtaaagagaatctacttgaacgacaggcagctgagcttcatgatcaaaagaaagccggtgtcatttttgaagcggatgaattgatctcgctgctgagttctgtacttaaacaaacgaccacagcccgtcaaaatctgagctcacgccatcagtatgctccgggagcatctgtcctttataaaggggataaagtggtcctgaatctcgacaggagccggttacctgcggaatgtatagagaagatagaagctattctgaaagagcttgaggcccgggcatcctga

SEQ ID NO: 97398 - DNA, 1677 bp, Enterobacter aerogenes
atgaatattaacccaatagtcataagacagaattttaaaattggtgaactagacgctgaatcagatactcaacttcttgaaagttgttttattgatagcggatacctctcaaaactattaaatccttcagatacatcatcaattgtcattggaagaactggtgcagggaaaagtgctttgttacatatggtggccaatagagcttataaatttaagaagcttgatccaaatgatatatcaattggatttctagaacattctgatattatttcatttttcgaagagattaatgttaatctggatatgttttataaagttttatggcgtcatattttaataatggagttacttaaaattcgccatgatataaaaagtgaatctgataccaacaattttttctcaaaccttcttagcaggctccgcaaagatgaggtaaaacgcaaagcccttgagtacttcagagagtggggagataaattctggattgatacagatactcacctcagggaaatcacctacaaacttgagcgtgacacaaaagcttcaattggtgctgaatacagcggaataagtcttaacgctgattatgcgaaaaaattaacggaagaacaaaaacatgacgttaaaaatcgggcaagtgaagtcgtaagtagattacagattcagaaattaaatgagattctgtctttgctagcggactattcttttgacgacccacaaaaaaactattatattatcatcgaccaacttgatgagaactgggcagagaatgacactcgatataaattcattcgagcgttaattgaagaaattaaggtttttaggaaaataaaaaacatcaaaataattgcagccttgcgccttgatctattacgatcagtatttaaccttacaagaggctctggctttcaggaggaaaaatatgaatcatatattttagatataaaatggactgcacagcaactaacagagttagtgcaaaaaagagtacgtgaagtatatagaaggcagtatacacgcgaagatgtgactatcaaagatatatttccaaaagcgaaaggcggtaatcttggccttacccctattgaatatataattgaaagaacgttatatcggcctagagatgttttgcaatatgttaatgagtgtttcaatgtcgctttaaatagagaaagaatatcgtgggattctattcataaagctgagtcggtatattcattaaaacgattaagatctcttaaagaagaatggggagacatttacccctcttttgaggaaacaatagagatattaagaaatcttcctgataaattcagccgaaactctatttctaaaaatacggttgataccgtattaagtgaattatcaattcaaaatacttcagacccatgtgcgatgatggcgtatagatttctggatggtgattccagagagcaagatgtaattaatgaaataatgctatgtctttatactgttggtatcgtcgcttttaaaataagtacattgacgccatacaaatgggccttcagagatagtacaccaacgacaaaaaatgaaattaaaagagccagcttaatgaagattcataagatgcttcactcggcactggatataagaataaccacaggaaatcgttatgaacgagatacagaggaacaaattgatgagcatcaatag

SEQ ID NO: 97399 - DNA, 135 bp, Enterobacter aerogenes
atggccaaactaagaagccatagcattgggggcagcctgctgatctggtatgatcgagcagaggctcatctcaatgagcaatccccgcaacaaattttttcggggtgcaacagaccctttagtgtccaggcctga

SEQ ID NO: 97400 - DNA, 816 bp, Enterobacter aerogenes
gtgattaaaaaaatatgcgaagtgattgatggagagtatgtctgtgacattgatatcagtgtggaagaatggaaaactttattaacaaatgataaagtttttgacacaaaaagtattgcagcgttaaaaaaatggtttattgagccaaatcattcctgcacatgcttcgatattggtaagaagtacgacctgcacagcatgagtgctaatggagtcataaacggactgggtggcagagttcaaaaagaacttggtagattcgaggttaaaggtgtcggaaatatcgcatccggtacaaaattcattaccgtaatgaagagtaaagaaatcggcggaaaacccaaaagaaacttatggacaattcgtgaggaacttgttcaggcaattaacgaactggatttttttggtacaacagaaatggccagcagtgagtattactctgacgatgagttgatcaatgccatagagaaaagtaatatctttgacaacgttcagacgtttgaatatacaggggaagccaaaccaaagaaaaatgcaatagaagtaaaaaatggcctctcgtatcccaggagtaaaggcgtatcccaaaatgcgctgaataaagcaggttacagatgtgaagtcgatagtgaccacccaacattcagaaggcgaaattcatccttaaattacacagaacctcatcacattgtacctatgtccaggcaagatgcttttgacacatctcttgatgttgaagaaaatatcatatctctgtgttgcaattgccataaacaaattcaccttggtcagggggtaatgactccaacttactga

SEQ ID NO: 97401 - DNA, 1887 bp, Enterobacter aerogenes
ttgtggaccgggtttgtctttgccggaacagtttccctgattatttgtattgttgctttctttgtcgccagctgggtattaggtcatcaggggaaacaacaaagtgaagatgaagtgacgggaggccgtcagctatcagaaaagccaaaagaagtagccagaaagatgaagcgggatggtatggcctctgatattaaaatcggtgacctgcctattttactaaactccgaaattcagaatttctgtcttcatggtaccgttggttccggtaaatcagaagtcatccgacgactgttaaattatgtccgtgcccgtggggatatggccatcatctacgaccgctcctgtgagttcgtcaaaagttattacgacccgtctatcgataaaattctcaacccgctggattcgcgctgtgcagcctgggatttgtggaaagagtgcctgacgctaccggatttcgacaacgtctctaataccctgattccgatgggaaccaaagaggatccgttctggcagggttccggtcgcaccatctttgccgaaggtgcctacctgatgcgtgaggacaaggaccgcagctatgagaagctggttgatacgatgctctccatcaaaatcgacaagctgcgcgcctatctgcagaatacgccagcggcaaacctggtggaagagaagattgagaaaaccgccatcagtatccgtgcggtgctgaccaactacgttaaggccattcgctacctgcagggcattgagaagaacggcgagccgttcaccatccgggactggatgcgcagtgtccgtgaggaccagcccaacggctggctgtttatctcctccaacgctgacacccatgcttccctgaaaccggttatctcgatgtggctgtcgattgccattcgcggtctgctggcgatgggggaaaaccgtaaccgtcgtgtctggatttttgcagacgaattaccgacattgcataagttaccggacctggtggagatcctcccggaagcccgaaaattcggtggctgctatgtgttcgggattcagtcctacgcccagctggaagatatctatggcgtgaaacccgcagcaaccctgttcgacgtgatgaacacccgcgcattcttccgctcgcccagtaaaggtattgctgaatttgctgccggcgagataggtgagaaagagatcaagaaggccagtgagaactactcctacggtgctgacccggtacgtgatggggtatcaaccggtaaggagcagaaacgggaaacgattgtcagctattccgatatccagaccctgccggatttatcctgttacgtcacgctgcccgggccatatccggcagttaaactggcactgaaatataaaccccgccccaaaattgccgaaggctttattccacgccagctcaatcaggctattgatgacaagctggctgtggtgcttgctgcacgtgaagctgaagggcagagcgcccggattttgtttatgccagatccggttgaaactgtgccggttgagaagaccgacgaaaagcctgcgtcaccggtagcggccgtacccccccctcaggaggaaaaggcaaaagttccgccggttactgccaataacacgttccataaacctgcaagtgcagcggcagccgccgccagcgcaacggcgtccccggctggcggcgttgaacaggaactgcatgaaaaacctgaagagcagcttccattacccccgggcgtgaatgaagacggggaaattgaggatatgaatgcctgggatgagtggcagtccagctctgatgttttgagggatatgcatcgtcgtgaagagatcaacatcaaccatagtcatcatgttgatcgtgatgatatcgatctggggagcaacttctga

SEQ ID NO: 97402 - DNA, 5256 bp, Enterobacter aerogenes
atgatgtcaattggttcagtgaaatccgcgggtaaagccggagattattacaccaaagaagataattattacgtcatcggcagcatggatgaacgctggcagggtaaaggtgctgaggcgctgggccttgaaggaaaatcagtggataaggccctgtttaccgaactgctgaaagggaagctgccggatggcagcgacctgagccggatccaggatggtatgaataaacaccgccctggttatgacctgaccttttccgcgccaaaaagtgtatccgtcatggctatgttgggtggtgacaaacgccttatcgaggcgcataaccaggcggtcactgaagctattcgtcaggttgaaaccctcgcagccaccagggtgatggtggacggaaaatctgaaactgtgctgaccggcaacctgattgtggcgaaatttaaccacgataccaaccgcaaccaggagcctcagattcatactcatgcggtggtgataaatgctacacagaatggcgataaatggcagtcactgggtaccgatactgtaggaaaaaccggttttatcgaaaacgtgtacgccaaccagattgcgttcggaaagatttaccgtgaaaggctgaaacctctggttgaggggctggggtatgaaacagaggtggtcggcaaacacggtatgtgggagatgaaagacgttcccgttgagcctttctcgacgcgtacccaggaaatcaatgccgcagccggtcccgatgcatcactgaaatctcgggatgtggccactctcgatacccgcaaagcgaaggaaactctcgatccggcacagaaggtaacggagtggctttccactctgaaagagaccgggtttaaccttaaggaatatcgtgaggctgcctatcagcgggcgaaaacacaacgggaagttcctcctccggcagcgccagctggaccaaatgttgacgatgtagttacgcaggctatttccgggttaagcgatcgtaaagttcagttcacctatacggagttgctggccagaacggtcagccagatggaggcccgcccgggtgtcatcgagacggcaagagccggtattgaagccgccattgggagggaacaacttatcccgcttgaccgggaaaaagggattttcacctccgggatacatgttctcgatgagttatccgtcagagccctgagtcaggaagtattacgccaaaaccacgtcagtatggttccggaaaaggcgaccgcgcgtcagacgtcgttcagtgatgcggttaccgttctggctcaggatcgccctgcaatcgggattgtatcgggtcaaggtggggctgcagggcaacgcgaacgagtgattgaaatggccatgatggcacgtgagcagggacgggatgtccatatcatcgcggcagataaccgttccctggagtttctgctgaaagaagaaaaactggcaggtgaaatcatcactggtaaaaacgctctgcaggacggaactgcctttgttccaggagggacgttgataatcgacctggctgaaaaactcagcctgaaagaaaccatcaatctgctcgatggcgccatgcgtaataatgttcagatcctgatgtcagacagtggaaaacgaagcggtaccggcagcgcgctgaccgtcatgaaagagagtggtgtgacggcgtataaatggcagagtggtaagcagactacagcatcggttatcagcgagccggacaggaatcaacgctttaccagaatggccagtgactttgttgtcagcgtccgggatggtcaggaaagcgtggttcagatacgcggtccccgggagcaggggatcctgacagggctaatccgtgaaaatctcagaaatgaaggcctgataggcagtcatgaggaaaccattacggcgctgacgccggtctggctggacagtaaaaaccggggtatccgcgataattatcgtgagggaatggtgatggagcgctgggatccggaaaaacgcatccatgaccggtttattatcgatcgcgtgaccgctgtcagtaataccctgaccctgaaagatgaaaaaggagaatcactgaatctcaaagtctccgccgttgataatacctggacgctctttcgtcctcagcagttgcctgtggcggaaggagaacggctggccattctggggaaaattccggaaacccggctgaaggggggcgatacggttcaggtgctgaaagcggagaatggtgtcctgaccgtacagcaccccggtcagaagaccacccagaagctggccgccggcaatacgccctttacagggatcaaggtcggtcacggctgggtggaaaacccgggcaggtcagtcagtgaaaccgcaacggtattcgcctcattgtcacagcgtgaactggacaatgccaccctcaatgccctggcgcagagcggcagccaggttcgactgtactctgcgcagaatgagcaaaaaacggttgagaaactcgggcgccatacagccttcagtgtggtaaccgaacagctgaaaacccgtgcgggcgagcaggatatcagcgcagcaattgctcaccagaaaagccagctgcatacaccggctgaacaggcaatccatctggcggttccgtcgctggaaagcgataagctcacgtttacccggcctcagttacttgtcgccgctcatgagttttctgacggtaccgttccgttctctgatatcgagaaaactataggagaacagattaaatcaggcgatctgctgcacgttcctgttgctgccggtcatggcaacgatctgctgatttcccggcagacctgggatgcagagaaaagcttgctcacgatggtgcttgagggtaagaacgccgttacgccgttaatggcgaaagtaccaggttcgctgatggaagggctgacatcgggacaacgaaatgccacccgtatgatcctggaaacccgggacaggttcactctggttcagggttatgccggcgtgggtaaaaccacgcagttccgggcggtgatgtcggcggtgaatttgttgccggaagactcccgtccgaaggtaatcggcctcggaccaacacaccgtgcggtgggagaaatgcagagcgccggtgtggaggcacagaccacagcctctttcctgcatgatacacagcttctgatgcgaagcggccagactccggatttcagcaacacacttttcctggtggatgagagttcgatgctggggctatccgatacggcaaaggccatgagtctgatcgcggccggtggtggccgagcggtttccagcggtgatactgatcagctgcagtctattgcccccggtcagcctttccggcttatgcagaagcgcagtgcggccgatgtggccatcatgcaggagatcgtgcgacaggtgcctgaactccgcccggcggtgtacagccttattgaccgggatatacacagtgcactttccaccattgaaagagtcgaatccgcccaggttccccgaaaggagaacgcatgggtacctgaaagctcagtcatggaattcacgccagaacaggagaaagcgattcagaaagccatcggtgaaggcgaagttcttcctgatatctcgcccgtcagtctctatgacgccatcgtaagggactataccggacgcacggaaagtgctcaggcacaaacgttgattattacccacctgaatgatgaccgccgggtgctgaaccgtatgatccatgatgaaaaaatgcggaacggtgagctcggggaagacagtgtcacgctgccagttctggtgaccagtaatatccgggatggcgaactacgtaaggtttcgacctgggaagcacataaaggtgccatcgcattagtggataaccagtatcaccagatagtgggcgtcagtaaagcagaccagctgattacgcttcgtagtgacgaaggtaccgaacgtctgatttcaccgcgagaggcttctgcagaaggtgtcacgttataccgccaggagagtattaccgtttcgcccggcgacagaatgcgcttcagtaaaagtgataccgaacgtggctacgtggcgaatagtgtgtggcgggtagaaagcatatcaggtgacagtgtcacgctgaatgacggaaaaagtacccgaacggtaacgcccgctgcggataaagctgaagcgcatgttgatctggcttatgccatcaccacacacggtgcacagggggcaagcgagcccttttcaattgaactggaaggtgtgactggcgccagggagcggatggtcagcttcgaatcagcgtatgtagcgctctcccgtatgaaacagcatacgcaggtatataccgatgaccggaaaggatggacggatgcggtaagccgttctcaggagaaagccagcgcgcatgatgttctggagcctcttaacgatcgcgctgttaaaagcgcagagcagctgtttggtcgcgccattcccctgacggagagtccggccggacgtgcagcactgcaacaatcaggtattgcccgcgggcagtccacagggaaatttatctccccggggaaaaagtatccgttaccgcatgtcgcgttacctgcatttgaccgtaatggaaaatctgccgggatatggctgagcccactgacggatatggatgggcgactgcaggctatcggtggtgaagggcgggttatggggaatgaagaagcccgttttgtcgccctgcaggggagccggaatggggaaagcctgctcgccgggaatatgggagagggcgtcagaattgcccgggataatccggacagtggcgtggtggttcgccttgccggcgacgaccgtccatggaaccctggcgccatcaccggcggcagggtctggggcgatatagacgccgtggttacgggggggggcagtgcaaatattccgctaccaccggacctgattgctcaaaaaacggcagaagaactgcaacgccagcagattgaaaagcaggcacaggaaacggctcgtgaactgaccggtgaaaagcgtaaacaggacgaagtgggtgagcagatcaaggacattatcacggatgtggttcgcggtctggatcgacagaaggggcagcatgaacgattccagcttccggatgaaccggaaaaccgtctcagaaatgaggctgttcagaaagtggtagccgataatcagcagcaggacagattgcagcaaattgaacgggatatggtccgggatctgacccgggaaaaaacactcggaggcgactga

SEQ ID NO: 97403 - DNA, 723 bp, Enterobacter aerogenes
atgagagcacagggtacctttctcagcatgacggacagctggctgcaacgccttttgacctggactcccggacagacggatatgattaaaaccgtcgctctggtactgatggtgattgaccataccggtcttctactggcaggaaacaatgaagtcatgagactgctgggccgcggttgctttccactgttcgggcttgtctggggaatgaacctggcccggcacgctgtcattcgccagtcacaactgaaccaactctggtgctgggcgctgatagctcaggggtcatttattctggtggggtatccctggtatatggggaatatcctctttacgttcgccgttaccggacaggcgatgcgctggtttagcctgagaagccgcaacgatatgctactggcgctcgcgatagtggtggcctggttaccgctctccactgacagctatggtctggccggagtattcatgctgatcaactgttaccggctttgtcgtgccacagagccggtggaaagaacaggctatgctttactctgggcggtcatggttttgcttatgaatatccatgatgccgggcaggccgtggcggggttggcaattgcacttctggtcgtgggagtctgctcggatatcgggaagcaggttaagcgattctggccagcgcatttttttgtcctgttttacactattcaccttgcggtgctaggtattctgatcggttga

SEQ ID NO: 97404 - DNA, 576 bp, Enterobacter aerogenes
atgacggaagataaacgtcccactctcagcctgaagcgtaagccgggagcaaaaacacctgaagctggtgcggatacagcccgtattgcccgccgtaagcaggtggtgaatgtgaccacgccgccggcatggaaagtgaagaaagagaaactggcccggaaaacggaacagacggcacttcccgcccccgcaccggtgattccagaaaaggccgtccgtccggttcgttaccttcgcctgccggcgctgcaggaggcgattaataccctgaaggtgtggtggcctgcgctgtttgagggagactcgccccgcctgctggccatcggcatccgggaggccttttttgatgatatggccacacggggaatactgttgtcgcataaacaggtcattaaatgcctgaaaagcattacacggtctgaactttacctgtcatcgatgataaccggtgctgaacgcgttgacttacacggtaacccggtaagtgtcgtgaccccggatgaagaaaagtatgctcagctgcgtctggaaaaacagcgacagcaacaggccagaattcagaatgaaatcatttaa

SEQ ID NO: 97405 - DNA, 789 bp, Enterobacter aerogenes
atgaagcttaaaactgttttagcaactccgcttattaccgccatgttatttaattccttaccttcatttgcgagcgacacgagttctgcattcactcccgagcaggaaaagcggattggcgaaatagccgcagattatatgcgtggacatccggatattcttatccagatgagtgagtcgttacagcaggaacaacaggaaaaacagacccgggaattgaaatcggccgctatcgcacaacaggcccggataatggcggataagcgtatcccctcctggggagcagaaggcggatctgtcatggtggtcgagttctttgattatcagtgtatctggtgcagtcggctggcgcctgagctggagaaggtcatgaaggccagcacgaacgtgcgctactacttcatggagtggccggtgtttggcagccgctggccagaatctttactggcagcgaaaaccggattgcaggtctggaaagaaaaaggcgagaaggcttacctcaaatatcacaatggcatttatagctccggacttaatgaaggaaaactaacccaggatgctatcgggaaatattcagaaaatatgaagttcagtaaaaacacgatcgatgaaattaattccacgctgaccgatatcaatgatattgccaccaccattggtttgaccgggacaccgggtattgtcatcatgcccgttaagggggcaacagaagataatacgacggtttttgctggaatgacggaggctgaaaatatccagcaggcgattaataaagcgcaggggaaataa

SEQ ID NO: 97406 - DNA, 537 bp, Enterobacter aerogenes
atgaaacgttcaacactgtctggtctcctggcggtctgtttaatggtttcaggtggtgcagttgctcagccaacagtacaggcaggattttcacccgagggttctgcgctgcagctggtgctgaacactatcgataccgcacaggaaagtattcgtctgatggggtacagctttacatcgccggaggtcacgcgagcgttgattcaggcaaaacagcgtggggtagatgtgaaggctgttcttgactggaaagcgaacagtacaaaaggcagtgccggtgtggcggcaatgaatctgctggtgaatgccggcatcccggtgcgtaccgtcagccagttcaaaatcatgcatgacaaggtcatcatcactgacggccgtaatgtcgaaacaggctcgttcaacttcagcagggcggcggcacgcaataactccgaaaatgccctggtcatccgggattatcctgttctggcaaatacctatctgcagcactggcaaactcgttggaagatgggaaaggactggagttcctcgtattaa

SEQ ID NO: 97407 - DNA, 174 bp, Enterobacter aerogenes
atggctgcgttccttgcatcccgtccgcaaacctacgacgcctacagtggagtaaggtgccatcccgtttcccacacttgcaccttacgtcaaggtcccgccccggggtatttcccctacaatacaatcccctctattttaatccctcttcgtaatttgaatatctctctataa

SEQ ID NO: 97408 - DNA, 285 bp, Enterobacter aerogenes
atgacagtccacgtcgttaaaaaaaccggcgatttcgttcttcgcttacgcgagaaagatacgccgaacgccatcagcggaatcacgctggacgcgctgatgacggtaacagggatgactaaaactgagttggcccacttggctcttcgtaagctggctgatgcctatctgccgcattacgaaaaagatgatggtccactcaccactgctcaaatccaggctattcgtgaagcctcaacggcaagcggtaaatcggaggagcgatttaataaaactcttttataa

SEQ ID NO: 97409 - DNA, 429 bp, Enterobacter aerogenes
atggcaactaccactaaaccttttccacaactgcctgagccaggtgattttgtatggtgtcgctttccacgcctgccaggattccctgatacaccagggccaaagctccgtccggcattagtcatcgcggtgtcggatgcagaccacgaagtgatggttgtctatgggacgagccagaagaccgataaaatctatccgactgagtttttactcaaaaagacagatgccggtttcgctgtatctggactggctcatgatacgaagttcgatatggcagttcgcattgagcttccctacgatagtgactggtttgatcttgctcctattaaaaatggggtggctacgatgtcgccggtaatgggtacactgcacacaacttacatggctgctgtgaagcaggccaatgcaaaagtgagtcaagctgcatag

SEQ ID NO: 97410 - DNA, 381 bp, Enterobacter aerogenes
atgtctgaaccacaaaagtctgaaccacaaaagtctgaaccacaaaacgggcgcggcgcgctcttcgccggtgggctggccgccattcttgcgtcggcctgctgcctggggccgctggttttgatcgccttggggttcagcggggcatggatcggcaacctgacggtgctggaaccctatcgcccgatcttcatcggcgcagcgctggtcgcgctgtttttcgcctggcggcgcatctaccgcccggcgcaagcctgcaaaccgggtgaggtctgcgcgattccccaagtgcgagctacttacaagctcattttctggatcgtggccgcgctggtcctggtctcgctcggatttccctacgtcatgccatttttctattaa

SEQ ID NO: 97411 - DNA, 1686 bp, Enterobacter aerogenes; identical to SEQ ID NO: 77387

SEQ ID NO: 97412 - DNA, 237 bp, Enterobacter aerogenes; identical to SEQ ID NO: 77389

SEQ ID NO: 97413 - DNA, 213 bp, Enterobacter aerogenes; identical to SEQ ID NO: 25793

SEQ ID NO: 97414 - DNA, 480 bp, Enterobacter aerogenes
atgcagaattcatctacgccgctggtgaaaacgcggcagggcacgttatccggcactaatgaacaggggatccatatctggcgcggtattccctacgcgcagccgccggtgggcgagctgcgttggcgttcgccgcagcctccagagcgctggcagggcgtgcgtcaggccgatacctttgccgccgccagctggcaggatatagagtattgtcgtgaacttggcggcggcgatcctggccgtttctcggaagactgtctctatctcaacgtgtgggcgcccgccgcccgctcgcagccgctcccggtgatggtctggcttcacggcggcggctacaccattggcgccggcagtctgccgccctacgacggtagcgcgttggccagccgcgaggtggttgtggtcaccgtgaactatcgtcttggacacctcggctttttcgcccatccagcgggtgatgctgccaacttactgatttag

SEQ ID NO: 97415 - DNA, 345 bp, Enterobacter aerogenes; identical to SEQ ID NO: 88727

SEQ ID NO: 97416 - DNA, 1434 bp, Enterobacter aerogenes; identical to SEQ ID NO: 88728

SEQ ID NO: 97417 - DNA, 996 bp, Enterobacter aerogenes; identical to SEQ ID NO: 86712

SEQ ID NO: 97418 - DNA, 828 bp, Enterobacter aerogenes; identical to SEQ ID NO: 86713

SEQ ID NO: 97419 - DNA, 1479 bp, Enterobacter aerogenes
atgttgctgtcctcgacgcgtaaggactggctgggtaacgtccgtggtgacgtactggccggtattgttgtcgcgcttgcgcttattcctgaagcgatcgccttttccatcatcgccggcgttgacccgcaagtcgggctctactctgcgttttgtatcccgctgataatcgctatctgcggtgggcgtccaggaatgatttcttcgtcaaccggcgcgatggcactgctgatggtgacgctggtgaaagaccacggcctacagtatctattggccgctactgtgcttactggtgtgattcagcttattgctggttatttaaagcttggcagtctgatgcgttatgtttcgcgctcggtggttaccggttttgtcaatgccttggcgatcctgattttcatggcgcagttgccggagttgaccaacgtcacctggcacgtttacgccatgacggcggccggtctaggcattatttatctgttcccgtacctcaataaaaccatcccctcgccgctggtctgtatcgtcgtgctgaccgggatctccatgtggctgcatctggacgtacgcaccgtcggcgacatgggcaagttgccggacagtctgccggtcttcctgttacccgatgtgccgcttaatttcgataccctatcaatcattctgccttattccgccggccttgctgtggtggggctgcttgagtcgatgatgaccgcgaccattgtggatgacatgaccgatacgccgagcgataaaaaccgggagtgtaaggctcaaggggttgccaacattggcgctgcatttattggcggtatggccggatgcgcgatgatcggccagtcggtgatcaacgtgaaatccggggggcgtgggcgtctctccgcactctccgcaggcgtcgtcctgctttgtatggtggtcttcctgcgtgactgggtttcgcagatcccaatggcggccctggtagcggtgatgatcatggtttctattggcaccttctcctggcgctctattaccaacttgcgcagccacccactgtcaaccagcgtcgtcatgctggctaccgtagtcgtggtggtagcaacgcataatctggcgtatggcgtattgactggtgtgctgatcgcctcactgaactttaccagcaaagtgtcccgttttatggcggtgtcatccgaactcaaagcgtcaacgcggacatacgccgtaaccggccaggtgtttttcgcctctgccgatcggtttatgagccacttcgatttccgtgaagcggtggagcatgtgatcattgacgtctcgcacgcccacttctgggatattacgtcggtcagcgcactcgacagagtggtcattaagttccgccgtgaaggtacggatgtagaaatccgtggcatgaatcaggctacccgcaccattattgaccgctttggggtgcatgacaaacccgaagaagtggaaaaattaatgggcggccattaa

SEQ ID NO: 97420 - DNA, 258 bp, Enterobacter aerogenes; identical to SEQ ID NO: 86715

SEQ ID NO: 97421 - DNA, 573 bp, Enterobacter aerogenes; identical to SEQ ID NO: 59972

SEQ ID NO: 97422 - DNA, 159 bp, Enterobacter aerogenes
atggtcgctatgttgcagaacccaatgacgtgcagctggcgcgctattttcatcttgatgagcgggatcttgccttcattaaccagcggcggggaaggcataaccggctgggaattgcgcttcagctcaccaccgcccgttttctgggcacctttctga

SEQ ID NO: 97423 - DNA, 228 bp, Enterobacter aerogenes
atgttctccggctggcgctgcctggaaatgcaggtcgcgcaataccgccggaagaaagcgctttacccgcccgtactgctccaccatttcgtcatggaaattgttgttctgaggccgggccagctcatttaccttgctgacggattctgccagcctgcttttcggtatgctgttgaatatggtctccctcagttcagcatcgtcagcctgttcatccagcaacaatga

SEQ ID NO: 97424 - DNA, 1530 bp, Enterobacter aerogenes
ttgcagggggaagaatggcaggctcagcgggtccccgtttgccgggcgctgggacatcccactgatggacataaaggcgtgcaacagttggcggtccagctagatgaaacctggaaaaccgtcgcatcccgctttgaaggaaatgcggaggttcatatttgccatgacggtaaacatccttccctgactatcagcagcctggagaaactggaggagccaccatcgttgcatcgtctcaacagtcgggtaaggctgctactcccgccagtagatttgacggaactgttgcttgaaatagatgccagaacgggatttacacgtgagtttacgcatgtcagtgaatccggggcccgggcacaggatctgcacatcagcctgtgcgcggtcctgatggcagaggcctgcaatatcgggctggaaccgctgataaagcacaatataccggcgctgacgcgccaccggcttagctgggtaaaacagaattacctccgggcagaaacgctggtcagcgccaatgcccgcctggttgattttcagtccacactggagcttgctggccgctggggtggtggcgaagtggcttcagctgatggcatgcgctttgtcacgccggtgaaaaccgtcaattcaggacctaacagaaaatattttggttccggacgtggcatcacctggtacaacttcgtctctgatcagtactctggattccacggcatcgttgtccccggcacattacgagattccatttttgtgctggaaggccttctggagcagcagacagggctgaatccggttgagatcatgacagacacagccggtaccagcgacattatttttggcctcttctggctgctgggataccagttttccccccggcttgccgatgccggtgaagcggtattctggcgagtggataaatcggcaaattacggtgcactggacgaactggcacgtggttgtgccgatctgtcgaaagccgaggatcagtgggatgagatgatgcgaaccgccggttcgctgaaactgggcaccattcatgcttcagaactcattcgctctttgctgaaaagctcgcgcccatcagggctggcacaggcgatcatggaagtggggcgcgtcaacaagacgctgtaccttcttaattatattgatgatgaggattatcgtcggcggatcctgacgcagctaaaccggggggaaggccgccatgctgtggcgagggcgatctgctacgggcagcgcggtgagatcagaaagcgctatcgtgaaggtcaggaagatcagctgggggcactgggcctggtcactaacgcagtggtactgtggaacacactttatatgcaggaagccctgagctggatacgcagtaatggagaagaaatcggggttgaagatatcgcccggttgtccccactgatgcacgggcatatcaatatgctggggcattatacgtttacgctaccggaggatattttgaagggggaactgagagaactaaatttcaatttaaacaatgaattaacttcttag

SEQ ID NO: 97425 - DNA, 828 bp, Enterobacter aerogenes
atgtcacagcttagttttattgatgttttcgatatggcgagagagacgccacaacctgttgaaaaatcatgccagccagaaaaggcacatttttcggctgtccataacctgatgacggcccagtacaaccggaataaatttgtcagcgtatttaaagatacgggccgacatcgtcaccgctgggaagtattcagcgattttctggcgctggctgcaagtgagcttgatattgccgggatcagaacgccgcaaagtatcgagcgatgccggaaaatatgcgaacgttacgagccatctgatatcgagaagatgcatgaactctttagtctgatggtatccgcgcttgaggcaaagtttcatgattttctgggagcaatatttatggaactggaactgggtgacggaggaagagggcaatattttaccccttacagcgtccagacgctgatggccagaatgctgatgccaggtattaccgagactatcaggcgcgaaggcatcattaccgtcagcgatcccgccagtggttccgccgggatgctgatagcctatgcagaatgtctgcttgaagcggatattaatccttcagtgcatatgtttggtagctgtatcgatatcgatccggttgccgctgatatggcatttatccagctttccctactgggaatagcagctgaggttatcaccgggaatacactcacaatgcaattaagtcggttacgctatacgccagtgtattacctgaataacttcgaagaaaaactagcaagccaggcgcgcattaaagcgatgcttaactttatccgcgggatgcctgaagctgcgtag

SEQ ID NO: 97426 - DNA, 147 bp, Enterobacter aerogenes
atgcaatttgaccctcaaatcgtcgcacaggcgaacgagtttgtaaatgccttgcgtagcggtaagcgcgcccacgttccggcaatgagcctggaatactggcagcagtttatgaccaccgtatacgcaggtctcggcctcgcgtga

SEQ ID NO: 97427 - DNA, 348 bp, Enterobacter aerogenes
atgtacttacaccttactgaatcatctgctgttcccggtatgcaggctactgccgaagctgaacgcgcgtactggctacgccgtcaggaacaggccgtaacaaagccttctgaaattgacgtgcacgcctttcataacgcgctggggctgatgtatccactgaactggtcaacaagtgaaaataatgactgggagacgttcatgatggcggaaatgacttgcggagaagtgaccgaaatttatgcccggactggtgcgcgatatttccggtttcgggatgtatgccgcctgagccatgcgcaaattaaaacgcgcattaaggaggaattcaacctgtttcaaaaatga

SEQ ID NO: 97428 - DNA, 396 bp, Enterobacter aerogenes
atgagcacacaaaacgacagcgtaaaagccgccaccagagaatctgccaaaagatgggggacagacccgaaagcgcgtctggcctgtgttatagcggaacaaaaggcatatctggccgagctttgcggcattaaggagattcagctgattgagcatgaagaggctgaggaaatcagcgacatcctgtgcgccatgagtaaaaacgtctggtatgagggagttctggactggatgcgcgaaaagcctctgctgtcatttcatgttgttcagccctggttacaggctaaagcatatgccgtccagctttatggtgaaacggggttggctgcgtggacgtatgcagataagagccttaaggacaacatgatttttgaacgcgccatgctggcagagtaa

SEQ ID NO: 97429 - DNA, 1167 bp, Enterobacter aerogenes; identical to SEQ ID NO: 91872

SEQ ID NO: 97430 - DNA, 570 bp, Enterobacter aerogenes
atgataaagcatatccgtatttttcccggcgggctgacggtgctggccgccgtttttctctgcctgctgacggcctgtcgcgatcacagtcgcgacggcatgagcgccgccgacatagctgtcttaaaccacggcccggacgctatcgtttcggtggaggtcaacggctacggcgggccaagagcgaactcctacggcggcggcggcggcttctgctgcgtgatggtgccagatgtctggcggccgggcctgacggcaaaaatcacctggacctctgaccctaactcctggatgaaatccagtgagatgccggatgattatgaaactcactatcagcgccatgggccgatcacggtgcctattgaacgctgggaggaggatcaggcctgcggctttgatatccatattttcccctgcgataaagtgcggatagtgcgttcctgctatggtcgagcggcccctgaatacccaatacagcctgaccctgacggaaataaaaaagcacaaaatatactttataatcacgttaaggagaacatcgtatgtccgacaccgcagactccacgttga

SEQ ID NO: 97431 - DNA, 1005 bp, Enterobacter aerogenes; identical to SEQ ID NO: 91873

SEQ ID NO: 97432 - DNA, 843 bp, Enterobacter aerogenes
gtgaatgactttattgaccgcggccgcgtgaagaaagtctatgttcaggccgatgccagtttccgtatgctacccggtgatatcaataacatgtatgtccgcagctctaacggtgaaatggtgccgttctcggcatttgttacttcacgttgggtatatggttctccgcgtctcgaacgttacaacggcctgccttcgatggaaatcctcggcgaagcggctccgggtaagagtaccggggaagccatggccttgatggaacaactggccagtaaactccctgcgggtattggttatgactggacgggcttgtcatatcaggaacgtttatcaggcaaccaggcgccagcgctatatgctatttcgctgatagtcgtcttcctctgcctggctgcactctatgaaagctggtctattccattctcagttatgctggttgtgccattaggggtgattggcgcattattagcagcctcacttagaggattgaataatgacgtttatttccaggttggcctgttaacgactattggtttatctgcaaaaaacgccattcttattgttgagttcgccaaagaccttatggataaagaaggcaaaggtattattgaggcgaccctggaagcatcccgtatgcgtctgcgccctatattaatgacttcattagcctttattctcggggtcatgccgttagtgattagccacggcgctggtagcggcgcgcaaaacgctgtcggtaccggtgtgatgggcggtatgcttaccgcaacgctgctggccatcttcttcgtgccggtgttctttgtggttgtaaggcgtcgctttacccgccacgcagaataa

SEQ ID NO: 97433 - DNA, 570 bp, Enterobacter aerogenes; identical to SEQ ID NO: 91932

SEQ ID NO: 97434 - DNA, 735 bp, Enterobacter aerogenes
atgtttttgtataaccgctgcgacacgtcgaaaagcgccttattgcgcgcttgttcatccagcgccagcttaccggcaaaaacatcgttaatgcccttaataacggtctcctgttgcagatttaaccctttcgctgcctggctggacagcgttttaagcgcatcttgccctattgatacaccgacggagtatgcctgctgctgtggggcattactgaggtttagcgcggatgatttggttgccgcggcggtggtttttactgcggcgagttcggcgctcagtttctgtttctccgccattgccgcagccagcttgtcgctcagggcctgcttgtctctctccagcgcgttgagctttaccgtttgcgtctgcagagaggcggcagagcgtttgagattatctgcgccctcggctttttcctgctggacggtgcgggcttgcagaacaagccgcttgttttccgtgtccagcgtggttatccgaccctggagttgtgcgatggttttattcaacgctgaattatctaccggcgctggcgtgacggcgggagattgtgattttagctgtgcctgcagctggtggatggtcttatctttgtcggcaatgagacctttttgtgcggccagttttttttgcagcgctgccgtgttgttgtcgcgggccctgacgggtttactggcctccggcgccggaggtatttctttcttctcttttttctcctgctgctggacatag

SEQ ID NO: 97435 - DNA, 1065 bp, Enterobacter aerogenes
atgaagatccttgttaccggtggcgctggttttatcggttctgctgttgttcgtcatatcattgaaaatacccgggatgaagtccttgtcatggactgcctgacctacgccggtaacctcgagtctctggcgccggtggctggcaacgaacgctactctttcacccagaccgatattactgattcggctgctgttacggcgcagttcaatgccttccagccggatatcgtgatgcacctggcggccgagagccacgtcgaccgctctattgatggaccggccgcgtttatccagaccaacctgatcggtactttcacactgctcgaagccgcccgtcagcattatgtgtcgctttctgatgagcggaagcaggctttccgcttccatcacatttccaccgacgaagtgtatggcgatttgcatggcaccgatgatctgttcaccgaaacgactccttacgcgccaagcagtccgtattccgcctccaaggccggcagcgaccatctggtccgcgcctggaaccgtacctatggcctgccggtggtggtgaccaactgctccaataactacggtccgtaccacttcccggaaaaactgatccccctgaccatcctcaacgccctggcgggtaaaccgctgccggtttacggcaacggcgagcagatccgcgactggttgtatgttgaggaccatgcgcgcgcgctctataaagtggcgacagaagggctgagtggtgaaacttacaatattggcggccacaacgaacgtaagaatatcgatgttgtccgcactatctgcgccattctggaccgcgtggtgacggagaaacccggcaatattaatcagtttgctgaccttatcacgttcgttaccgaccgtccgggacatgacctgcgctatgccattgatgcggcgaaaatacaacgcgatctgggatgggtgccggaagagacctttgaaagcgggattgagaaaacggtccactggtatctgaacaaccagacctggtggcagcgcgtgctggatggctcctatgccggcgaacgtcttgggctgaataaataa

SEQ ID NO: 97436 - DNA, 570 bp, Enterobacter aerogenes; identical to SEQ ID NO: 91943

SEQ ID NO: 97437 - DNA, 126 bp, Enterobacter aerogenes
atgtgtacttttaaattaactcatccactcagtgtggaatactccatctttatctgtgcgcttataggtgtgtgctccaaaatagtcccgctgagcctggatcaagttagctggaagtacagctga

SEQ ID NO: 97438 - DNA, 1002 bp, Enterobacter aerogenes
atgagccgttaccaaccgccatttagcattacacccacggttctcaactttgtcgttgagataggggaattgcttgggcattggtcggcgaaacgtggacaaacatcgccgttgctgcgtaaagaaaaccgcattcgcaccattcaggcgtcactcgcgattgaacataatagcctgagcatggagcaggtaacggcactgctggaaggcaaacgggttctggcgccggcgaaggatattcaggaagtgagaaatgccattcgtgcttatgaattaatgcccggatggcataaggcaaatattagcgaccttctggcggcgcacaaaacgctgatgatagggttggtggatagtccaggtgttttacgtagcgggaacgtgggcatttaccgtggtacgcaggtggtacatatggctccgcctgctacacaggtcccgaggcttatcgcggatttgctcagttggctggaacagaccgatcttcatcccttaattgccagttcggttttccactatgagtttgagtttattcatccttttgctgatggcaacggtagaatggggcgtttatggcagacgttgattctaagccagtggcgtcaggaattagcctggctgccggttgaaacgcttatccatcatcagcaagagcgctattacgaaattttgggtttatgcgacaaaaccagtgattgcactctattcgtgacctggatgttgcaaaatgtcgtggcggcgctgaaagaaggtctggagacatcattcgtcgtgtcggaagaaatgtcggaagaaatgtcggaagaaatcgacgcgaaattaacggaacaggaagtctcaattctacgtttgcttaccgcaaccccggatttgacggcgagagcgctcgctgaaatcctggggatttcagctcgaacggttgagcgctatctgcaggggttacaggcgaaagggaaattgattcgcacgggcgccaaaaaaggtggaaggtggctggtcaagtag

SEQ ID NO: 97439 - DNA, 510 bp, Enterobacter aerogenes
atgttaaagtgttggccgttattattgctgttgttgagctgtgttacttatgcgcaaattccgcaacggtcagtagaacaaactatccgccagatctatcagggctatgccgaagatagccagacccctgtcgccttcagcgacatgagtgagaaatcaattatctcttcacggatgaaaaaagcgctacgaaaaagcgaccagttcatacttcccggggacatcggcatactggatttcgaccctatctgcgcctgccaggactatcaagacctccggattgaaagcattcgcatcattgatgaaagtacacgccatgccagagctgaagtgcgttttcgtccttttaaagagaataatgacagcactacgctaactctggatatggtggctgaaaataatcgttggttggttgacgacgttatcaatgaaggaagcagcatttatcaggaaattgataccagcaatcggcgaaacgaagcactgcttcgctcttatcaacgaaaatga

SEQ ID NO: 97440 - DNA, 411 bp, Enterobacter aerogenes
atgagtaaattaatttacgtgactcttttagctatgtcttgcctcatcacttcaggatgtgatgatacaaaccagccttctgaagatgatatttcagcggcaatatccgcgcgttttaaggctactgatgccctgcttaacggcgcagcaaaatatagagccaataacattaatcgattagcatttgtaaaagtcaagaagctcgaaaaatgtaaatctgacagtaaaaatactcagactgtaaattgtcctgtcgaaatccagttcaaaagaggggctgctaaattatttgataatacctacgcgagcgtcctgaatcttgacctgacgaaaactgatggtaagtgggaatgcgatccacgattaaccgcgcagctacagttagccgtcattttagggcagcagcattaa

SEQ ID NO: 97441 - DNA, 534 bp, Enterobacter aerogenes
atgccaactatcatcactcatgccgctgttccactgtgcctgggattagggctgggacgcaaaattattcccccgcgcctgatgctggccggcgtagcgctggcgatgttgccggatgccgacgtgctggcatttaagttcggcgtcgcctacggcaacgttttcggccaccgcggatttacccactcgttactgttcgcgctggtggtacctttgctgtgtctggcgatagctggcaggaaatttcgctgcgggctggtgcgcagttgggcgtttcttagcgtctgcctgttatcacatagcctgctcgacgccctcaccgacggcggcaaaggcgttggctggctgtggccctggtccgatgagcgcttcttcctgccctggcaggtgattaaagtggcgccattcgcgctatcgctttatgccacgccttatggccatcaggtgatcctctccgagctacagtgggtctggctgccggcaagcgtactggcgttactcctctggttatatcgtcaatctattcaacgttaa

SEQ ID NO: 97442 - DNA, 432 bp, Enterobacter aerogenes
atgcgtaaaacgaccatcctcgccgcagcattgctggcaatttcgtccatctctcatgccgatgagcgtaccaccgccgtctatgctctctcttcaggaattgccagcatcggcagttcggccctggtgagcggtattattctctcgccggtcatggtccccgtcgcactgatcaccgcttctgtcgacaaaaacaaaaagcaaaaaaccgcgctgctgaccaccaaagatcctaagcagaacaccgttaaaatggtgctgccgctgcaggcggtcgaagaggctaatctcaaaaccggggataaactgacgctggagaaagccccggaaggcaccggcgcattgctgaaaaaagaagataaggtcctggcccacatggtgaatcaagaggacgcgtcgctctccgctaaccaaccgctgtcggcgaaatga

SEQ ID NO: 97443 - DNA, 825 bp, Enterobacter aerogenes
atgaagcgcctggcgctcgccttatgcctgggggcagcatcgttaagcgtgacggctgccagcaccgattgcggcgctgggtcgccatcggcagaaactatcgccgccaccatgcatcaggcgcaacggctcaaacagcaattgaacagcgagccggagcgggtggttattttagtgcgccagggtcaggatatgtccagccgcgggctgacctggtctcacgcaggttacgccctccgacaggccgataatagctggcgggtgtaccataacctgaatacctgcggtacggcgcggtcagcgctgtacgtacaggggctttatgagtttctcgccgatgaactggttaaccagcagatagcggttttacgcccgcgcggcgaacttaacgccgccttacaagaacttttacaaagtcctgtcaaactgaacctgttccacagcgcgcggtataacctgatcgcctggcccttctccgggccgtatcaaaactctaacggctggctgctggaactcttcgcccgcgccaacgacggccatatctggtcgcgtcagcaggccagagactggctggcgcaggagtcgtaccaaccctcgctggtcgacgtcacgctttttgagcgcctgggcgcgaaggtggtggccagcaatgtttttaccgacgatcagccggatgagctattggcgcaaggtaaagtgggtttaaatagcggcgatagcgtgattcggtttatcgcgcgttacagccgggcgatacccggctgtcagcatctgaatctacccgactctgtttgcgtttttatacctgaacaccaggttcaataa

SEQ ID NO: 97444 - DNA, 2169 bp, Enterobacter aerogenes
atggtcaggaagacaacctttaatcttacactgtgcgctctgctggtgacggcccctcaggcgtttgcttcttctgatatcgaagattgctcctggagcgacgcgctgtgcctgctaaaaggcgaccctgtattgacgccgggaaacgactcgcgcgacaacctgctgcgcctgctaagcgaagagaaatctttcgtcctgcccgttcagaacattcccgccgatgtcagccgctcacgcgaggtttacttcgcttatcatcctgagtgggatagcgcgccgccgcctgccgcaccgcctgcgcaaagcgaagacgaaacctttacccgacaaatggcggcgctgaatatcgatcccgcacgggtgatgccaggcgattcggctgaacggctgggaacctccgactatgaactggaaaaccgctttgtcagcaacacccttgccgccgtcagccagttcaacgccgccctgctggccgccccctctgtgacgccacagcagcgtcatgacctggcgctggcgcggctgaaactgttttatggcgccgatatcaccgcagtccttgatattctcaatagcttcccggcagatacggacgccgacttattcgcttattacctttccggcatcgcccacttctatggcggcaattaccccgccgcaacccaggatttcaccctgttgctgaaaagtaagcaaccctggctgaccgagaccgcgcaatatatgctgatgcgcacggcgctcaacaagagtagccagaatagcgttgggcagtacggtgattttgatatcgcgcgcatcaatcgtgaagatgccgccctggcgcaaaaagaggcgcaaacttacttgcagcgctggccaacagggttgtatgccgattccgcgcgcaatatgttgcgccgcattaactggtatctgcaggcgtggccacagctggctggtctctatgaacaggccttccagcaggcgagcgatgccggagaactgcgtcgtttggtgagtgaatatgataatgtcttcggcatgccgttctacgaccaccccattcagacggcattccccgatgcgccgcaggttagttatgtcgaacttctgcgcgccctgcgcctggatgccaacagcaaaccggccttaacccaggcgcagttggacgccagcaaagcggcgtttgagaagagcggaaagctgccgctgtggcgcaatctgcagctgcagctatggaatgcaacaggcaatgatgccgccatcctgcaggcggtcacgccggcgaaaacgctgccggcgcacgatattctcgccttcagcgaacaggtcctctacggcgaagcgctaatggcgcaaaagcagtggccggcagcggtcgatttttggcggcaactgctccaactcagccaggaccgcgagcaacagcagtttatccaggcgaagctttctgcaacgctggtctacagcggtgacgctgcggcaatctttgccgccgatagcccggtgaccaacctgcgctttcgctcccgcgtgctgaaaacccaggcctcgcctgaattgctacgccagcaggccgtcagtggccccaataatgaagagcgtaccatcgctctgcacacgctgctggtgcgggatctcaccgagaatcgctttggcgactggctgaaagacaaaacgctcgctagcgccattacccaaccggttatcagcgaggcctttaacgacgtcaacctgagtagctttgactggaacggcaaggcgactgaagcaggctatgcctgccgcagtctggatgaaaccgtcaccgcgctcagtaaacacgctgacgatgcccatgcgcttaactgcctcggcgagttcttccgcaccacccaaacgcatgttgacctgtggaaagatggagccggcaacgatgtactggaggacgccatcaaccgccagcagcctgtaggtcaatacgatcggcaaagctattaccagcagattatcacctcgccgaaagcggagccggaagataaaagctatgcgttgtaccgggcgatcctctgttacgctccctccggtagcaacgagtgcggcggcgaagatgtcgataagctgcagcgtaaaggctggttcacacagttgaaaacgcagtatccgggaagcccgtgggcgcaaaaactcaaatactactggtaa

SEQ ID NO: 97445 - DNA, 717 bp, Enterobacter aerogenes
gtgggcgcaaaaactcaaatactactggtaatcgcgctactggtcggccccgcgcaggcaacggagcgcgttgacgcgcgccagcattccgctttctggctgtggtccggggtgaaggccggtgacgaactgcgaaatgcgcaaacggtctacctgcatcagggcgaggtgctcaagcaagcgggcgaggtggtatttcaacgcctcggcctaccggtgagccgcctgacgtttccctcaatctggcttaccgttcgctttaccacacttgatgtgccgccgacgattgtgccgcgcatcgtgcgcctgatgcaacgttggcagacggcgggcaatcaggtggttggcttgcaaattgattttgacgccggcacttatcagctcgccgattacgcccgctttttacgccaactgcgccaacagctgccgcccgagttcgcgctgggggtaactggcctgctggactgggccaaaaccggcgatattgccacactcaatgcgctggcggtggatgaactggtggtacaaagctaccagggacggcgcacggtgacgaattatcaggattatctgcccgcgctcagccgattgcgtatcccgttcaagctcggactggtccaaaacggcagtcgcgacaaactggcggaaacccagttgcaacgctccccctactatcgcggtacggtggtctttatgctcaacccagcccggcattaa

SEQ ID NO: 97446 - DNA, 1539 bp, Enterobacter aerogenes
atgaacacaggaaagtggatcctcgcgaatgccctagcattgctgctggctattcccctgctggcaagcatcatatttggtgttctgctttggcaaatagattcaattatctttattaacaccgctttcagcctttatcttgcggccattgtggctggcgctgcgctgtttgcctggctacagtaccgtattgtcgataagccagtgaccttcataaggcgatacttacccggcttatttttactgctgtatctgctggtcgtttactttattgcgttgatatccgcggcgggggaaacgacgagccagcggtttattcatccctatttattttggctttggccgtttacgctctattatattcccctctcttttgccagggttgaattcgattttccaccgccgtgggaatatggcgcattgttaccgctggcttcgtggctgggtttgctctcctatatgttggcattggcatggtttactcgtcgccagccggttttgacagactcttcacgcaagcgaatcgtattaacgctggcggtgttgatgaatatgctggttatgttgacccttgtctggcaatggcatgaacgccgctcgcgattagttgtggaaacgccgtcactctcactcaataccgagattgcggagtgggagtatgcaccttttcgcagcgataataagcttacgatcccccggcaaaagaccgcattacagatagataacgactggccgcgcctgaatggttcacgtctcttttatcccctctatggcgctgcggcgcaggcgatttaccgtcatcaggatgcttttactattagccagtatgtccaaaccggcgatagccaatcagcgtataacgctttgattaatggtaaagccgatctgatcttttccttccaaccctccatggaacagagagagcaggccaggaaaaggggagtggtattgagcatgcacccgttagccctggaagcccttgtcttcgtcacgcatcaggacacttcgataaccaacctgacgcaggatcaaatccagcaaatttactccgggaggatgaattactggtatcagccaggtaggccagatgcgcgtatttttccttatcagcaagctgacaaatccgatagccaggcggtgatgaaattattggtcatggaaggtaaagcgttgcgtaagccgctagaggcggaggggcgaggggggaagtacaatattttccggcgggtagcgcactaccaaaaccatccagatgcgttgggatacacttttcgttatccgatgacgcaattaaagcaggatagtcatctgcgcgtcatgtcgattgatggcgtcgttccggacgatgagaatattcgcaacgggcattatccgctggcgctaaaaatatatatggtcacggcagacaatatctcgcccaacacgcagcggcttatcaattggttgcaaagccctcaggggcagcagttgattgcggacagcggctaccttccgctcgacggggcattaatgaaagccgccttgcctggcgatagataa

SEQ ID NO: 97447 - DNA, 1353 bp, Enterobacter aerogenes
atgaaagtgtggccggcgtcattgcagtcgcgcttaatgataatgatttttctcgctctgctgctcgctaatgccctgacgctatcgcttctgctctacgagcgcatgagcagtgcccgtagcgtcatgctgggcaaccttgaatacgatgtcgccaccagcgtggctatccttgatcgtcttcctgcgcaagaacggccgcattggttggcgcgtctggcgcgcggtaactaccgctatcagctttcagccggacaaactggcgattatcccaccagctggcgtacccgcgatgcggtacgctcgttacaggaagccctgagcggtcgctatcctgtgagtattatcgccgtccctggaccgcgcgaacatattcaggcccacgtgaccctgcgcgacggcgcgccgctaagcattgacctgtggccaaagctgccggccatcgcacgttggctaccgctggtgctggtcgcgcagtttctgttactgctattttgcgcctggtacgccgtccgccaggtggtcgcgccgatgacccgctttacccgcgccgttgatacgctgcaaccggctactccggctgcagggccgctggccgagaagggaccacaagaggtgcagcgcgcggcgcgcgccttcaacgcgatgcaaaagcgaatacaggaccatttgcaggatcgcgcgcggatcctggcggcgatctcccacgatttgcagacgccgattacccgcatgaagctaagggtcgagatggccgatcaaccggcactccgcgataagctgttacaggatctcgatagcatgacccgactggttcgcgaaggcatcgcgctggcacgagcggccgaaccgctggcagaagcgccgcagcggatgagtcttaatgcgttcctggatagcatcgcctgtgattatgccgatatcggtaaagcggtcagttttcgtgccggtaaaggggcggacgtcatgacgcttcagccgcaggcgctgcggcggatcatgagtaacttaatcgataatgggctgaaatacgccgaaaaggtggaaatcagcctgagttatccgccgaatggcgatgttatcattcacgttgttgatgacggccccggcatcccggaaggagagctcaccgccgtactgcagccgttctatcgcctcgagcagtcacgtaatcgcgataccggcggtaccggtttggggctggcaatcgccgcccagctcgccgggcagatgcagggaagtttgaccctgcacaatctgcaacagggcggtcttgaggcgcgcgtacgtctcaatgccgccgttttgtatccttctgtatccattccaactgcagataaatccatatactaa

SEQ ID NO: 97448 - DNA, 195 bp, Enterobacter aerogenes
gtgctcaaccgcgatcagttattgaatcttacccaggggcgtgatgccgaactgtttgaacggtctatcgatctgttggtgagccgcctgcgtcagcgcctgcgggaggacgcgcgtgagcccgcctatatcaaaaccgtgcgcagcgagggttatgtgctgtcagtgccggtgtcgatccgcgtggcgcgataa

SEQ ID NO: 97449 - DNA, 993 bp, Enterobacter aerogenes
atgaacagattatccgcaatccgtcatgtcagcgctgcggcgctgtgtctctccgcgctgtggtccgccagcgtgtgcgctgctgaagacgcaggcgctttcgataaggtgcaacaaatcaacgccggcgatttgaatatcggttatgtcgatatggggccacgcgatggccagacggtaattttgctgcacggctggccgtacgatattcaaagctacgcgcaggtggccccggcgctggcgcagaagggttaccgggtcatcgtgccgtatctgcgcggctacggctccacccgtttcctgtcggctaaaacgccgcgtaacggtcagccatcggcgatggcggcggatattgtgcatctgatggatgcgctaaatattaagcaagcggatttcgccggctttgactggggcgcgcgtacagcggatatcgtcgcggcgctctggccgcagcgggttaagtcgctggtatcggtgagcgggtatctgattagcaaccagcgaattggcgagaagccgttaccgccgcaggcggaactgtcgtggtggtatcaattctactttgccaccccgcgcggcgaggctggctaccggcaaaatacccatgacttcgccaaatttatctggcatcaggcttcgccggagtggaaattcagcgacgcggtgtttgctaccagcgctaaagcgctggataacccggaccacgtagccatcaccatcagcaactaccgctggcgcttagggctggagcagggcgaagcgaaatatgcagcctacgaacagcgactcgagaaactgccggcgattagcgtaccgacgattaccatcgaaggtgaaagcaacggcgcgccgcatccggaaccggatagctatcgggcgaaattcaccggtaaatatgagcatcggaatttcaaaggcgcagtgggacataacccgccgcaggaggcgccagcggaatttgtccaggcggttattgacgccgatcgcttataa

SEQ ID NO: 97450 - DNA, 558 bp, Enterobacter aerogenes
gtgccgctgctggggacattgacagtaccgctgctcgccagtcggctaaaaaaacgccatgtctatctgattgccagtgctatcaatctcattggcatgatcgtgatgatggcggcaggggtaaatagctggggtttggttacgggtgcggtgatcctctcgctcggcgctggacaacgcacggctatttacttctcgatgcaagcggatccggtggattatggcgtctggaaaacgggaattaataccgctgggatcctcacctcaatcaatggttttcttggcaaagtgtccatggccggcgcaggcgcggttaccggcgcactgctctcttccggcggctatatcgccaatcaggcgcaaagcgaaacagccatgctggctatcaagtcctgctacctctatatccctgcgctactcatcctcgcctcaatgttgtggattggtcgtttttatcggcttgacgatcattacgagcagatacgcgcggacctcgatgccgggcgctatgcggcacccgatattcattcagcagacggagcacgtcaggcgatttaa

SEQ ID NO: 97451 - DNA, 606 bp, Enterobacter aerogenes
ttgaaagtgataattaatagtaaagatatctggtttcgtttgggtgttgaatgttgtttgcaacaagtctgtgcgggggtagacaaattttttaacgttggcgctgctagccgtaacgttgctatggacaacgcggacattatcattcttccgttgcatagttatcgcgattacaaacacttatacgaattatcaaatttatttccagggctcattttgggcgtgagtagttccagaaacattcggtccggtcggttgtattatcgtgggaacatattatgggtaagctgtcgtgaatcaataggaaatgtacagcagttattacatgcactgtcacacacgaaattgtatcgtcatgacggtaaaccagactttagcatcattaaagcaaaggagggtgttcccctgagcgagagagagatgatgattatcgatagagttgctgctggaatgccgatcacaggcattgccagagatttaggattaagggttaaaacaatatatgcgcatttggataaaataaaaggcaactttggcatccggggtggaaacaactttcatcgctttatgataagcccactttcatattatctgtgttggacataa

SEQ ID NO: 97452 - DNA, 399 bp, Enterobacter aerogenes
atgataataggtagtgcattacttggttaccaaataggggaggatgttttttacttcttgaaataccgagaaatagctactgtaagtggtatccgtaaaaacattcgcctacgtaagacaatggcctgtttaatcgaataccttttcgaacatggtcgggaacgcattgtaagtgatgaagagttaatggtgcatgtctgggaggcaaataatctaagaccatcctcacaacgtttatggcaagtaatgcagaatttacgccgtatccttaaagatatcggtattgcaaatgatgttattttaagggtgaaatcacaaggttattctataaatagctgttatgttacagggatttactctataaaaaacaatcattctgaacgcgtgccaggattataa

SEQ ID NO: 97453 - DNA, 1821 bp, Enterobacter aerogenes
atgaaatttaccccctgctgtatcccactccttatacttacgcattctgccatagctgagacgcgcaatctcaccctggattggcatttcgcaaaggatggcgataaaacagagtatttactggattggcctttaataacttctaaaaatggaactgcatttaccatacgagatactaatggtaatctccatttacaagcgacccttaaagatccgcataaaaaagagctgtttaccacggacaatgtgattggtaaatatcgctactattatccgagcggtaaattaaaaaaaacaggtcaatggaatgatagcgggagatctgttggtcttgaaacgaattattatttaaacggtcaaccaaaagacgtgaagcgttatctggctgatggaacctatatcagcgagaaaggtttttatgaaaatggtcagataagctatgagtggtttaacttcgatggcacacattacaaagaatataagcgttattcaccagacggcaagttaactgagcgaatgtataataaaaagcataactccgatatcaaagaagtcattgaaagttatgacagtcgacaaaagctagagtcgaggactgaaaaatacggaaccaacccacaagttaaaatgacttataacgccgagggtaaactgaccggaaaaataacctatcacccctctaccggcatagaaaaacaggagtcttttgatgaacaaggaaatttaaccgacctctctcagcgcaatattgatgatggataccacgcagaaggcctgcaaatcaggacccttgatggtgagacgacgtggtcacactacaaaaatggtgttttagaaggcgaatataaaaccatcaaaaatgggaaagtcatatccagtagagttttccaaaaagggaagccagtaggcacaggcctgcgccataacgaaacaacaggcaatattgattttgtcgaatatgataataatgggaaatacgtcacctcatattatgttaccccggactacattcgttatgatagagatgggatgccacagatacacttccctttcgattatagcgaaagaaaattaccaccggtcgatacaatatgggaatacactcttaacggcaaaactagcaaccggttacggttgacagcggtaaaaaacgacatcgccacttaccggttcgagaattccgtcataaaagaaagtattcgtgactatacgttctttaaagctgaccacaaaacaccttccaggcgtattttttcattcccgttaacgccagggaagagctggcgtgaaaatataaagagcgtggtaaaagcgcctattggtaataaagaacagtggcaatatacctacacagcggaaacctattcgctggttgccggtgtagcaaaaatcaccgtggcggcaggtacttttgacactctggtcattgaaaaaaccagccactggaccaagtcaaatccagaatggatttctcactcaacgtccaaaatgagatgcgtaaccagcgattgcgagatttccggggcgacaaaagagatcttttggtacgcccctgccgccgcacgcgtaatattaaaatcggcgcaaacaggtagcaaagcgagttatcttccaggtgatagcgattacctactgaccagtggacaaaaaacggtgatgaccgagttaatcggctttggtatgttaccggaaaattctattccgccggaaaaagcgagatatgctcacccactcccaccctatgcgctgagcttagggtttcccctgctgccgaatgatagctgggagtatatgatgatcaataacctcaattttgaataa

SEQ ID NO: 97454 - DNA, 279 bp, Enterobacter aerogenes
atgaatagtaaaagcggagatctcgatctttttcaatccactaccccgcaatcgccacaagggcagtatttgaaatttgtgccaataaaatacgatcaactgtctaaaaattttattgtgcaaaatgatgacgctatcgatatactttggggccgtacggaaaatgaaaaaaaagagatctcttatacactgtctctgggtagccacgtctatccatgtggggtaattcaacaatggccaaatgaaaaagctaatatgctttatggtgaaaatagttaa

SEQ ID NO: 97455 - DNA, 1008 bp, Enterobacter aerogenes
atgtgtttttacggccagccgcgaaatgatgataatacgattcaatttagcactcataatactgacaccctattccaggttgcattggcacaactgcatgcggatgttcaaaaggtggcgtttagcgcaacctgcgataataacaggactatccgtgaattaggccatttgaccatcgcggtggagcagaacggcaatacgctaatcgaatgtagtgtcgatattcaaggccgagatgaagctgcgttgatcctgggggagctctaccggcgcaacggcgaatggaagtttcgttttgtcgcgcagggttttaccggcggcttgaaacctcttgctgaatactacggcgttgatattgccgatgagatgccgacttcagtacctgaagtcgcaaaagtgagcctgagtaaggtcacgttgaccaaagaaaaaccggctatcagtcttgctaaatgcgacgactatggcgaagtacgcgtcaatctgaactggcatcgccaaagctcggctaagggtttaattggttcatttttaggagcaggatccagcaatgttgatctggatatcggtgcttttgtcgaattaaaaaatggcgatataagcgtcattcaggcgctgggtaatgcattcgggcgttaccaccaggcgccatttattcagcttcagggtgacgatcgcacaggggcggttaacgatggcgaatggatctttattaacggcagtgaatggaaaaagatccagcagatattaatttacgcctttatttatgagggggtagccagttgggataaaactgatggcgtagtaacgctgcatgttcccggacaaccaccaatcgaaacccgactgaccgaaggtaataatcgccgaaaaatgtgtgctattgcccgtttaatcaatgataacggtgccataaaagttgagcgtatcaatcaatatttctccggccataaagagatggatcgcgcttttggctggggattccgctggcaagtaggttcgaaataa

SEQ ID NO: 97456 - DNA, 1086 bp, Enterobacter aerogenes
atggaaagaaaaatatggatcatggaaggactatcctcccagcgagatatcatttgtggaattaatgaatttgccattaacaataataaaaagcctatatccacctatgcctcacacggccattcacgacatgaaatattatccatggcggatttttcattcagtgaaccgaaagatattaattcacgaatatcatttatatcctcaataataaaaacccatagaatagccgcaattcaggttggaaaagcatgccgctggtacgaacaacaccggcagcagattgaatcgctgggcgtgaacctgactacgggcgccagccaggtctccacgtttgatattgccgatgataaagtcagctttgcaaaagccatgctcgcgcatggccttcccgtggtgccgtccatacgcgtcactgatgccaatacgcttgaatatctactgaaggcgtcaccttttcccggttgccgtttatgtgtaaaacccgtcaccggcatttacggcatgggattttggcttttagatgatcgctcgctatctacagatattattaaccatccggaacagcggcgtattcacccggaacagtatcttgccgcagtcaaaggcagcgatacctttactccgctagtactcatgccctggttacctgggccagaatactccgtcgatatcctgctcaatcgtggcaaagtgctgtgtgccattgggcggcgtaaagaaggcgcattgcagtatctggaaaatgcaggagcggctgtcgaacttgcctgcgcctgtgccgaagcgctgcaggctgatggcctggttaacgtacagacccgtcatgatgctaagggccagccacagttactggaaattaatcttcgcccttccggtggcattggctacacccgccatagcggggtgaatctgcccggcctgttcgctgcactgcgtcttgatttattaacagcggatgccattaaacaccacgctgcagaacgatttacccccgccgccatcagagtgataacagaaagcctgctatatcctccgcagctcgataacgccctcactccttcccaccgtaaggagataaaataa

SEQ ID NO: 97457 - DNA, 1128 bp, Enterobacter aerogenes
atgaaacgtgaaaactgctatcgtcgtcagctttccagcggtgaacttagggttttctaccacggcgaggaaaacgaactccacgcgctatttgatatcgccgagcggcgcaatcctaaacgtgcgtttctgttcgtcagccacgttttaggtcgacatattcccgtagcgcccgcgaccatgcgggcagtttaccagcgtcttgccgacagcttccctgatggcatcaacgggccggtactttttgtcgggatggcggagactgccgttggcctcggcgccggggtgttcgacgaactccgtgaacgcgtcgatcagccaatttatctcacctccacacgtcatccacagcaggcagatctgctgtgcgaatttaaagaagcgcatagccacgccacagatcatttgatttatcttcctcgcgaccgcgaaatgcggcgacgggtgctggaagctaaaacgctggtactcattgacgatgaagccacgaccggcaataccttcatcaatctccttgccgcgttacatccgcatcttgcgcatttacagcaggccatctccgtgacgctcacagactggagtggtgatgctttcgctgggcgttgtcatctgccggttagacagatcgcgttgattaaaggacgatgggaatggcatcagcgggacaacgccacagcgcctgagatgcccgctgttaatatcaccgcatgcggggaatatgccctttcgcagcgccaaacgtgggggcgtctgggaatgatccgcccggccgccgatctcggaagcgagttaactgccgatgcaggcgaaactattctggttctgggcagcggtgaattcgtctgggaaccctttttgcttgccgaacgtcttgagcagcaaggcgccgatgttaaatttagcgccgccagtcgctcgccgatagcgcccggtatggcgatccaatcgctgctgtcatttaacgataattacggtctgggcattcccaactttgcctataacatcgcccaccagcgtttcgatcgcattattttgtgtgtagaaaccccaaaaaatagcgttgaccccaatctggtccacgcgctggagtcgctttgtacgcgtctggagattttatcttatgaataa

SEQ ID NO: 97458 - DNA, 774 bp, Enterobacter aerogenes
atgaataagccggtgatattttccgacctcgacgacacattatttcagaccaaacgaaagatgaaacacgaactcgacgcgctcccctttcgttgtgccgccctggaccgcgatatgcagccccgcagctttatggaccaggaacaggccatgtttgtcgattggttgctggagaacgccgaactgatccccgtcaccgccagaggtagcgaggagttaaaacgggtgcaaatcgcgtttagttcgtgggccatcgccacccatggcgcagtcatcattacgcctgaagggctacctgacgctgcctggcaacagcatatgatgactcgccttgcgccctacgctgaccggcttaccgccatgcaacatgaaataaccgcccaaatggcacttcagggaatcaacggctgggctcgcatcaaccaggaatatgacggaacgcctgtttacctggtgatgaaacatcgcgacagcaccagagtcagcgagctttacgcctttgccgactggctgcagcagcgcttcccgcttgagggtttttattttcatcgcaacggtaacaacgtcgcctggatcccggagcccgttgataaggggctggccgtcggttggttattaaacaagttgcaggccgaacgcggaacgttcccggtactcgggtttggcgacagccttagcgaccatcgttttttacaactctgccattggtttgccgtcccccaacaaagccagtatgccagagccatcaatcagcacgttttcgcaggttcttaa

SEQ ID NO: 97459 - DNA, 948 bp, Enterobacter aerogenes
atgaaaactcgtctctcggcatggaatctgggagccaccctctacatgcccgctacccgcgatgatatcgcctcgactattattgctgacaaaattaaagggcttcgctcattggttatctgtcttgaggattcggtcagcgaaggcgatatcgacctcgcccagcagaacctgagaacgctctgtacacaactcgcccatgccaaagcgacgcagggaaacgatcgctggccgctggtttttattcgcccgcggcatctgaccatggcgcaacaactgatcgatacccttaatctgtcggccattgacggcatagttatcccgaaatttacgcaccattcactgacagcctggtggcaggttattggcggcacatctctatgcatgatgcctacgcttgaaaccgaggaagtctttgatagcgagaaaatgcgcctgcttgccgcggaactcagccagcacccctgccaggcgcggattattgccctacgcattggcggcaacgatctgatgaatgttatctcgctacgtcgttcgcgcaatctgacgctatacgatgggccaatgggttacgttatcaaaatgctggtgtcagtttttgccccttaccattttgccctcacggcgcctgtttgcgaacatatcgatagccaggagatcatggagcaggaactgcaactggatatggcccacggcctggtcggaaaaacggccattcaccctaaccaattgctggctattgagaatgcgttgatggtaacccccggcgaacacgcagatgctcttcgtatcctaaactccagccaggccgtatttaaatcgcagggatcaatgtgcgaaccggccacgcatcgcaactgggcagcggcgattctcgccagagcagcccattacggcatcgttaatgaatcctcacatgaggatttagccctgaattcgctgagttaa

SEQ ID NO: 97460 - DNA, 468 bp, Enterobacter aerogenes
atgagattaaatagcaaacaagagcgcatttttaaactggcgctgattctcggtcgcgggttgccggtgccctcatcagagctactggcaaagttaagttgttctgaaccaacgttatcaagaacgctgaaaacgctgcgcgatacctatagagcggaaataaaatacagtaaagcggctcatacctatcaacttaccgccaatggttccctgacggaggagatgaaggaacgaatggcagaaactctgcgtgtgaacggcagtctgaaaatgcaaacgacaccgggtaaagtggtgcttgataaggaccaaaagacggcaatttcgctgtcggtcaaacgctcggtgctacgtaaactggaccgtctggcccggctgacaacccttacccgcagcggagcggtggagatgctggtgcagcagtatatcgatgatttaattgatctattccgtaaccgcaaacgctaa

SEQ ID NO: 97461 - DNA, 669 bp, Enterobacter aerogenes
atgatctttaatagatgctttatattagcgattatcacaatattactttcgggatgtatgacacatcatctcgcggataaaatttcgcaaaaggagagcacggttaccaaagaaagagatacaatttatggtattggcgctgttgcggggaatactaaaacgcctgcgcaattaatattaatcggcaataactataattattctctggcagggaatgccgatattattgatggtgttctgctcaacccgaatatgatggctgatttcagggaacgttgttttacaatttcattaccgccaggggagacttcatccgaaaacagtcaggcatttagcctacaagagccagcagtgatacgttatttcaccaatgcagagtgtatgacagacaccaataaggatattttgcgacgccatggttttaaactcagcggtgaacaatggatatattcaatacaacaacaacgtggcgtgttcgacatagctgagaacaccacggcaagaataacattcttcccggtctcaatgacttttacccggaaaggttcatctttttctgcattacggtttttatatccgctgacgattatcgctgatgtagcaacgtcgccgctgcaactcattggttatctgtttatcggcccaaatatacccaacatgcgttattaa

SEQ ID NO: 97462 - DNA, 405 bp, Enterobacter aerogenes
atggctgcagacaatcaaaatggtctggtagtgcagtcgctacagcagcggctactgcggtgtaccttagccagcgcccgttatctattgttttttgctgttcctcccctgctatgggcggtgtttatcgcttcgccgggaacgctacgtacgattatcactctgttgtccggggtggtcggctacaactgctggcggctcgatctggatgcccgatattttgcagttatccgccaggataataatgcattagcgggcaaggcgttattttttatctggcggcgggagcggttacgggggttgagttttaccgatcgccagtatggcgttttacagcagtttcatcgcaccctggcgatagtggcggtcttgtgggcaatatggctgctggcgttgagttgctaa

SEQ ID NO: 97463 - DNA, 1311 bp, Enterobacter aerogenes
gtgcaaactgaacggcgttgggtattcgctcaggctgttgcctggctgctgttaatagcgccattctttttcctgacctatggccaggtgaatgcctatactgcctggcgcgctgcgcagcatcagaatattggcagcgtagtctttgcctgggaacaggcgattccatttataccgtggactattgttccatactggagcctggatctgctgtatggattagcgctgtttgtttgcgtcacgcgaaaggaacagcggcggctggtcttgcgtctggttctggcttcaacgatcgcctgctgcggttttttactttttccgctgcgatttagctttagccgtccgcaggttaacggcgcggctggctggctgtttcagcaattagaacagtttgacttgccctacaatcagtcgccttcgctgcacattatcctctgctggctgctgtggcggcactacagccgccatctttcaggctgcggccgaaagctgtgcggtagttggtttttgctcattggcctatcggttttgaccacctggcaacaccattttattgatgttatcagcgggctggcggtgggaatgtgtattgagtggctgctaccaatggagcagcgctggcgatggcaaaggcccgatgcgtggcgattgcgcctggccgtgcgttacgccctcggggctacgttgtgttttgtttcaggcctgctattaaccggatggctactatggccggcgctggcactgtcgctggtcgcttgtggttatgctggattaggggccgccgtcagcggcaaagatcagggtgggcggattgcgcccgcggcatggtggctgctattgccgtggcgctacgcaatgtggctatccatgcgctgttattgccgtcgtctgcctgcagcgagcgaaattacctcgggagtatggatcggctgctatccccgtcatcccccggttcaacgagctgtattagacctgacgtttgagttttctcgcgcccgcgcaaccgctcggcttgtttatcactgtgtgccgctactcgatctggtcacccccgacgatgctcaactcaatcttgccgtcgagcacctggaatcgctgcgtcaggggcagggtacggtcctggtgcactgcgcgctaggattatcccgtagcgcgctggtggttagcgcctggctgttgcgctacggccatgctggcagcatcgagcatgctctggcgcaggtccgcgctcaccgcccgcagatggtattgacagatcaacatcaggaggtgttacgccgatggctgcagacaatcaaaatggtctggtag

SEQ ID NO: 97464 - DNA, 1761 bp, Enterobacter aerogenes
atggttgagacccgggttgcacaagagcatacctttgttaccagcgatgatacctcgctgttttatcgttattggcctgcactacatccggcgacgaaccgaaaagtggtggtgctgtttcatcggggacatgagcattccgggcgcttacagcatgtcgttgatgagcttgatatgacggatgctgatttttatgcctgggatgcacgtgggcacggccgatcccctggcgaacgcggctatagtccatcgcttcaccgttcagtatgtgatgttgacgaattcgtgcgttttgccgcgatgaacagtcaggccggattacaggatgtggtcgtggtggcgcaaagcgtcggggcagtgctggcggcagcatgggtgcatgattacgcgccgcttatccgcgggctggtgttggcctcgccggcctttaaggtcaagctgtatgtaccatttgcccgtacaggtctgcgcttgctgcaaaaagcgcgtggtctttttttcgttaactcttatgtcaaaggaaaatatctgtcgcacgacccgctccggattgtcagttttaaccaggatccgctgataaccagggcgattgcggtcaatatcctgcttgaactttatggcaccgcagagaggctggttagcgatgccaacgccattaccaccccgacgttgatgctggtctctggggatgattttgtggtgcatcgccagccgcaactggatttctatcaacgtttacgtagtcaatacaaagagctgcatatctttccgggcttttatcatgacactctgggcgagcgtgaccgtcatctggcattcgataaaatgcgggcgtttattgatgaacgttacgcgcaacctgtaccgatttttgattataccggggaagatcgccatagccccggagccgatagctggcgactactgagcggcgggccggcgccgtactccttcgacgatctgcgctaccgcgcgctgcgctatagcatgcgggcattgggcacgcagtctgacggtataaaattaggttttagtaccggattcgactcaggcagcactcttgattatgtctaccgtaaccagccgcagggcagcggctggctggggcggcaaatcgataaaaattatctcaacagcatcggctggcgaggcattcgtcagcgaaagatccatctgcaacagttaatacagcaggcggtggcccgattaagcgaacaggagagcccggtcaacgtcgtggatatagcagccggacatgggcgttatgttctggatgcgctggccgcacaaccggccgttacgagcatcttacttcgcgactacagcttagtgaatgttgaaaagggccagcagatgattgctgaacgcgggatgactgagcgggctcgctttgagcagggcgatgccttcgatcgcacgcaattggccgcgctgacgccgaaaccgacgctgggtatagtttccggtctgtatgaactgttcgcggaaaatgagttggtgcggcgctcgctggcgggtctggctgaggccatcccgccgggtgggatacttatctacaccgggcagccatggcacccgcagctaaaaactatcgcctggtcgctcaccagccataaagatggtaaagcgtgggtgatgcgcgtacgtacccagggcgaaatggacgcgctggtgcgtgaggccggctttgataaatgcgcccagcttattgatgaatgtggcatttttacggtgtcgatggcggtgcgccgtgcaaactga

SEQ ID NO: 97465 - DNA, 918 bp, Enterobacter aerogenes
atgacgctgctgctgcaatctctggcggctgtcttttcactgttgctgctggcgacaggggtgaatggtctgctgtgctggcgtcagcctgagaaaaactggcgcgaattgacattacgcattcgcacctggtggctgattattatcctcttttcgctggcgctactgagcccacgctggctggcgctggcttttttcgccgtggtcagctttatggcgctgaaggaatttttgaccctggtgccgtcccgccacgccgatcgtatgcccatcctgtggatgtttatcgcgattcccgtcaattactggctgattggtatgggttggtatgggctgtatatcatttttatccccgtttacgctttcttgttcctgtccgcaagaatggttatggcgggagataccaggggttttttgcatagcgccgcacagtatcactggggagtgatgactaccgttttcgccttcagtcacgtggcgtctttactggtactgccaaccgacggccagcagcgcggtgcactgctggtgttgtttttggtgggcttaaccgagtttaacgacgttgcgcagtatctatgggggaaatcgttagggcgaatcaaaattaccccggcggtcagcccgaataaaactctggccggcctgctgggcggtattggcagcaccacgctggcagcctggctgctggggccgctactaacgccgcttaacgggcagatgtccttgctgtccggcgtcatgattagcggcgcgggtttttgtggcgatgtggtgatgtcggcggtgaaacgcgacatcggcgttaaagatagcggcacgctgctaccgggccacggcggccttcttgaccgtcttgactcactcatttttaccgcgccggtatttttccattttatccgttactactgttactaa

SEQ ID NO: 97466 - DNA, 603 bp, Enterobacter aerogenes
atgacactctaccgcatgaagcctgcattccagaccctgctccggccgctgatgttctggttggcgaagcgagcggtcaccgcgaatcaggtgacgctcgccgccatcgcgttatcttttctgagcggcgcgttgctggcgttgtatcctcatccctcgttgttctggctccttcccgtcgtcctgtttatccgtatggcgctgaatgccctcgatggcatgctggcgcgtgagtgttgccagcaatctcgtctcggcgcggtactgaacgaatttggcgacgtgttatccgatatcgcattgtatctgccttttgcgttgctgcccgatagctatccggcgcttgtgctggcgatgctgctgtgtgcggtattgagtgagttttccggggtgctggcgcaggcgattggcggtctgcgcagttacgccgggcccatgggtaagagcgatcgcgcgctggtgtttggcggctgggggttagcgttgagtctgtggccgggcgtggcggtttggtgcgatatgctgtggagcattgtcaccttgctacttatctggaccattatcaaccgctgcgcccacattctgcctggagagagggcatga

SEQ ID NO: 97467 - DNA, 276 bp, Enterobacter aerogenes
atgagcaagaaatcatgggtgatgtttctatccggttatcccgttgtcgccatgctttttctctattttggttgctatgtggggtcgggatatgagggaatagcgtacttgtttttaatgatattaatgctggtttccagcttaatattcaatgtaatcatgaccttcgcagccataaggagtgacaaggataatgaccttgagggctggttctattttatccctgtttttacgcctttgttctgtggtggagcgttggcagttagcttcacataa

SEQ ID NO: 97468 - DNA, 228 bp, Enterobacter aerogenes
atggaagaatataaaaaccgtggaggcaactctggtgtcatttgttttgagataaatgatgactctattactgtgcaatttcgtgataattcactatatctatataactatattcgaccaggccaagttgatgttgatcatatgaaagcactggcaagagctggtaagggattgaatagttatattagtcgtacagtacgtaagaatttttatcagaaattacgttaa

SEQ ID NO: 97469 - DNA, 681 bp, Enterobacter aerogenes
atgccatcaatgacgtttgtagtgctcgcaaaatcagtaaaacataagaaattctgtgtcgctggaaaactatttacaaatggagttattggcggctgggtgcgccccgttaaccccgatactgacactgatgcacttacatataaaaacattgaatattccagtaaaaagcacccagaaatattccatgtaacttcatttaaatatctccgaaacgaaccacatcagattcagagagaaaattactcaatcgacccttctatttattggagtaaagaagggattttcagtgttgataatattgatagtcttgttgataaccctccaacgctttggattaatggtagctcttcatataatggtgagaatgaccgctttctatcaaacttagttgttcaacctctccagtctttatatttcatacatgtcatgaactttagaataagaatcaaaagagaaggagctgactttggtaatgacacgaaaaaatttagaggttattttacatacaataatgttagctatgcacttgtaattactgatccagagatttacagtgcatatggacaaaaaaatgtgggtacttatgatgtaggagcatgctatataacattgagcactgcgcctcataatgatgggtattgctacaaatttattgcagcagtagttgtgttagcttaa

SEQ ID NO: 97470 - DNA, 441 bp, Enterobacter aerogenes
atgaaggtattttcgattggttttactgaaaaatctgctgaaaaattctttactctgattaaatcacaatcagcgattaaaacattaattgatgttcgtttgaataatgtttctcaacttgcggggtttgccaaaaagaatgatttaaaatacttccttagagaattgtgcaatgttgactacctacatgtgcctgatcttgctccaacaaaagagatgctaactccttataaaaaaggggatgtatcctgggaagcttatgagaataacttcttgaatcttatggcaaaaagaaatattgagcgaatggataagtccatgattgaagatagctgtttgctatgtagtgaacacaaaccccaccactgtcatcgacgtcttgtgatagaatacttaaacagccactggaatactgattttgaggttaagcatttgatatga

SEQ ID NO: 97471 - DNA, 591 bp, Enterobacter aerogenes
atgatgaaagtactgataatgtatcatcctgactttgcgtctatgggaaagtttgaacgtaaactttctcgtatattttctcagtcaaataactatcaagtattttattttcacgatcataataatcttattaatcagtattttagtattgatttactgacccagcttacccctgatgttctaacagacctattatctattggggtgactcatgcagttttatttgattcatcaacacaaccacaatttctttctcattacaaagatttatcagaaaaaattcctgtacgttatataaaagataacattacattcacttcaaataaagatagaggtgagcatttcgatatctattgtggtagaggtactttatggggaaatccttatgcaataggtgttgatggtgatcgtgaggaagttataagaaagttcaaatacgactttgatcgagactatctcaagggtggggctgagttcaaagaaaagctgaaagccctgagaggacagactttaggatgtcactgtaaaccgtatgcatgtcattgcgacgttctttctcaatatttaaatgaattggatgatggtgaatag

SEQ ID NO: 97472 - DNA, 576 bp, Enterobacter aerogenes
atgactactgtgatcggatatgtgcgagtttccaccagcgaccaaaacgttgaaaaccagaagcagcagatagccgatgctggttatagagttactcgctggttcagtgatgaagcggtgagtggtgcagtaaaggcaggagaacgtccaggatttggtgaattactcagttatttgcgagaaggcgatacactggtagttattgctattgaccgtctgggacgtaatacgattgatgttctttccaccgtggaaatgttgcagacaaaaggcgtgaaagttatcagcttgcgtgaagggttcgacctgtcaacaccagtaggtagagcgatgcttaccatgatggcaggactcgccagcctggagaaagacttgatcgcagaacgcagaacagcaggaatcaaacgtgctcagtctgaaggtaagcattgcggcagacctatcaaagcaaccgttgaacaggtaagagagttattaggacaaggtctaccgccagcagcagtacaggataggttagcgattagcaaagcaaccttctaccgacttaggagattcgagcaactctctgatatttga

SEQ ID NO: 97473 - DNA, 1608 bp, Enterobacter aerogenes
atgtctgattacgaaatgaagtttgatcctcatacgatagaacatctcggcgtaaaaatgtattctacgctcccaccagcccttgctgaactaatttcaaatgcctatgatgctgactcaggaaatgtgactctcgattttttggaagttggaagcaacaaatttattagcatcaaagatgatggtacaggtatgagtgccacagatattcaacaacgatttttagttatcggaagaaatagacgtcgacatgacggtgataagccaacgccacggtttggacgttacgctacaggtaaaaaaggtttaggtaaattagctctttttggtcttgccagggaaataactattgatacagtcaaggatgggaaaagaaataggtttgtacttgattggaatgcactacttgatgcggatggtgtctataatccaactgttgaattatctgatgaacctacagatgccgcaaatggaacgacgataaaattatccaaactcaaacgacaatcaccgtttgatcttgaagcgattgctaacagtttatctaaaatattcattgttgatgataactttaatataagccttaaagaccaacatggtcatgttgtaacggtaaataacgctcgtcgatatagtggttttgagcagcagttcgaatgggatgttgaatctttggtaaaagatgacagcccttataaagataaattgaaaggaacattgtatacttcacgaacgcctataagacccaattctgggttaagaggaatttcgttattttctcgagggaaactcgttaataatcccgagtttttttcaaacagcacatcaagccatttctttcaatatttgactggatggatatctgttgactttattgatgaccttgatgatgatgttatctcaaccaaccggcagtctattgattgggataatgacgaaatggctcttcttcgtgaatatctctcaacaatcattaatcaggtaaataatgattggagaaataaacgaaaagagaagaaagaaaaagaactcgaggttacaactggtatagatactaatcaatggatgagtactatgcctgaagatattagacagcaagcatcaaaaattatagattttcttggtgaagaggacgcacttgagaagtacagtcctgttattgaagcgctgcataccatagtgccagaatatcctttactacactggcgatatttgaatgagaaaattaaagatagaataaaaacattctacacaaacaaacaatatggaatggcagctgatcagggaacgaaaatatactgtgaggttatacgtgaactcactggttcatcacttgatggtacagaacttgttaatttggttttttcacctaagaatcctgtcattaaattatgtgatacttcaactcaaacaggaatgagtattcagagtggacagcgttcactatcccaaggggttattgagtcctttagaaacccggctgctcatatgccactggacaaattagttcctgagcaatattcagaattggattgtttaaacgttttaagtttgatttcttatctttttgaaaggatggaaggtgccgaagttattacggagaaatga

SEQ ID NO: 97474 - DNA, 1050 bp, Enterobacter aerogenes
atgaatttcacagcaattgacctattttgcggtgcgggtgggttgacatgcggtttgaaagaagctggcttcaaagtcctcgctggtgtcgagcttgaagctgttgcagcaaaaacttacaaaactaaccatgccgatcatattctctatgaagctgatattcgctcgttaaaccctctaaaaattatggaggaattgcagcttaaaccaggagagttggatttattagcgggttgccctccatgccaaggtttctcatctcatcgcactcgaaataaatgtacttcagttgaagatattagaaatgaccttatttttgatctaatgagatttgttagagcgtttgaacctaaaacagtcatgatcgagaacgtacctgcgctggctaaagatgagagaattactaaggtcattgccgagttacatgaacgtgggtatatgattggcgaaaaaacattacaagtgaaagataccgcttgttatggcgttcctcaacgcaggaaaaggatgatccttatcgcatctaagtttggtgatatcgatgagcctttaaaagtagcttcaccgaagactgtaaaagatgcaatcgcagattttcctgttccaggtgaaggtaatgacattcttcatgactttattccaaacagaaccgataaaattaaagccatgataagaaatattcctaagaatggtggttcaagatcagatttaccgaaacggttatggctgccttgtcatttgaaaaatccagatggatataaggatgtctatggaagaatgtcatgggacaaagtttctccaacgattactggtggatgtaccaatccttcaaagggacgttttttacatcctgaacaggataggtctatcacattgcgtgaagctgccgcgcttcaaacttttcccaaaaactatgccttctcgctggatagaggtagagagttcgctgcgctaatgataggcaatgccttaccacctgcctttatttgtgcacatgcaaccaagatcattgagcatttgaataagttaggaaaacagaatagggaataa

SEQ ID NO: 97475 - DNA, 1305 bp, Enterobacter aerogenes
atggggtacagaactcttccatacacgtttcagcgaaacggtaactactacctacaaatccggctttcaaatggcaggatgtataagaaatccctcctcacagacagctatcgcgaagcatccgctttgatgatcagcatcattccgcatatctcttttcttaaatcattaactatgccgctccctgtgttcgaagcgttcttatcaaatctgattgcttcagagcgcaaagctgcgagaaatgcacttttatcccaacagcagataatagttcctgctgaaatcgtggaaccacaaccgccagtgaaacgcgaaaaagtgataaccattgctgatgcgtgggctatgtacaaagatgaaaaggggcgcaactggacgaaatcgatctcaatggcgaatgaacgctatatggaggtattgcttgtggttttgggggaagaaacagacgtaacgacgatcacaaaacaggacattaagcaggtgatggaagttgttgaaaacctccctaagcgagttgtgcagccttaccggtcaatgacagtgcagcagctgattgaatgtgatgaagtgccacaagatgatctggtggggattgaagctatccataagcatctcaaaatctacaaatcactgttcaaaacttttctaactgaaagcaaagaagttttgcagaaatcgccaactgatggcgtagtggctgcaccttcaaaagcgagatttggtgcttacagcacagcggagatgaaaaagtttgtagggtgggcgctcaagcagccagataactggcaaaaatggatcacgttgttgttggcatacacggaagccagaagaggcgagataggcaagctggagaagtcacagatcaaatttgatgaggatagccagcgttactacttcctgatagccgaaggagggcagggaaaaactgagaacgctacaaggcaggtggttatccatcctaagttaattgaatggggtttcatggagtacgttggtcgccagtggaaagagcggattttttcagaagtggcaggtacaaacatgactaagatcggtaaagtgtttgctgatgtccgggatcagttgggtattccttatctggacgattatggacagcggcggttgctgcattctatccgtcactcggtctgctctgcggcaatggctggttgggtcactaacattctacatctgcaacagatagttgggcatgagaagagcggtgggattacaaagcgttatttacatacatttccgctatctacggtttgctatgtgatagatggtttgagttggacgagctaa

SEQ ID NO: 97476 - DNA, 1977 bp, Enterobacter aerogenes
atgaaattgacccccatagtaaaaggattggccattgctggcttgctgtcatcgatcagcttgtcagcatgggcggaagtcgccgcaaaagaagcgaccgctgccactaaacaagccaacgacgctctctataaccaactccccttctcagataacaccgatttcaccaacgcccataaagggtttattgccgccctgcccaccgagatcattaaaggagaacaaggtaacgtagtatgggatccgcaacagtactctttcatcaaagaaggtgaaaaagccccggataccgtcaacccgagcctgtggcggcagtcgcagctgattaacatcagcggcctgtttgaggtgaccgacggcgtctaccagatccgcaatctggatctttccaacatgaccatcatcgaaggtaaagaaggcattaccgtcgtggatccgctggtgtcggcagaaaccgccaaagtgggcatggatctgtattacaaaaaccgcggtaagaaaccggtcgtcgccgttatctatacccacagccacgttgaccactacggcggggtgcgcggcgtagtagatgaagcggatgtgaaatccgggaaagtgaaaatttacgcgccgtccggctttatggaagcggcggtggctgaaaacatcatggccggtaacgtcatgagccgccgcgccagctacatgtacggcaacctgctgaaaccatcggccaccggacaggtcggcgccggtctgggcaccaccacctcggcgggtaccgttaccctgattgccccaactaatatcattgaaaaagacggtcagaaagaagttattgacggtctgacctatgactttatgctggcgccaggttcagaagctccatcggaaatgctgtggttcatcgaagagaaaaaactgattgaatccgcggaagacgtaacacacaccctgcacaacacctattcgctgcgcggcgcgaaaatccgcgaaccgctgccgtggtcgaagtacatcaacgaagcgattgtacgctggggcgacaaggctgagattattatggctcagcaccactggccgacctggggcaacgaaaacgtggtcaacctacttaagagccagcgtgacctgtaccgttacattaacgatcagaccctgcgtatggctaacgaagggctgactcgcgatgaaattgccgccaaattcaaactgccggatagccttgccaacacctgggccaaccgcggttactacggctctgttagccacgacgtgaaagccacctacgtgctgtatctcggctggttcgacggcaacccggccaccctcgacgaactgccgccggaagaagcggcgaagaaattcgtcgattacatgggcggcgccgatgccatcatgaagaaagcgaaagaggattacgaccagggtaactatcgttgggtagctcaggtggtcagtaaaatcgtcttcgccgatccgaaaaaccaggatgcgcgtaatctggaagctgatgcccttgaacagttaggctaccaggcagaatccggcccgtggcgtaacttctacctcaccggcgcgcaggagctgcgtaacggcgtggtgaaaggaccaactccgaacaccgccagcccggataccgtgcgcgcaatgacaccagaaatgttcttcgactatctggcggtacatatcaacggcgagaaagcgggtaacgcgaaatcggtcttcaatatcgatctcggcagcgacggcggcaagtataagctggagctggaaaacggcgtactgaaccataccgccaatgcggaagcgaaagatgccgataccactattgccctcaaccgcgccaccctgaataagatcatcctcaaagaggaaacgctgaagcaggccgtcgataacggcgacgcgaaaatcaccggtaacgccgataagctcaatgaaatgctgggctatatggacaagttcgaattctggttcgacatcgttacgccataa

SEQ ID NO: 97477 - DNA, 900 bp, Enterobacter aerogenes
atgttcaggctggaagatctgaccttatttgtccgcgcggcggcgttaggcagttttagcgaggcggcgcgggaggcggggcagcagccagcgcaggtcagcgcggcgatcaaacgcctggagacgacgctcaacattcgtctttttgcccgttcgacccgtagcctgcgcctgaccccggagggcgaaacctggctgccctacgccacccagatgcttgatacccttcaggccgggctacagaaaattcagacgccaggagatgaagtacgcggcacgctgcaaatcgccgtgccatccgatctagggcgtaacctgctgctcaaggtattttgcgcttttcgcgaacgtcacccggcgctgcgcctgcggctgcacttttccgatcatctgaccgacgtgtttaaagatccggtggatgtcgcttttcgctacggctaccacgaagacgcttcgtttatctcgctgcccgtcgcgccggaaaaccgtcgggtgttggtggcttcaccgcactgggttgcccgccacggtcaaatcagtagtctggaggagttatcccggcacagcgcgctgttgtacgtattacgcggccgcccttttgaccgctggccgctgatttcaggtaatgaagtgcataccgtggagatgaacggcgcgattatgagtgatgatgcggaggtgatccgtcggctggcggtagccggagaggggatcgcttataaatcgtttcttgatgtcagcgacgacctgcgggaagggcgtctggtgcgcttgctgccggactttcagggcgatttaacgccgctgaacatgatttgtccgcaccgcaaacagctctctgccgcggtgcgtttgttatatcaagaggtgaaatcacattgtgaagcgcttagtgcttaa

SEQ ID NO: 97478 - DNA, 3474 bp, Enterobacter aerogenes
atgacaacaaatacctcgccggataccccttgccgcccgtggctggccgatgatgcgcagataacgctaccgaaaaagcttgccaaagaagcgctgagccatcgccgctggccgggtgaagcggtatccaatgctaaagacgtcaacaggctgaacggcctcgctcacggtttaaaccggccatacaaaaaaaccgtttcctttgattacagtgactgttcgccggaatggcagcaggtcatcgccgaggcgctgtcgcgcattgacaccgaacttaacaccaccttaccgccgcaagttctagcggttctggttgcgctaaaaaatgataataatccgcaaggcgctcaggatttacaggatcatatcgttgaacaaggcgggctggaatatgccaccgaggtagttattgcgctgcagtttattcaccccgtatacgattatggcgacgatcgggtcaacttcttgccatcaaatcagcctccaaattatctgcattcgtattccgttttcgaatggcgactgcggaagcacctttctctcgcggatgaagcgctatggcaacgctgcgctgataaactgattaccgcccagcccgccatgccagcctggcgccagccgctggtttctcttctgttgccggaaaaacccgatatcgctcgcgatactgccgcacgccttcacggacagcccactctcggtatgctggaatggctgaagctgacggctactgatgcgccaacgctggcgatattagataactatccgcatttagatatctttaatgattattacgttggcaaaacttgctgcgccacactgttacaggagcaggggggccctgctctcgcccgcctcgcaccttacgcccacggcgatatctgcggcgaggcgctgactcatatcaaccatccgcaggccctgggcctgctgattgacgccagcgggcagagcaaacgcacctttgagcgaatgaataaagccagcgagcgcttcccgcacgccatgctggcggcgctggcggagcggttagcgcaaaagaacgattcacgctggcaaaccctgctggtcgttctgcttaacagccaacctgaaatcgtcacgcgggtgacgccatggctgtcggcgcaggcgctggccgtcgtagaacacggccagcagcagctaaatcagcgcactgagagcgccagcaacgaccagctcccggctgtactggtctctccgccgtgggcggcgaagaagaaaaaggtgacggttccggtactggcacttgtaccgctctcgctggatcctgtctgttcactatcggaggaagaacgcgaagctctgctgaagaaagagaactgggatccaacagatattgaagacagcgcagcagatttcctctccacgctgggcttcagacgttgggatggcttcagcgttaagaaagtcatagattcagcattggatgcctggcagcgtgaagattatcccgcgttaattgaagcatttaaaacgttccatcatccctatcggggcgaatggaatctctacagactctcggtactcgaaccagaaaaagcactccgggtctggaattacttaagccaacagcctcatcacggcgcaaggcgagtgatgctgtacctgggcctcgccgggttaccgggcttcacccattccctctcgcgctacccggagacaaacgtcccgctagcacagtggtttggcgccagcgaactggcgccggccatcgcccgcgccttcagcaagctgaaaagcgtgcgcgacgaagcccgcctgtggctgctggcctacccgcagcacgccattaccggtctgctgcccgccgccttcggcaaagccggcgaagcccgggactgcgcccgtcaggcgctacggctgctggttgataatggccatcaagcgctgatggaacagatcgccgggcgttaccaacagcccgaagtgatggtcgccctcgccgcccttcaggcacttgacccgctggacaaccacccgagtaaaatcccctccctgcccggtttctggctgcccacgctgtgggcccgtccgcggctgcgcgagaacgacctgccgctctccgacgctgccctaaagcatctcggcgcgatgctgcgttttccacaggatgaggggctgtatcccggcctgctacaggtcaaggccgcctgtaccccggcctcgctggccgccttcgcctgggacctgtacctcgcctggcaggctgccggcgcgccgtcgaaagagagctgggccttcagcgcgctgggcgtattgggcgatgacgataccgcccgtaagctgacgcccctcatccgcgcctggcccgggcaggcacagcacaaacgcgccaccgccgggctggacattctcgccgccatcggcagcgatatcgccctgatgcagctcaacggcatcgcgcagaaactgaagttcaaggccctgcagacccgggcgcgggaaaaaattcagcacattgccgacagccgccaactgaccgtcgccgaactggaagaccgcctggcgccggatttaggccttgacgaacagggctcgctgacgctcgattttggcccccgccgcttcagcgtcagcttcgatgaagccctcaaacccttcgtgcgcgatgaaaagggcagccgccttaaggacctgccgaaaccgaacaaaagcgatgatgcaaccctcagcgccgaagccgtcgggcgctacaaggcgctgaaaaaggatgcccgcaccgtggcggcgcagcagattgcccgcttcgagtcggccatgtgccagcgccggcgctggacggcggaaaacttccgcctgttcctcgtcgaacatccgctggtccgccatctcatccgtcggctggtatggggcgtttatggcgacgacgacgccctgctggcctgcttccgggtggcggaagataacagctacagcaccgccggtgacgacctgttcaccctgccgcagggcaatatcaccatcggcctgccgcacgcgctggaaatcgacgccgcagatgccgccgccttcggccagctgttcgccgactaccagttgctggcgccgttccgccagcttgagcgccacgtctgggcgctgagcgacgcggagctcacagccacttcgctcagccgctgggccggacgcaaagcgccgggcggccgcatcgcggggctggccaacaaaggctggctgcgcggccagccgctggacggcggctggatcggctggatgctgaaaccgctggggccgtggacgctggtcgttgaacttaaagaaggctttgcggttggcgcatcacctgatgagtacagcgccgaacaacagctggacgatatctggctgtggcacggcgaggcgagcaactttggctggggcactcaaacgccgcagaaaaaaccgttctcggtgctggatcgcatcaccctcagcgaagccgtcaacgatatccaggcgctgtttgattaa

SEQ ID NO: 97479 - DNA, 2355 bp, Enterobacter aerogenes
atgagccataccgcaagagaaaataataatcattctgggttgccgaaaattttgctgtcgccaccgtggcgcagcaaaaaaaccaaaaaaaccagcctgcgccttgagctggcggtgctgtgtattccaccgcaagaacagtggttacctggagaaaaagaggcgctggcggcagcggaaccggcatgtttctttaatcgccagccattgacggagcggatcgccaaacggggtagcgacatcgtgttgcgtgaactgggttttgaggtcatggattatctgttccatcaatacaccctggcaggctgtcaggatcatctggactcatgggtcagttttacgcaacctgactggcaacaagaagcgattagcgcacttaacaacgctgatagcgaaggcctgctcctcgcctggcggcgctaccaggaaggcgactataagcctaacgactgctggaatctatacctgctagcacagctgccgcgcgaacaactgctaacgctatggcaacgaataaatgaggagaaattccgctacgttggcgcagactatgtgctaagcattctcggcgtcgacgcgctgcccggcctgctgctggcgctacagcagcggcccaaagagatcttccccctactgatccatatcggcgccgctgaactggcgctaccaatcgcccgcgcctggcaccgcttgcaggcgcagagtcagctcgctcgccagtggctgctacagtggccggaacatgccgccgccgcattaatcccagtcgccttcggcaaagctggcgatcatcgggaggcagccattaacgccctacgtttgctgtctcaacaaggtcacctcgaacggttgaaatccgtcgccttacgctgggatgagccgcagctatggcctgtgctggaacaattgctcactcaggatccgctggaaaactacccggcgcgaatcgcgaaagcgcccgatttctggcagcccgcgcggtggcgcaggccgcggcttatcgtaaacgaccaaccgctaaccgacgacgcattagaggtcctcggcgaaatgttgcgtatgtcgcaggcgggcccggtttactgcgggctgaatatcatcaaagccgtctgtcagccgcagacgttggccgccttcgcctgggatttgttcagtgcctggcaaaacgcgggggccccggcgaaagagaattgggctttccaggctttaggaatattgggtgacgaaagtacggtccgcgaattaacaccgctgattctcagctggcctcaggaaggaaaatcagcccgcgcctccagagggttgacgctgcttagccgcattggcaacgatacggcgctcatgcacttgtatcacatcgcccaacgcgcgaaatcccgcccgttatatgaaaacgcagagcagcagctaaaagtcatcgccgaggcccgatgccttagcgaggagcagttaaaagaccggatggtccccatgctggggctgaacgcgtcgcaaccgctggtctttgattttggcccccggcagttcagcgtacgctttgacgaacatctccagttaatcattaccgatcggcagggcgtccgacaaaaaaccatgccgcgcctacgcgaggatgacgatccgctaaaagcgccagaagcgctggcccgcctcaaagggctgaagaaagatgccgcccaggcggcgaaacagctactaccgcatctggagaatgcctttcggctggccagacgctggacagttgccgaatttcagaccctgttcgttaaccacccgctcacctgccatttaacccggcggctactatggggaatctacacgacgcaagagcccaaccatttgctaaatgcttttcgcgtcgcggcggaaggcgattactgcgatgcgcaagacaattccattgaccttccggcacaggcgcttatcggcatcgcccatccgctggcgatgagcgccgaactacgctcaacgtttgagcaagtcacaaccgactaccagctaacgccgcccttccctcagctcttacgcccgattgtgcaattgacgccagaagagggctcgacgaggttgctcacgcgctggcaggggaaaagcgctacctgcggccagctattgggaatacgctatcgcggctggcagcaggagagcgataccaacttttgctactcgcttccgccttaccgattaatgctgacgatttctccgggatttgcgccctatggcatcgatgccaacgcccgccatcagtttgccgaaatcacgctgtacggcggcgaatcacctgccgcattttcgcagcttgaccaatgcatactcagcgaggcgctgagtgccatcgatgccatcttccgctaa

SEQ ID NO: 97480 - DNA, 1089 bp, Enterobacter aerogenes
atgtcacaccaggaaaaccctcttcagcgcccaccggccgccacgcgctacgccgaggagctcgcccgactaaaacagagtgatgacgccccctgcccgccaggctggttgttaagcctgccagcggcgcgagcctttatcctcggcgatgatacacggggtattagccgtaaaatcgtgatcggccccgccgccgtcgaacgcatgctggtgacgctcgccaccgggcgcggcctgatgttggttggcgagccaggaacggcgaaatcactgctctcagagctactggccaccgccatttgtggcgatgccgggctgaccattcagggcggggcatcggtaacagaggatcaaatcaagtacggctggaactacgcgctgctgattaaccagggtccgtcgccgcaggcgctggtccctgctccgctttaccagggcatgcgcgacggtaaaatcgttcgcttcgaagagatcacccgcacgccgctggaggtgcaggactgcctgttagggatgctctccgatcgggtgatggcgataccggaactcaccggcgacgagagccagctgtatgcccgtgcgggctttaacattattgctactgccaacacccgcgaccgcggcgtcaacgagatgagcgcggctttgaagcgccgcttcgactttgaaaccgtctttccaatcatggatttccagcaggagctggagctggtcgccagcgcatccgcccggctactggcgcatagtgggattccgcataagattccagatgcggtactcgaactactggtccatacctttcgcgacctgcgcgccgatggtgacaaaaaaaactccatggataccctcagcgcgataatgtccaccgctgaagcggtcaacgtcgcccatgccgtcggcgttcgcgcctggttccttgccaaccgcgctggcgagccaaccgatctggtggactgcatcgccggcaccatcgttaaagacaacgaggacgatcgcgcccgtctgcgccgatattttgaacaacgcgtcggcaaacataaagaagcccactggcaggcctattatcaggctcgtcaccgcctgccttga

SEQ ID NO: 97481 - DNA, 2280 bp, Enterobacter aerogenes
atgtctgagcagccgttaatcatcggtattcgtcaccacagtccggcctgcgcggcgctggtcagagagagcatactcgccgtccgcccccggtatgtgctgattgaaggcccggcggattttaacagccgtattgagtcgctttttttgcctcatcagttaccggtggcgatctacagctacagccagtccacgaatgatacctccccaggccgcggcgcctggacgccttttgccgagttctcgcccgagtggcaagcgctgatggcggcaaaagagatcggcgcgcaaacgcgttttatcgatctcccggcgtgggcgcaaaccgagaacgatgacgatgattctcagatccgccagcgcgccgatcggcaacgcttgctacaggcaagcggcatggaaaatagcgacacgctatgggatcatctgttcgaagatgagacccagcgaaccaccctggcgtcagcgctggaacactattttttccgcttgcgcggcggtgagcccgggggcgaaaacagccgtcagcgtgaagcgtatatggcgcgctggctggcgtgggcgatgcaacaaaacgatgggccggtggtggtggtatgcgggggttggcacgccccggcgctggtcgccagctggcgcgattgcccgagtcaggcgcaggaacccgcactcccgcaaccaggcgccgacatcgtcaccggttgttatctgacaccctacagcgaaaaacgcctcgacgtcttaagcggctatctttccggtatgccggctccggtctggcaaggctggtgctggcggtttgggctacagcacgctggcgaaaaactgctgcgggccatacttggcaatctgcgccagcgccgcctgccagcttccaccgccgatctggccgccgcgcacctgcgcgcaatggcgctggcgcaactgcgcgggcatcgtctgccgctgcgcagcgactggttggatgcgcttgccggagcattgctcaaagaggcgctcgacgccccgcttccctggagctaccgcggcgtgattcgccccaacaccgatccgctgctgctgacaataattgatacgctggcgggaagcggtttcggtcagttggcgtcaggcactccgcagccgccgttgccgcaggacgtcagtcgcgaactggcccgcctcgcgattcccctgcccggccagttgcatctcgaccgctatgagaacaacgggttggcgcaaagccaggtgctacaccgtctcgctatcctgcgtatcccaggtattcagcgcctccagggtaatgccacttcgttatccggcgacggcgtggaaatctggtcgctaacccatccgctggaacaacatgccgcgctcattgagagcgcccgctacggcgccaccctaatggaagccgcccgtcactatcttgaagcggaaatgctggaagccgtcggcattcgccgcctcgccgagtgtctgagccaggcggcgctggcggggctttccgccttcagccatcagctactggcacagctggcgcaattgattgccgaagagagccgttttgccgaaatgggcccggcgttggaaatcttatatgctctatggcggctggacgacgccagcggcatgcagggttcagcggtgctgcaaaccaccctgagcgcggcgctggatcgcgcgctgtggctatgcgaaacccgttgtcaacccgacgaagcccagttccacgcccatctgtacagttggcagacgctgtgccatattctgcgagatcttcactgcgtgaacgcgcttcctggcctgacatcagacgccgcgctcgcgctgctacggcgccgtcttgccgccgtcgatgccgcccctgttgaccggggcgcggcgctgggcgcgcttatccgtcttgaacacccctcagctaacgcgcagacggcgctggagctactggcgcaactccctgcgcaacggctcggcgaaaccctgcacggcatgctggcgctggcgcgccatcaccttgccagtcaacccacattcatcgttggtttcagcgcgctgttagcacagcttgccgaggaggagtttattctcgccctccccgatttacgtgcggcgatggcctggttgccgccgcgcgaacgcggcgcgctggcgcagcaggtgctcgcgcactatcacctgacggcgctgccggcacaggcgttacaaacgctaagcagctcgccggaagtcatcgcccgtcaccaccaacaagaacagcaggcgcgggaaacgctggctcactggggaatttactaa

SEQ ID NO: 97482 - DNA, 1137 bp, Enterobacter aerogenes
atgcactctcttgccgatttactgacctccaccgaacttcagcgctggcggctggtgctgggcgaggccgccgaaagcagccttggcggcctgagcgagcaggcgcgccagattgatcacacgctggagtggctatacggtcgcgatccgcaacggttggcgcgcggcgagcgttgcggcacgctggacagttcaaacctgaccaccccggagtggatcaacgctgttcataccctctttccgcagcaggttatcgaacgcctggagagcgacgccgtgttgcgctacggcattgacgatgtcgtcaccaatctggatgtactgcatcgtatcgccccttccgaaagcctgctgcgcgcggtgttacacaccaaacatctgatgaacccggaagtattacatgctgctcgccagctggtacgtcaggtcgttgaacagatcatgacccggctggctaaagcggtacgtcaggcgttttccggcgcccgcgatcgccgccgcccatcacggcaaccgctggcgcgtaattttgattttaaaaacacgctgcgcgccaacctcaaacactgggatccgcagcgcggcaggctgtacattgaatcgccacgctttatcagccgcattaaacgtcacagcgaacaatggcagcttatcctgctggtggatcagagcgggtcgatggtggattcggtgattcattccgcggtgatggctgcctgtctgtggcagttgccgggcattcgcacccatctggtggccttcgataccgaagtcgttgatctgaccgccgacgtagccgacccggtggaactgttgatgaaagtccagcttggcggcggcacgcatatcgcccgtgcggtggagtacgcgagccagctcatcgaacaaccggcaaaaagcgttatcgtgctggtaagcgatttcttcgagggcggcacgcgattgcaactgatccgccaggtgaaacagtgcgtacgaaacggcagcaaagtgctggggctagcagcgcttgatagcaatgctttcccgagctatgaccatgataccgcgcaggctctggtgaatgccggggcgcagattgccgccatgacgcccggcgagctggcggcgtggctggcggagaatttacaatcatga

SEQ ID NO: 97483 - DNA, 2001 bp, Enterobacter aerogenes
atgacccaggtacgcgcggaattacttgaactcaccccgcaggcgctgactgcgctcagcaacgcaggtttcgtcaaacgcagcctcaaagaactggatggcggaaatattcccgaactggcgcagcaaagcgacggtacattgaccgcccactttagcgacggcgtccacacccggctggcgcggggacaatcgctcaaacaggctatctgtagctgcggcgccagcggtatgtgtcgccatcgggtcatgctggtattgagctaccagcgcgctaacgccagcgcaaatgcaggagcagatgaaagcgcacagcgctggagcccttcgcggtggctgcctgaactcgctacgctgcctgatgctacgcggcggcgtgcgcaactgctggcggctcaagggttgacgctagaactgttctgcctccccggcgaaccgcctgccgctaaattacccatgagcgatgtccgtttctattcccgcagcagtctgcgttttgctcgctgtgactgcgtggaaggcacgctatgcgaacacgtcgcgctggcggtgcaggcctttgccgatgccgagtcacggcaacccggttttcatcacctgatgtggcaatctcatcgtcagaaatctgagcctgacggcggaccattcgccacctcccagggcgaagcctgccggcgggcgttacagcgacttatcgatatcctgtggcaaggcggcctcagccagccccccatcagctacgatgccgcattcagccaggcgcaaaaagcggcgcaaagcgtcggctggcgctgggtggaaagcgcgctggcgcagctccgttctggcgtagatgcctttcaacagcgggcctgcgactaccaccccgcatcattcctggcgcaactggccgcgctcgatggccgcctgcgaagcgcgggctggatggcgcaactcgatcgggataaggtcgtgccgccattaccgtggcgcaatatcgtcggtctcggggtggctggtgaaacccaacttgaccatctgcggctcgtgtcattgggtatgcgctgctggcaggatagccaacggtacgggctacgaatttggtattgcgatccggacaccggtaacatcctgcagctgtcgcgcagctggccgctagcggagcgtatgcagatccctgcctggcagcggcgaatctttagttttcaggccagcgcgctggcgggtgggcaaatcatctcgcaagcggcgcgtcgaaccgccaacggcgagctgctgctcggtagccgccagcgtctcagcagcaatgttccgctgacggcggatgcctggcgtttgctcgcaccgccgctgcgccagccgggagtgagcgcattacgtcaacatctacgagatcgtcctcccgcctgcgtgcgcccactcagccaggtcgataatttatttatactgccggtgggagaatgccttgcactcggctgggatgcttcgcggcaaacgctggatgcgcaagtgcagagcggcgacaacgacgacgatattctgcatttgtcgctaccggcctccgccagcgcgcctttcgctgtcgaacgcatggccgcgttactgcagcagcaggacgatccggtccgtctggtctctgggttggtctccttcaatagcggtacgttaacgcttgtgcctttaacgatgataacccgtactcgcgcctgggcgctggacggcgaagcgagcgcggtcggaccgctaccatcagccggcctacagcctgctctatccgcggcgcaaagcctgctgctgcgcggccaggagctgcttatacagatcctacataacggcctgcgctatcagcagcaaaatctgttttgcgaggcgcaaaggctcagcggcgagctggcaaatagcggctttcaacagctagcccgcctgtaccggcagctgattgagaacggcacggcaaccaccagcgagacgcttaatacaataatccacctcagtgaacaactggcgatgaaactcgattaa

SEQ ID NO: 97484 - DNA, 1644 bp, Enterobacter aerogenes
atgtccgcgataattagcgagcgggcatggtacccgcctgcgtttccggcgcaaggacgtttaccgacgcaagccgcgctggtagggcagaatagcctccgccaggagagccttgaaacggcctaccgacagcaattatcgctggccgtcgggcggcgcgtggaccccccctgttgcaagacactgcatatcagcctgttttttgatggcaccggtaataaccttaatcacgatctttttgtcgccaatccgaagcatccaactaatattgcccgcctgttccgcgccactattggccagggttatgctggtgggttggcggataaagggcctgagctgctggatgccagcaacagtggcggcaataaatactacaaatattatattcccggcgtcggtactcctttcccggaggtgatggatctggatttcagtacaatggggctcgccgcggcaacacacggcgaagaccggataaactgggggctgctacggctggtcgatgctctcaaacggaccatggataaggatgcgctctcggatggcgacagctggaaggcggtcaaaaagatggcaacatcgatggtttcctttggcctgaccggcggtgctaaccgctatgaaaccatccataatctgttgaatgcaatgtccgcagatctgcacaaagcgctgctgcccgctacgcccggcaaacagaagctattaggcattaagctgtatgtgtatggtttttctcgtggagcggcagcggccaggacctttgttaactggctgagcgaactgctgccaaagccaggggagggagaaacaaagcccgaacagtgtctggcggtgggagagctgaagatcccattaagcgtggagtttttgggcctgttagataccgttgcttcagtgggggtcgcgcatattgcccccgtagcggaaggacatatggggtgggcggacggaagccaggagctgccggatgaagagttctacggcggatttatcaaacgctgtgtacatctggtttcggcacatgaacagcggctgtgtttcccgctggattccattcgccgcccggacggcaaatacccggcgaatagcgtggaggttatttatccgggggtgcactcggatatagggggaggctatccgccgggggatcagggaaaagccaatgcagtaaacgatggttatttactttcacaaattgctttacacgaaatgtttgcctcagctttcgaatatggggcccctttgaaattacctatggaaatattacctcaggatttggcaagagatgcgtggagaacgatgtcttttgatttgggtcgcgaattctatctttctcgaatattgatcaatcgcttcaatgcttggcgtgagctaactttagggcttccgacgcctcaggacccaggctcggccgaactggccgccaaatatgacccccaacgtgctcccctctgcctggaacgagccctggaagaacagatcgcttggatcaccgctggcgcattaatcgctatgccggcggtagctacaagacccagcgcttttacatcgattctgcggcaaatggactggataaagatagcgatccgcaggtcagaaaaaaatctgaagttgagagagaggaggcccaacaggcggtag

SEQ ID NO: 97485 - DNA, 510 bp, Enterobacter aerogenes
atgaacctgacatttccgcgcgtgatacaggtggcattgctgctgactgtcgccagccaggggacgctggcgggaaccattaaagccatcaatcatacccgttgggcgattaacgctttcagcgtcgatggccagtcgggaattgacattatcgggccgtatcaggggggcggcggtggatgctgttaccaggtacctgcgaaatggagaccagggatgacggtaaaggtgaactgggaaacgggggtgggagatatgaatggatttcctggctttggtgatgatgctaaatatcttgcttgggaaaaaaagatgataaagctgaataaaagacacagcaaagttgtttcggtaccggactatacgggacaggaaacctgcgggatcaccgtgcattttttgccctgcgatcgggccaaagtgaccaccagttgtgccaactacggcagtccgggataccccattaaggaacctataaagatgatggagccgaaattatgtccgcgataa

SEQ ID NO: 97486 - DNA, 1092 bp, Enterobacter aerogenes
atgtacactgtgcgtcaacgtcagtgctttacacaaggtgaaaacgtggaattacttgctcagtacggcttatttttagccaaggctgcgactatcgtcgtcgccattgcggttatcgccgccattatcgttaatctgactcagcgtaagaagcagcgcggcgagctgcgggtaacgaatcttagcgagcaatataaggagatgaaagaagagctggcggtggcgctactggatggcccgcagcaaaaactctggcataagacgcagaagaaaaaacataagcaggaagccaaagaggccaaagcgcgggcaaaattgggtaccgcggaacccagcggcaaggcgcgtgtctgggtgctggatttcaaaggcagtatggatgctcacgaggtaagcggcctgcgcgaagaaattacggcggtgctggcttcggcgaaggcgcgcgaccaggtggtggtgcgtctggaaagccctggcggagtggttcacggctatggcctggcggcttcgcagctgcagcgcttacgtgataaacaaatcccgctaacggtcgcggtcgataaggtcgctgccagcggcggctatatgatggcctgcgtggcgaacaaaatcgtctgcgcgccgtttgctatccttggctcgattggcgtagtggcgcagatccccaacatcaatcgcttcctgaaaaacaaagacatcgatattgaactccataccgccgggcaatataaacgcacgttaaccatgttgggcgagaacactgaggaaggtcgacagaagttccgcgacgatctcaatgaaacccatcagctttttaaagatttcgtccatcagatgcgcccgtctctggatatcgaaaaggtggcgaccggcgagcactggtacggcgtgcaggcgctggaaaaagggctggcggatgcggtacaaaccagcgatgaactcctgttgagcatgatggataatcacgatgtgattagcgtgcgttatcagcagcgtaagaaattgctcgatcgcgttaccgggagcgcggcggaaagcgctgaccgtctattgttgcgctggtggcagcgtggacaaaaaccgttaatgtaa

SEQ ID NO: 97487 - DNA, 210 bp, Enterobacter aerogenes
atggacgacgaagaagccgcacaactgcgctatcaggtgatgtgccgtatcgttggggatgttgtgtgtgccatgatcgccgaaggtcacgaaaccaggcgggtagccatagctgacgtgataagaacggagatttcaaaggggattgataagtgggatttagatcagattcaggtgatggaactggcggtgaagttgctggaagagtag

SEQ ID NO: 97488 - DNA, 174 bp, Enterobacter aerogenes
atgactcgtgttcaggcgaaaccaatgcatgaaaaagttgcggaattgaagcaggtttctgttagccgcaaccagaaacaaatgattgaaaatcttaaagatttaggattattaaatgcaccccaatttactttagcgtatggaccaacagcacaagtttaccaaccacgctaa

SEQ ID NO: 97489 - DNA, 885 bp, Enterobacter aerogenes
atggataacttagagactacacttgaagggtacataaaatacaagctcagcgaattcagggaacaatttttccaagaatgtgacatcatcacatactatggcgggattactgactgggcaaagtttatatatcaaccagttatagaagatatcggcacttcagcattacagcgcgaacaccgctttttagttattcttttgcagaccaatggaggaagcgttgagtctgtagaaaaaatggtcgaaattactagacatttttaccatgaggtttattttatcgtacccgatagcgctatgtcggctggaacgatttggtgcatgtctggtgataaaatttacatggactatgcttcttcactaggcccaatagatccacaggttcaatcatcagatggtaaatgggtgcctgctttaggctatcttgacaaagttgaagaaataatcgagaagtcagcctcaggctccataactcaggccgaattaatgatggtcaataatttggatttggctgagctaagacgctacgaagaagcccgagaactgtctaaagatctgctaaaaaaatggcttgttgaatataaatttcgtgactggcaggttcatgaaactagtgtttcaaaactgggtcagcctgtaacacaagatgaaaagatagaacgagcccgggagattgctactgtactttcagacaataaaaaatggcactctcacagcagaacaatcggaatcaatactatagtttatgatctaaggctaaagatagaagattacaccgaacagcatgatatgcgtttagcaataaacgagttgcataagctgttgaatgaattcaggtataagacaaatagagaaatcgtagctataagttctgtacctttttaa

SEQ ID NO: 97490 - DNA, 468 bp, Enterobacter aerogenes
atgcgcaaagtaaagcatcaatttaccaaccagtcaacaggtgcatgcctatctaggtgtaaagcaattatttacaatgaagccatgagcgaaaaaaatccgacagaaggcctgatagccaggctgacagcgttaaatgctaaaggaatctccaaaacagagatgtcccgaattgctggtgtcagtaagcaggcagtctcaggctggttcaaaacaggccgtatcagcaaagagtctgcactagcaattgccgatgcagtcggcgtttctgtgccttggttattgggtgaagatgttggtgagaaagatggtcttaaacctgacgaacagcgcctgcttgagctttatcgtcagttgccggaagaagagcagcagaacatgttgcggatcgtatctctgcgactgaaggagctcgacgaactgtacgcgaagtacatggggcggcggattaagggcgatagcgactaa

SEQ ID NO: 97491 - DNA, 219 bp, Enterobacter aerogenes
atgactggtattgaaaacgctattcaacaatctggttctgcaagtgcgctaggtttggctatcggagtaaccaaaatggctgtgtctttgtggcgaaagaacggcgtaccgtcctctcgtgttattcaaatttacaaagcaaccggcgtcacgccgcacgaactgcgcccagatctctacccaaacccgaccgacggtctgccaaaacaggaaggctaa

SEQ ID NO: 97492 - DNA, 252 bp, Enterobacter aerogenes
atgagtgaagtaacagtgaaattgacgaacaaagcgatcgcaatcattgcggactacatccaacgcgccagtaagaacgagcaactgcaggacgcaaagaatcgtctggataaaaaaatagcgatgctctctgaagacgaaaactgcgatcaggagttgttgatggctgcattcgtaccagcgatgacaaataatacccgtgatggtttttttgaagctattgcggttgctttggaaggaacgcaggcatga

SEQ ID NO: 97493 - DNA, 270 bp, Enterobacter aerogenes
atgaacaagaaaatggaaccatcgctgcagtatgcctgcaaacgtattctggagctggaacagttgttgctggtggatgtgcctgaaaccgtctggcccgccgaggttgcaatggttctgtctcatgtagaaagcgccggagaactaccggcgcatcaccagcgccgattacagcaccatatcaaccgcatgtggcttgaaaaaatgccggtgccgacaatcatcgccgcggcccgttcgctggccagtgccatggagaaatacgcgtga

SEQ ID NO: 97494 - DNA, 423 bp, Enterobacter aerogenes
atgagaaagattattttcccagcattgtttttagtggcttccgcgcatgccactaaccagccaacgatgatggttttcaaatgctctccagaacattctaaaaacaacactatggttacttggcaagatgtgaagaaacaagatggctggcatcgttatgctagctggaaagataaggagggagagcattatggcattgaactgtatttcaatggttcatcgcctaataaggatggacagattgaggatatatatgtgtttggcaatatggatagccagaaaaaaatatcaggacccgcaatctctatgattctcaataaaaaggcaaagttgctaacttacagtattacgaacgacttggtagggtcggacgtgcacaaccctctggagaaagggacgtgcaccttaagcgataaaggttaa

SEQ ID NO: 97495 - DNA, 312 bp, Enterobacter aerogenes
atggctaaacgtatgcaagataaagaaagcattgccggagtctcatggctgattgtccttgctctgtcatgctggggcggtcttgtccgatacctgattgacgttaagcaaaacaaagctacctggagctggattaacgctctcgcgcaaatcgtggtttcaggattcaccggtgtcatcggtgggcttgtcagcatagaaggcggcctaagtatttacatgattctggccactgccggtatcagtgggactatgggttctgtagcgctcacgtatttctgggagcgaatcaccggagtgagagcacaatga

SEQ ID NO: 97496 - DNA, 282 bp, Enterobacter aerogenes
atgatatttggagggttcgtagccatcgccggtatcatcgttgctctggtgggcgataagttaaaagggtccaaatgcccttactgcgcagaattaataaactccgaagcggtgaagtgcaagcattgcgggagtgatgtaaccccttcgaagacaatagttaacactaacgatgctggcgccagcgataggctggctgacgttaatgtaaagttaatcgcggggattgtgctggcggtctttgcggcgattatcggcgcaataatgttttaccgtcaatga

SEQ ID NO: 97497 - DNA, 474 bp, Enterobacter aerogenes
atggcagatatcctttacccacacgactatctcccaatgccactgcaggaaggctatggattccagcctgtaagcccgttaaaacgaacccagttaaccaccggccgcgcgcggcaaaggcgagcttatacgtccacaccgacgcaggctagcatcacttggtttatggaaaccgatgcgcagggactggcgtttgaatcctggttccgtgatgcgttatctgacggggctgcatggttcatgatgaagctgcagacgccggcaggtattaagttttacaaatgccgcttcacagatatttatcagggaccggtgctggtggccccgatttactggaagtacacagcgacgcttgaattatgggaacgcccccttgctcctgccccatggggtaattacccggaatggatcgtcggcagctcactgctggatattgcgctgaataaggagtggccgaagcatgacgcagattaa

SEQ ID NO: 97498 - DNA, 483 bp, Enterobacter aerogenes
atgacgcagattaaacgcctctacgccagcagcgggacggaggtgatcattgaaactctgcagatcaccattggatctgatgttcactacctgtgccagggctacgaagatattacggcaacgacggagaacggcgatacggtaacattcacagcctgcgcaatagacattgcgctgccggcgcgcaatgcggacggcacgcaggacctaaaatttgccctgtgcaatatcgatggtgttgtgtccacggctatccgcaatgcgctggctaaccgtctgtctgcattgctgacttaccggagttatatctctacagatttagcagcgcctgcggcagtgccttatacgctgaaaataaagtctggttactggacggcgacagaggcacagatcactgcgggttacatgaacatcctcgataccgcctggccgcgttaccgctatacgctccctttattccccggtctgcgttacatcagctaa

SEQ ID NO: 97499 - DNA, 381 bp, Enterobacter aerogenes
atgtttaatcctgataaatacctttcagtcacatggctgaagggcggcagagtgtatccgcaactcgactgcttcggcattgtgaacgaaatccgggctgaccttggactacctctctggcctgagttcgccggggtgacaaaagacgacggagggctcgatcgagaagcgcgccggatgatgctttcactggaacgctgtgagccttgtgagggcgccggggtggcctgttattccggttcaaccgtcacccatgtcggtattgttgtcaatatcggtggcctgctgcacgtggcggaatgcaatccaggagcgaacgtcacctttctggctttgccgcgatttaagcggcgttttgtcaaagtggagttctggcaatga

SEQ ID NO: 97500 - DNA, 3069 bp, Enterobacter aerogenes
atgaccattcgtttttacccatcccaactgcctggtgaaccactggaaacgcatgaacatggtgtaaccagtattcgcaactggctggtggaaaatgttgaaggttacgaggatcgggatgtgccaccgctgaccattgaggttgaggggcagtcaattccgccaggcgaatgggctactttcgtgatccaccctgacagtgatgtccggctttatcctgtgcctttcgggcttgaggccgctacgattgcctggataggagtgggtatcgccgtcgcatctgcggcttattcattgttcatgatgagtaacattgatgccggcggctacacgtcatccacagggcgaagcctcgacctgaaccccgctaaagcaaacagcgcgaaactgggtgatgcgattcgtgaagtttttgggcgcgtgcgtatttatccggattatgtcgtgcagcccgttacccggttcgatgccgacgatcctacgaagatgcacgtccagatgctgctgtgtctcggtgtcggtgaactgatttataccaatggcgatatcagggtaggcagcactcctgcatcgacgctgccaggtttcagcagtacctattatccgccaggcgcggacgtttccggtgatgagcgcagtgaaaactgggtcaacagtacggaggttggtggggcatcatccggtaccgggctggatatggcccagacgtcgccggatgctgacgatattatcgcggacagcatgaccgtctctggatcgagcgtgacgtttaccgggctggatacggatgatgatgacgatagtgacgagaacgacaacgaactgccacccagctgggtcgccggcgcggtggttgaactgaaagccccggcaaactaccagatcacaacggcagccggatatagcgtaatcgcaagcccactgctgacggaaatcgcgccggtggttggtatgccggtgacgctggggtttaactcagtcgattacgatctgtttatcgcgtcatatactcccggtcaggctgcagtgcccggcgccggggggagtgcggcaaaagtacaggccagtgcggccccgactacctacgacttttcgacaagctccagcacgttcacgatcacctggcagggggttacctacacggtatcgctggtgacgaactatgtctcaatgtcgggacttctgtcggccatcaccgagggactcactggatcctccttggtcgcgcaggacaacggtggaactgtattgataaccgagtcggccagcccgtttgcgggtggggcgatcacgtcctcgtcgctgccggcatctgtcttcggtgatgccccggtttataccaccggtacggcatcaaccggcgggagcccagcggtaacggcatctgtgacactcgcctataacagcgccacgggcaccgcattctccgggatgccggagggtgggcaacggctttcacttgctcatcgcgggaatgagtaccggattgtgtcatctgacggcacgacggtgacggtggcgcgcatggttaacggtaccgttgatgattcgtggccgggattcgccgcaaggacgatgattgactatgaggccactggtcttaacgacaacaatagctggatgggaccgtttctcgcttgtccggataatgaagtcgtaaatgcttttgaggttaacttctcttttcccagcggtatttgcggtttcgggaaatccggcggcaaaaatttccgcaacgttgattatgaaattcagtaccgcgtatatggttctggttcgggctgggtgagcaaaactggacggtaccggatgaagaacgttaatgccctggggttcactgagcgatttgaattggctacccctggtctggttgaggtgcggtgccggcggcgtaatgagcaggggagtaaaaacgccagggactctatgtactggcaggcgctgcgcggcaggttactgacccgcccggcatcatatgccggagtatcgttaatggccgtgacggtggaatctggcggcaaactggcggcgcagtctgatcggcgcgtaaatgttgtggccacgcgcgcctatgaaaccggaacggccagaaccatctcgggtgctcttctgcatgtcgggaattcgctggggctggagatggacgtcgacaccatcgccgcgcttgaatccgcgtactggacgccacggggcgaaaatttcgattttgccacgggcgacagtatctcggcgctggaaatgctgcagatgatagccaatgccgggaaatcccgcttcctgttaagcgatggcctggcgacggtcaaccgtgaggggattaagccatggactggcgtgatcactccgcatgagatggtggaggagctgcagagcggatttaccgtaccatccgacgatgattttgatggcgtcgacgtgacgtacatcaacggtgtcacttgggcagaggagaccattaaatgccggacgcccgacaatcccacaccggtgaaaatcgagaactacaaacttgatggggtactgaatgaggatcacgcctaccagatcgggatgcgccgcctgatgaaatacctgcagcagcgggtgaccttccagaccactaccgagctggacgcgctgtgctacaacacgggcgatcgcattgtgctcacggatgatattccgggtaacaacacgatttcctgtctggtggaggcgatgacaacggctggtggcgtgacaacgttcaccgttacggagccgctggactggtctttcgaaaatccccgcgcgctgatccgctatcaggatggctctgcatccgggctgatggtggtgagtagggtgggcgattttcagctgtcagtcccgcacctgagcgagtttgatgacccgatgaaggttgacttgtcatcggaaaccatcgagccgatccgtctggtattctgcggctcaacgcgccacgtctacgacgccattgtagaggagatcgccccgcagtctgacggaacctgtcaggtcaccgctaaagaataccttgaatcgttttaccagtacgacgacgccacataccccggcgatgtcgcgtaa

SEQ ID NO: 97501 - DNA, 699 bp, Enterobacter aerogenes
atgattcttgtttgtgatggtgtggtgaatgccgacgatctggaactggccgagcctgaaatgattctcaacgatagcgccagtattgcgacttacgggatgcaggaccagtatgattcaagtggcaacgggtatgatctgattaccggcaatgaatttactgaactggggatgcgcacgactgcagacagtgcgcatggtgctgatacggggatcattgaaactgatgaaatgacgtttgcactgtgtatcaatatgagccagccgactgtgtcgggccgtctgttctccaacttatttcccggtatcgccccgtttggtggtctgcagctgcgaattgaagccgcgggcacgctcattttacaggtggctacggggaatagtgttgagtcaactgttcaggtgagccacggtggcgcagtaggtggatggacgcgcttcaccgtagcggtatcaaatacagaagcgtctatcaccagggcgagcggtgataaacatacttctgctatctctatacgtaagaaatcgacactgcccctgatcctgaatggtggccagagcccggagcagaatatggggcttcccggtttaatggggatattcgccgtctacaatcgcgtattgtctgatgcagaacagacagatgtccgtgacaagatgaaaagtattatggctatgcgaggcgtagtggtgaactaa

SEQ ID NO: 97502 - DNA, 306 bp, Enterobacter aerogenes
atgaaacagtatcgaacagggcacagccccgatcatgcggcattgatattgtcctgggacggtgagtatgccttttgggccgggggtattgcgcattcgccgttacagtttgcccatccggaatggaattcggtgttttgcggcgatcgcgcacaggcggaaacgtcgcgatgccgggtgatggcgtggtgcgcagagcatcatgccctgtggtttagcgcgcatttcgccggaccgtcctgcggttggctgaatgtcgataagcatgggaactatggctggacggaggcgagtaacagtaaatga

SEQ ID NO: 97503 - DNA, 867 bp, Enterobacter aerogenes
atgcaaacggcaatgcagtcactgggcgacttcctgcgggcgctacgtttgcgtctcgatcccaccgcgtttggctttgttgcgggcagacggcgtacgtccggattgcgccgcgaagaggtggcccaactcgcctgtatcagcccaacctggtacacctggcttgaacaggggcgcggcggcgcgccgtcgcgggaagtgcttaatcgcattgccagcgggttgcgtctgaccccccaggaacgcgaacacctgtttattctggcgtttggtcatccgcccgacgcgcaattcaccatttctgccgatgttacgccgcgtttacagcgggttttggatacgctcaccatcccggcgatcgtcaaaaccgtgacctgggatgtgattgcctggaatccccccgctgcatgcgtattaacggattacggacaactgccgcgggaggaacgtaatgttctacgccgaatgtttaccgatcctgttgtacgccgcgcgcagagtgactggcaggcgatggcgcggctggtggttaacgcttttcgcgccgacgtagcgcgggcaggacaatctgcggagatcgacagtctggtgacggagctttcgcaactcagccctgaatttgacgcctggtggcgcagcaacgacgttaccagccacggtgaaggggcaaaacgtattaatcacccgcaagctggggcgatcgatcttgaattttcgacgtttatggtagagggccgacaggatctgaatatgatcgtttttaacccggccaatgaagagagccgccggaaaattgatgaacaggtaagacaattcctctcttacggcggcgagtcagtccgccatgataccgccatccacaaataa

SEQ ID NO: 97504 - DNA, 561 bp, Enterobacter aerogenes
atgaataaaatctgtgtggcggtattactggcaacgacgatggcaagcggtatggcgttggctgataatcatacagtatcaatcggttatgcacaaagtaacgtgcaggattttgatgatatcaatggtgtaaatctgcaatatcgttatgagtttaactcgccgctaagcgtcgttgcctccttttcttatatgcagggcgatggtgagcagaactatttatactatggcgattcgataaaaaacagtgtcgatgtgaaatactactccttactcgtgggtccagcgtaccgcattaacaattatgtctcattatatgcgttgggcggtgcggcctatgttaaagctacaggctcgacgaaatggataaatgcaggagatgttaccgctaattatgaagatatctctgaaaaatcggcttctttcgcttacggcgccggtgtgatcattaatcctgtggagaacctttccgttaatatcggatatgaaggaactcaggccgacctggcaggtagttactcaattaatggctttaacgttggcattggctatcgtttctga

SEQ ID NO: 97505 - DNA, 921 bp, Enterobacter aerogenes
atgcagtacgagctacaaggtattcaggcatttgtaaaaatatcagaactaggtagttttacaaatgcatcacaatcactacacatctcacaacctgcattaacaagaagaattaaaaaactggaagatattcttggcacgcctttatttgacagaactacgcggcacgtaaaattaacagctgttgggcgtaattttttacctaaagctcaggatttacttaatttttatgagtcatctattctcggcattaaagaaattgcaacacaccaaaccggtatggtcactctttcgtgccttcccactgccgcattctatttcttgccttctgtaattaaagattttaacaactactatccgaatattcgcatacgtatacttgaacatggcgcaaatgattgtctggaatcagtgctcaatggtgatgccgactttggaataaacatgatcaacatcacacattccaatatcagtttcacaccgctagtcaatgaaccctttattctggcgtgtcctaaagatcatgaactggctaaaaaaacgctcatctcctgggatgagttatcgtctactaaattgataggcgtacgtaaatcaagtggtaaccgattattgatcgaccacgctttagaggagctggagtggaagcccaactggttttatgaggtccgacatttatccacttcacttggcatggttgaagcaggactcggcgtcgcggtggtgccaaagttagcgatgccccttgatgaacatccttttttagttagcagaccgctaatcgaccccgtaataagacgtacgctggggctggtacaaagaagaggcaacagattaagtaccgcggcagaaaagttcaaagaaatgctattaaatatgtggtcagaagagagcaaagatctgtggattggcaatgtctaa

SEQ ID NO: 97506 - DNA, 1080 bp, Enterobacter aerogenes
atgttccaaattccttgtgttttgatgcgtggcgggacctcgaaggggccggtgattctggcaagcgatcttcctgctgaaaccaaaaagcgtgatgcggttttattggcgcttatgggctcaggtcatgaactggaaattgatggtattggcggcggcagtccacagacgagcaaagtggcaatcgtaagtaaatcagaaagcccggatgccgatattgattatttattcgcgcaggttatggttaaagagcgccgggtcgataccacgccaaattgcggaaacatgctttgcgcagtcgggccttttgccatcgaaaagggtctggtaccggcccaggattcggtgactaccgtgcgcgttcgaaatgtcaacaccaataccctaattgatgttgaagtgcagacgccgggcgggaaagttagttatgaggggcaggcacgtattgatggcgtaccgggacaggccgctccgcttagcctgacgtttctcaattctgcaggctgtaagacgggaaaactgttgccgaccgggaacgtgacagatcttattgataatattgaagtcacttgcattgatatggcgatgcctatggtgcttattaaggctcaggatcttggaaagacgggaaatgaatgtccggcggagttggatgcagataatgcgtttatgaccagactcgaggccattcgccgtaaagcgggtaaggcaatgggcctgggcgatgtctcggatatggtgattccgaaaccggtattgcttagccagccgacggaaaatggcacgataaaagtacgctactttatgccgcataattgccataaatccctcgctattacgggatcaatagggattgcgacggcaacaacgttagaaaattcagttgccaatcaactggtaaatgggaatttagatgattccactaacaatatcattgaaattgagcacccaagcggaagtatttcagtatcacttatgcgtgggaataaaattgaagatacgcgagcggcggtaataagaacgacgaggaaattatttgaaggtaatgtgtgtgtacctgaaaatattttactgaattag

SEQ ID NO: 97507 - DNA, 1236 bp, Enterobacter aerogenes
atgactattgatgaaataaatacagatggagttgtgaacaattttaaatatgttcgggttattgttgcattagcgttatctggattgatagaactggcatctttattttttatccaacccttattgccggggttatctatgaactaccatgtgccggtgcaacatgtcagcattattatgtcggcaaaaaccgcctttatggcgattggtttgctatttactggatcgcttgctgattactatggtcgaaagcaggttattatcggctctctgttaacaggatgcgtactgactttactttgtccattggtgcaatcatgggctatgctggtgcttattcaggcgacaactggtctggcattgtgtggtattgcagcggcagccactgcatatattagtgaagaagtagcgccggtagctgcaggcatagtaacaggctatttcgttttcggtaattctattggtgggatgtctgggcgtattgttgccagccaactgatggaccatgtttccattgatgctattttttatgggtttgcagtctgtttgtttgcctcttttgtggtggtctcatttttattgccggcatcaaaaaactttacaccgacgaaaaacctgaacgttcttcgagttgttaaggagggagcgtctcatttttccaataaaaatcttgttctggcatttatcatcagctttattatttttggggtattcacatcactttataactatcttgccttttttcttaaaggcgaaccgtttaacatttcgccggcatatgcaggattgctatcgttcagttttgctttgagtttctttactgccccacaagcaggtagactttcggcaaaatatggaagtatgcgtattctgagtgcgctattaatagcaatggcggtggggatgctatttacgttagtgcctaatgtgtatgtctttattttgggttcggttattttcacagcgagtttctttggttgtcactctgtcggtttaagttgggtcagtaagaatgcgacctacgccagagggcaggcggtagcgctgtatttattttcctactatatgggaggagcagttgtaggtttcctgaacggttatatttttcactcactgggatggaaaggcatgacggcatttatcgtgatattactcgctttaggagtcttgatttcgacatatcttggtagtatgcaaaaaacaagcgccacacttattactgcagaaaacaaatag

SEQ ID NO: 97508 - DNA, 882 bp, Enterobacter aerogenes
atgaaactggtaaattatattcattcaggttgtaaaggttatggcatctataccgatgaaggtattatcgatctgaggaaacatataggcgatgaatttcctacactaaaggattttttaagtgcggattttatcaatattgcaaataaatatatccactgtccagctaatgtgaatgttaaagaaattacttttcttcccgttatcgataacccggagaaaattatctgcgtgggcatgaactatgcggaaaagcgtaaagaatttaatgagaataatccggcaccaacgctgtttgtccgttttgccgattcgcaaaccgggcaccgccagccggtactgaagccacattactcttccgagtttgactatgaaggcgaactggccgtcgtgattgggcagggtggcgaaaatattcccgcagaccaggcgctcagccatgttgctggctacagctgctatatggacggctccgcgcgcgactggcagcacacctggtataccgccggtaaaaacggtcgccagacaggcgcattcgggccgtggatgaccaccagcgatgtgatccccgatccgcaccagttagccatccgtacctggctgaacggcaaattgatgcaggatgacaatacgggcagcatgatccaccgcgtggcggagctgattgcttatatcagcacgtttaccgcattaagcgcaggtgacgtgatcatcaccggctcgcctggcggcgtgggcaaaaaacgtaatccgccggtatttatgcaggcgggcgatcgcatcgaagtggagatcgagcatatcggtcgcctgagcaacgtgattgccgatgcgccgatgaacgtggcgaataccgaagcggtttgccatcaggtggcataa

SEQ ID NO: 97509 - DNA, 1041 bp, Enterobacter aerogenes
atgtttgatagccaatgtattgacctgcgtaccgttgatgtttcccgccggccagccagtctggcggcgattcaggcgctgctggcggcaaatcagttagtgatggacagcggggtaacgctttttgtcaccgcctgggcaggggatgcgttggttggttgcgcaggtttagccgctaacgtcatcaaatgcgtggcgattgatgaccgctggcgcggtctgaacctgagcgcgcgtctgcttagcgaggtacagaacctggccctggagaagggccatttccacctgttcctctatacccgcccctgtaacggcgaacgtttccgccagtgtggtttctggccggtggcgcagacgaaaaacgtgctgctgatggaaaataccccacgcggtatctctcagtactgtgccgggctggccaaacggcgtaagccaggcgctacgatcggcgccgtggtgatgaacgccaatccgttcacccttggacaccgctacctggccgagcaggccgcaaaccgttgcgattggctgcatctctttgtggtgcgcgaagaagcgtcattcttcccgtttcgcgaacggctggcgatggttcgcgaaggcgtgtcgcatctgcagaacgtcaccgtccacgaaggcggcgagtatgtgatttcgcgcgcgacctttccctcttacttcttaaaggccaacggcctggtggagaccgcgtggtgtgagctggatttgcaaattttccgccagcacatcgcgccggtactgggtatcacccatcgcttcgtcggcagcgagccattttgcccggtcacccgccagtataacgaggcgatgcgtcgttgcctgagcatgccgtcgaacccgtggctaccgccgattcaggtggaagagttgccgcgtaaagcgcgccgcaacggcccgcccatttccgcttctgaagtgcgacggctggtggataagcaccagttcgcgatgattcgcgagatggtgccggagaccacttaccaccatctggcagataattattttgccgcaacggcatga

SEQ ID NO: 97510 - DNA, 291 bp, Enterobacter aerogenes
atgaaaatcgttaaggaagcgttatccggaacggtcgaatcaagcgacctgatggtgaaaatcgcccctgctgacggcgagctggatattgttatccgtagcgaagtgtttaagcagtttggcgaacgtatccgtgaagtcgtcgaggagacgctggcgaagctggacgttcgcgaaggtttgatcgtgattgaagataaaggggcgctggactgcgtgatccgcgcccggctgcaaagcgcggtgatgcgtgcggcagagatcaccgctattgactgggagaaaatgtaa

SEQ ID NO: 97511 - DNA, 873 bp, Enterobacter aerogenes
atgagcaaacttcgccgcagtatgttgttcctcccgggcgctaacgccgccatgctgtctaacgcctttatctaccgcccggactcgatcatgttcgatctggaagatgcggtctcgctgcgtgaaaaagatgctgcgcgggttctggtatttcatgccctccagcacccgatgtatcaggatatcgaaaccgttgttcgtatcaatccgctgaatacgccctttggtctgcaggatctggaagccgtcgttcgcgcaggcgtggacgttgtccgtttaccgaaaacggattgcccggaagatatctacgagctggaagcgcacattgaacgcatcgaaaaagcctgtggtcgtgaagtgggctccacccgcgtgatggcggcgattgagtcggcgctgggcgtggttaacgccgtggccattgcccgctgctcgaaacgcctgatcggcatcgcgctggcggccttcgactatgtaatggatatgcagaccgagcgcggcgatggcagtgagctgttttacgcccgttgcgccgtgctgcatgccgcgcgggtggcgggcattgatgctttcgacgtggtgtggtccgacattaacgacgaagaaggtttcctgaaagaagtcgatcacatccgcaagctgggtttcaacggtaaatcgctgattaacccgcgccagatcgatctgttgcacaacgcctatgccccgacgcagaaagaagtcgaccacgcgctgcgcgtggtggaagcggcggaagagggcgaacgtaacggcctcggcgtggtatcgctgaacggcaaaatgattgacggtccgattattgaccatgcacgtcgcgttctggaacgcgcgaaatccggcattcgccgttaa

SEQ ID NO: 97512 - DNA, 1527 bp, Enterobacter aerogenes
atgagtaagttaactgaagaattgcaccagaaatacgcgcatctgcgtcatctgcaaccctttaccggcgcgcataccatgacgccgtggctgtcggataacgacgctaaacaccaccgcaagctgtgcgccagtctcgaagaggccgtgaaacgcagtggcctgaaagacggcatgaccatctctttccaccacgcgttccgcgaaggcgaccgggtgatcaatgacgtcgtcgctttgctggcgcggatgggcttcaaaaatttgaccctggcttccagctcgctgatgacctgcaacgacgcgctgattgaacatattcagtccggtgtgattacccgcatctggacatctggcatgcgcggtaagctggcggaggcgatttctcacggtctgatggaagagccggtgcagatccactcgcacggcggccgcgtgaagctgctgcaggacggcgagatcaacatcgacgtggcattcctcggtgtgccgtgtagcgatgaatatggcaacgccaacgggactcagggtaaggccagttgtggctcgctcggctacgcgatggtcgatgcgcaatttgcgcgtaatgtggtgctgttgacggaagagctggtgccgttcccgaacatgccggcgagcctggtacaggatcaagttgattacattgttaaagtggacagcgtcggcgacccggcgaaaatcagcgtcggcgcggcgcgcgtcaccagtaatccgcgagagctgctgatcgcccgtcgcgcggcggaagtgatcgaacactccggttacttctataacggtttctcaatgcagaccggttccggcgcggcgtccaccgcctgcacccgctttatggaagagaagatggagcgcaacaatattgttgcccgcttcgcgctgggcggcattaccggtagcctggtcgatctgcatgaaaaagggttgattgaaaaactgctcgatacccagtgtttcgacagccaggcggcggcgtcgctggcgcgtaacccgaatcacatcgaaatctccaccaatgtgtatgccaatccgggggcgaaagcggccagctgcgaccagctggatatcgtgatcctcagcgcgctggaaatcgacaccgactttaacgtcaacgttattaccggttccgacggggtgatgcgcggcgcatcaggaggccactgcgacgtggcggcggcagcgaacctgacgattgtcgtggcgccgctgatccgcagccgtatcccgacggtggtgaagcgggtaaccaccatggtgaccccgggcgaaagtattgatgtgctggtgactgaccacggcatcgccgtgaatccggcgcgcccggaagttcgcgaacgtctgctggcggccggtctgccggtgctggaaattgcggagctgtataaccgcgccgtcaccctgaccggcgagccgaagcctatcgaatttaccgaccgcgtggtggggattattcgctatcgcgacggtagcgtgattgatgtggtgcaccaggttaaagagggtgcgtaa

SEQ ID NO: 97513 - DNA, 852 bp, Enterobacter aerogenes
atgattggttcgctggcagttaacaacccggcgatcgatatacccacgttggcagaagaagctttatatcgcgagcttgatctgacgccaaaaccgggtttagtcgatcgtgcgaataccggttcgcatcaggatatggatcatcgtctttttgagcacagcattgccgcgattagcccttggttaagaacatttgcacagcagggaatgagatatgccgacctgccctgtgggaagcagcttcgtttgcttcgcccgtttggtatagcttgcgaacaggcgatgctacgagcgacaaaaggtgttaatacccataaagggggaatcttttctcttggactgctctgttttacggccggtcgcctgcaggaacaagggcgattcatcacgtcggataccttatgccgggaagtcagtttgatttgccagggattggttgcgcaggagctggcggggcgcgatagagcagtaaccgctggtgaacgccagtttcgactttatgggcttcgtggcgcgagaggggaagcggaaagcgggtttgccaccgttcgccatcatgttttaccttcctggaccaaggagcgaggtgaacgtcagcttcatcacgcgctgttgaacctgatggcggttaatccagatagtaatcttgtttcccgtggcgggatagcgggaatgcggttcgtgcaaaactatgccaaaacgctgctcataaaaggatgggatgaagaggatttggccatcatggatgaacaacttatctcccgtaatctgagtccgggtggaagtgcagatcttctttccgtcgcgtgggtattagcttctattcatcattatccgcaagctactttgtag

SEQ ID NO: 97514 - DNA, 2598 bp, Enterobacter aerogenes
ttgttaaacgattatcgccaggcaagcgcaacgcgtgctgcagagaatattgcccctcttccattaaataaagaacaggtaaatgaattaattggcttgttacaatttccgccggccggggaagaaggttttttattatccttactgactaatttcgttccacctggagtagatgatgccgcatatattaaggctgagtttctggcgtcagtggcaaaaaacgaaaaggtatcgcccttaatttccgcagagaaagctattgaattattaggcacgatgcagggagggtacaatattcagccgttgattgaagccctggataatatgaaactggcgccaattgccgctaaagcgttatcccatacactgttaatgtttgatagtttctacgacgttgaagaaaaggcaaaagctggcaacatctatgctaagcaagtgatgcaatcctgggctgatgcggaatggtttattaaccgtccggcattggcagataaaattaccgtgactgtttttaaagtggccggtgaaactaatacggatgatttgtctcccgctccggaagcctggtctcgtcctgatattcctctgcatgctcaggcgatgctgaaaaatgagcgtgaaggcattatacccgatatccctggcattgtagggccaattaagcagatggccaggctaaaggaaaaagggtttccattagcctatgttggggatgtggtgggtaccggttcatcgcggaaatctgccgcaaactccgttctttggcatatcggacatgatattcctttcgtaccaaataagcgtgcaggcggggtggtacttggcggtaagattgcacctatcttctttaacaccatggaggatgccggtgcgttaccaattgaagttgatgtgacgaatctgaacatgggagatgtcattgatatctatccttatcagggtgagattcgtcgtcatttgagtaacgaattgattgcgaaatttacattgaaaaccgaggtgctgcttgatgaagttcgtgccggaggtcgtatttcactgagtattggccgaggactgactgcaaaagcgcgggattcattaaatcttggtgatagtgatgtattccgtaaagctaaaaatggcgcggtaaaaaaaggcggttttacgcttgcgcagaaaatgattggtaaggcatgcggtgttgaaggggtttatccgggaagctactgtgaaccgaagatgtcctcggtcggttcccaggatacgacgggtccgatgacgcgcgatgagctgaaggatctcgcatgcctgggtttttctgctgatttggtcatgcaatctttctgccatacgtcggcatatccaaaaccggttgatgtgaaaatgcatcaaactttacctgcgttcattatgaaccggggagggatttcgttacggccgggtgatggtgtgattcattcatggctgaaccggatgttattaccggacaccgtcggaaccgggggggattcacatacgcgcttcccgatagggctatctctgcctgcgggttcaggtttggtggcatttgcggcggcggtgggtgttatgcctcttgatatgcctgaatccgtacttgtgcgtttcaaaggtgaaatgcaacctggtatcacgctgcgcgatctggtacatgctatcccttattatgctattcagcagggattgttgaccgttgagaaaaaaggcaaaaaaaatattttctcaggccgtattctggagatagaaggccttcctgatcttaaagtggaacaggcattcgaattgacggatgcttctgcagagcgttccgccgcagggtgtacgattaaattaaatcaggaacctgttatagagtacctgaaatctaatattgttctgttgaagtggatgattgccgaaggctatggcgatcggcgaacgcttgaacgtcgtatacagggcatggaagcatggctcgccgatcctcacctgctggaagcggatgctgatgctgaatatgcggcggttattgagatcgatttgactgccattaaagagcctatcgtatgtgcgccaaacgatcctgatgacgctcgtttactgtctgaggtacagggcgacaaaatagatgaagtatttatcggttcctgcatgaccaacattggtcacttccgggcggcaggtaaactgcttcgttcacatgaaggcagattacctgctcagctgtgggttgccccacctacacgtatggatgccgcacagctcacggaagaaggttactacagtattttctgtaaaagtggggtaagaatagaaactcctggatgctcattatgtatgggtaaccaggcgcgtgttgctgagggtgcgccagcggtttcaacctcgacacgtaactttccaaaccgccttggtacgaatgccaatgtctatcttgcctccgcagagttagcggctattgctgcgctgaaggggcaattaccgacgccacaggaatatcaactgttcatggaaaatgtccgcgatacggagattgatacctatcgttatctaaactttgatcggattagacaatatactgataaagccaaagatgtcatctttcaggtgtcggtgtag

SEQ ID NO: 97515 - DNA, 3690 bp, Enterobacter aerogenes
atgaaactacttaataaaaagtattacaacctcgaaccaaactttgactaccttaaggactcatttattttagggctagcttggaaaaaaacggatcgttttgtaagaactcataattggtatgcagatcttttagcgctagacaagtgtgcgtttaatattagtgatgaggtcactagttggtcaagtgaggccgtaaataggaatctgtctaaaagtgatattgaattaataccagctccaaaaggagcaagctggttctttaataaagggaagtggactactaataaagatgatagaaaactaagacctttagctaatatatctattaaggatcagtcttttgcaacagcagtaaccatgtgtcttgctgatgcgatagaaacgagacagaaagactgctcattgcgtaatcttggctatgctgagcatgtaaataaaaaggttgttagttacggaaataggcttgtctgtgattgggacaatgaaagggcgagatttcgttggggcggtagcgagtattataggaaattctcctccgattatcgaaactttctacaaagacctgtctatataggtagggagactgtaaataaaattagtaaaattgatgatgtttatattatcagtttggatctgaaaaattttttcggttctataagaataagcacgctgttagaaaaacttaagaaaatatcttctgaccattatgatcataatattataaatgagaatgagttttgggatttagcgagtcagattttaaattgggagtggcctgaagactctttatctttacttaaaaatttggatattgaagaagaaaatgttgggctcccacaaggtttagcatctgccggagctttggctaatgcatatctcattgagtttgacgaatctttaacttctaacctccgtactaagataggcgatagccaaattgtactgcatgattattgtcgatacgtcgatgatattagattggtgatttctggagaagcattaacaaatgaggaaattaagaaatccattcatgagttagttcagaggatcctcgatgaaacgttagatcaagatgagtcaggtaacgaaccatatttaaaaatcaatgataaaaaaacttatatattgggactctcagatattgataacggaagtagccttacaaatcgaatcaatgaaatccagaatgaagtaggaacttcgagtattccagagcgtaatggattagataataacataccggcgcttcaacaattattattgactgaacaagataattttttagatgatgcagatggtttattttctggatttaacaatgataaatcgattaaattagaatctttacgtagattttctgcccataggctggaaacaagtttggctaataaaagcaaactaatctcacctgcagaaagaaagcagtttgataatgaatctgcgttgattgcaaaaaaattattaaaaacctggttaaaagatccatcaattatggttattttccgcaaagcgataaccataaaccctaatctagatgcttataaaacaattcttgaaattatattcttaagaatacaacgtaatcgtgataaatgcgatagatatatcatgttgtatcttctctccgatatatttcgtagcgttgttgatatctatcgaaaactatccccagagtgtacctctgattataagaaattgatgagtgaagttacatcatttgcccataaactactttcttgtagatccgttattccaaactacgcatatcagcaagcactattttatcttgcagtgatcaataagccatttatagctagtaaaaaatcttcttctgatctttcaaagcttcaaaatgtcttaattaaacgacatttagaaccgttgagtagtagtgatggatacctatttgaattatctgctcagattagtaaagactaccaagcaaatgttgcttttctactttctcatacaaatactactgaagtggtagactcaatcgtcgagaaatttgcttaccgtggtggtgagttttggaatagcatttggaaagagtttgttaggacgcaagataaagttaggatcaacaaatttagatgggccataccaaaaaatgagtcgaaaccaaatggttcggaccactatctttcatcagtgataagttttaaggaaaatccatttaaatacgaacatgcgcttctcaaactaggtatagcattagttaatcttttagaagatacagagaaaaacgtatggcaatctaatggaaagcagtattcccctcatgaaataaaagtgaaattagaaggccattcaacatcatggactgaattatggcgcccaaattctattatttcatgttcgatagataaaatagctcaagatcctcgctatgaaagccctaaatggttggtgaattgtcagcaagccaaaaatgatgaaaaaaaaatatattgggtttgcagtgtactaagaagtgctgctttaggtaatgtagattacacacagcgaaatgatttaaagcctgatagagtagagtatgatgggatccattctcagttttacaagcgacgtatgggaatgttacatacaccagagtcaattgttggttcatatgcaactataactgattggtttgcaagctttcttcagcatggattgcaatggcccggcttttcatcttcatatataaatcaagaagatatattgtcaattaccagccttggtgagttcaaaaaatgcttgttggaaaggttaggctacctgaacacgcaaatatgcacttcatcgagtgttccgaccttacctactgttgtcagcagacctgaattggcatctaactattttagaattgttacggttcagcaattatttccgaaggataagcattttcacccttctgatgtaacacttgataatccagaggtgcgttggaaacacagagagcaccttgcagaaatttgtaaactgacagagcagactttagatgcaaaacttaaaactgaggctagggatcatacaagtaccgctgatctgattgtcttttctgagttggctgttcacccggaagatgaagatatagtaagagctctggcatttagaaccagatccatcattttttgcggttttgtcttctgtaaacaagatgatcaaatagttaacaaagctcgctggattattccagattcgtccgaatcggggactcaatggcgtgttcgtgatcaagggaaatttcatatgaccagtggtgaaatgactctgggtgttcatggatatagaccatctcaacatattatttctattgagggtcacaccgaaggaccatttaaattaactggtgcgatttgttacgatgcgacagatataaagcttgctgcggatctgagagatttgactgatatgtttgtcattgcagcgtacaataaagatgtagacacgtttgacaatatggcttcagctctacaatggcatatgtatcagcatgttgttattacgaatactggagaatatggtggctcaacaatgcaagccccatacaaagagaaacatcacaaactgatttctcatgctcatggaactggtcaaatagcaattagtactgctgatatagatttagcagcatttagacgaaagattaaagaatataaaaaaaccaaaacccagcctgctggatttaatcggaaacattaa

SEQ ID NO: 97516 - DNA, 435 bp, Enterobacter aerogenes
atggaaacattagttaagttagctacgattgcttctccattagtcagtgctggggtagctatttgggcaattttagttgccaaatcaactatcagtgaaaacaaagaaatcgctaagaaaaccattgcagatacggcctaccaggcatatttgcaactagcgatggagaaccctcatttttcgaaaggttatagtgcagattgtcgacaggagcgagaccctatgtatgaccaatatgtttggtacgtggcaagaatgatattctgttttgagaaaattattgaggttgaaggaaacctaaaagatagctcttggacgaatacgctggaaaaacatttgaagtttcattctgaacattttaagaaaacaaaagttgttgaagagacactctatatttccccaattttggatcttataagatgtgcgactaactaa

SEQ ID NO: 97517 - DNA, 1317 bp, Enterobacter aerogenes
atgtctgtaacacgtataagagtgaaagaacgtgacgctattattcagtcacttaagtcaggtgtaacgccaaggataggcattcagcatatccaggttggccgcgtgaatgagatcaccgctctccaccaggatattgagaggattgctgacggtggtgcaagcttcagacttatcatcggtgaatatggttctggtaaaacgttctttctgagtgttgtgcgctctattgcgctagagaagaagctggtatcagtcagtgcagacctttcccctgacagacgcattcactcatcgggaggtcaggctcgtaatctctattctgagcttatgaaaaacatgtccaccagaaacaagccggatggtaatgcgttacttagcgttgttgaaagattcgttacggaggcaaggaaggaagcggacacggacggctccgaggtttcatcagttattcataaacgcctggcagctctgtcagatatggtgggtggatatgactttgcgaaggtcattgatgcattctggcgcgggcatgagcaggataacgaaacgctaaaatccaatgctattcgctggttgcggggagagtacaccaccaaaactgatgcccgtaacgatctcgacgttcggactattatctcagacgcttcattctatgattctttgaaactgatgagcctttttgtccgccaggcaggctatgccggtcttttggtcagcctcgacgaaatggtgaacctctttaagctgaataatacgcaagcaagaacagcgaactacgaacagattttgcggatcctgaatgactgcctgcaaggctcagccgagaacattggttttatcctcgggggtacgccagagtttcttttcgatccgcgtaaaggtctttacagctatgaggcgctccagtcgcgtctggcggaaaaccggttcgcgcaaaaggcaggagtgattgactactcatcccccactttgcatcttgccagcctcacccctgaggaactgtatattttgctgagaaatcttcgtcatgtttatgcaggtggggatccagagaattatctggtaccagatgaggcactgactggattcctgcatcactgtagtaaaaccattggagacgcttacttccgtaccccccgtaataccataaaaggtttccttgacatgcttgccgtgctggaacaaaacagaacgatgaactggcaaacattaatcgagggtgtggcgattgaagtggacagacctagcgatatggatgacgccattatggaggaaagcgatgacgacgacggactggcgaacttcaaactatga

SEQ ID NO: 97518 - DNA, 2310 bp, Enterobacter aerogenes
atggagttattgaagtttctggcggcgattttagtaatttacttgttgttttttagaaagaaaaaacgtaaatctccaaagtcttatgcttcaaaccccgtgaaagcaccgccaaaggaatggctcgctgacatcaagaaaaaagaggcggttgtgcgaaacgatgatagtgaagacgataatcttgcaacttttacattgagcgatggccggggtgttgaacttcgggtgacaaccaatcattaccggaacacctcaaagtcagcaggtgcactagctcgatgggtacttccgggtgagatgataactgtagctggtgtagcaattagcggtggccacatttatgtggggcaacgtatgaagccctccggtcaggaatcaggcggctattatgacgatggaagtgaggcatcattaattgatgacacatgtaagataaaacctactgcttatctttacgaggacagttcattaggatactggcccagttttacctctctttccccagaagcacgcggtgcgtatgtcagttggctcgccagcgataggtctgatccatcgtgtcctatcggctatgtttttatctacctctacggcctggaaagaaaagcgctcgtagattccactgacccaaaattccctgatgctgagttccgtaatctgttcaatgaagtcgctcggttaagatcggtattcattgagaaccgctcattccgcggatattcgacccaattactcgaagccatgtctattctgcgctcgaacatgggcttagccactgagctcgatagcaattcaggtttcagcaacagcatgcaatttaagctggctctggcaaaaactgtacatgaaggagttcctgtatcagctgaactggcgttgaactgggtattaaatcacaccgagtattcgctgcgtaccccggctcgccgctgtgctaaagagtttgctgcgcttttcaaacggcgttacaccctcaaatatggtgaagggatggtcgttaaggcgaataaaacgcgcttacgtttagattacacacctgcaagtcctagtttacgaggcgtccgacttcctgttcccgacctgcctgatccaattgcattgaagggacctgtccagaaaattatggctcttgccgacatatgtacggatgaacttgatgcttatagtcgctaccttggtaggaaaggtacgtcagtcaatgatacggctgcaattatgttgctcccttctgagatcgttaatgaaagcgcagaaaaaatattaagctcattcaaacgctgggctgatgaggcgatcctcgtcaaggaggggttagtctcagttgctgacttttgggcacatatgaatgccagttgccccaataaaatcaataaaaaagaggccgatttgatgcaggcctttgctctgaagatgggttacggtctggcacctgacccgtattatcaccatgtaaaggcggatgttgatgggaaacttgttctattccctgccgccgaaggtggacgcttctcaccttcttctgaatttatctcggcagtaatgacgctcagattaggggcgatggtcgccttgattgacgattctcttgatcaagctgaacagaaagtgcttgagaatgccatcaacaacaatactggcttcaccgatgatgaaaaacgctccctacatgcgtatttaacgtggcaacttcataccccagccaatatgacaggaatgaaaagcaggattgagttgatgggggccgcggaaaaagctgctgtgggtaaagttatcgttagtgttgcctgttcggatgggacaatagcgcctgccgaaatcaaacagcttgagaagatttattcaagtttggggctggatccctcatctgtctcgagcaatatccatcagcattccgcaactgaacatgatctcgtctcgtctgtaccaactgctcagtcagcagcagggttcacactggatgctaatgtacttgcccgccacgaatctgccacggatgatgttcgtaaattgctgaacacaattttcaccgaagaagaaccggaagagccagaaagcgctccagcctcattaacggaggcgggggggcttgactccgcacatagccagctttatcgcagtttgctggagaaagaacagtggtcccgaaaagaggcgacagaattgtgcggaaatttgaatttgatgctgggcggtgcgcttgaggtgatcaatgactggtcctatgcggtggttgatgctccagtactggacgatgccgatgatgatatctgggttgacctggaaattgccaaagaattagagggatag

SEQ ID NO: 97519 - DNA, 342 bp, Enterobacter aerogenes
atggacttcaacattgttgccgtaaccgcctgcgtgagcggggttgcgcatacctatatggcggccgaacggctggagaaagtgggacatcatgaaaaatggcatctaaaagtcgaaacacagggcgcgctcggcgttgaaaaccggatcaccgctgaagatattgcccgcgccgaagtggtgctactggtgacggatatcgaaattgatgacccgaagcgttttagaggcgtccgcaccattaaaaccagcattaagactgttctactgcagccgcagctgattgttgaagccgtcaaaagtattatgaaaaagccggtcgtgtatctggaaattccctga

SEQ ID NO: 97520 - DNA, 993 bp, Enterobacter aerogenes
atgattaataacatacaaatgttaagggctttagctgtaataatggtggtagcatatcattctgtcggtatagtcaataaatatgggtttgggtttgtagaccataccttaataggaagatggggggctttgggggttgatatattttttgttatttccggatttattatggcgatgatagatgataataaaagaaaatccccttatgtatttgcgaaagatcgagtgttgcgaatagttcccatttactggatgatgactgttacattgatattaattcaatcgatcatgccagaaatatttagggatacgatatatacaacatatcaaaacattgcatctttgttttttgttagtagttatttaggcttcaattaccctactctatacgttggttggagtcttgagttagaaatgtttttttatgccattttttcattgtgtttatttattaaaaatcacaatattaaaataatttctcttgtcggaataatatttgtgctatctatcttggggctaattaaacccatttctatggagtttgcgtttggtatcattgcatactatgccagtaaaagaatatcattaatgcaggccaatatcagactactccttgtaacaacgttaatcgcgatggttttattttattctctatcaatcccagttgatttatactccatcgaaagacctctattcgcgggggtaatttcattttttattgtgtttgttgctgtactttgtagagatgtcaaaaataatattttcacggagattggtaacgcttcatactcaatctacttggttcaggtgttctcaattccgctgataactaaaataatcgtaaagctaggctttaacttgagtggtttgctcgtctttctcatagctacgatatttaccgtggtttcagggtatatcttctatatattgatagagagaaacattgttaaagtaagtaaaggatttagaattagacgactcaataaagtataa

SEQ ID NO: 97521 - DNA, 1746 bp, Enterobacter aerogenes
atgtcatctaagcaaaaattatacagctatgtgcgctggtcaagcgagaaacaatcagcaggcacttcatcagagcgacaaacatcccgcgcgatgagatttgccgaagagaatgaacttgaatacgtcgaaattaaagatgctggtgtttcggcgttcaaaggtaagaacacgacccaaggtaaactaggtttgttcatctcggaagtagataaaggggttatacctcgagatagctggttatatgttgaaaacttggatcgtctgactcgagaggacgtacttactgctaatgagctattccttcgtttgcttcggatggggttgaccatagtcactggtatggataacagggtgtttactcgtgagagtgttaataataaccccatggatctaatggcctcgatcttgatgttcatgcgtgctcatgaagagagtaagactaagtcagatcgagtcacttcgcatgttttagcccttcttgaacgccagcggaaggggttacctgtgaacataaaagctattggcaagcatccattctggattgatgatagtggttctgcacatgagaaggtaaaaaaacaccctgacttctggctaccagcgcaggaagctgtgaggctcttccttgaagggcatggagctttttacgttactgactatctcaaccagaactatcctgttcctcctgcctttaaaaaaacgcagcgtagggaagggggatggcctttacaggctataaaaaaaatgagagccaatatggctttggttggaacaaggattttcaacctgtcaggtaaagaataccgtcttgaaaactattatcctcccctttgtaccttgggtgagtttgcgcaacttcaagacatcaaggcaaataacaaaagatatagtggcaaaacttcgacagcaatcaatctcttaggaggtatgaagattctccgatgtggccattgtaaaggtacgatgacagctttcttgcagagaggacagttacgttatatctgtgaatatggtcgctcgggggggaattgcacggcctggagtttgaaagcatcaatcgttgaacgttgtttaatgccggtgttgataactggttttctgataggggcttacaaaactcatagtgatctatctcttctggataaacagacgaatgaacttaaagaacaacttaagaaagttcagagccagcaggataatgtcattgacgcaattgctgatctcggaagaacaccgaaattagatgctaaattcaaagcacttgaaaacgaagaacaaagggttagtgggaaattgcagcaactccatcaggcaaaatccttgtatgccagcacgaaagatttctcggagaacattgtagattttgttgctggggagtgccattggatgattatctctgatgttcacaatccaaagcgggaagcgctaagagaacggattcgcagtgttatcaatgaagcaattgtcacaaaagataatcgatgcattcgtatagagtttcgattccccacaggggaaacttttgttttcgcggggagtcgtcctggagaatatgaagtttttcttcctcggaaagtacatgatatccctccagatgccactgagcaggaaatcaacgaatgggaaagatcagattacgaatacaataaaaattttctcaagctatggtatgaagtggtcaacaagaacttgctttctcactatcctgctattgacgggaaagatttctggccaaaacgataa

SEQ ID NO: 97522 - DNA, 495 bp, Enterobacter aerogenes
atgacaacaaagaaagaactatctaaccagattgacccagaattgcagatttttatcgataagatcgctgcaaaataccaaccaaatccagaagttttgcagcgccgaattgaaaacgccgaagcccgttataacaagttccagaactttgcagacattccggcgcggctggtggacaggctccaggccctgatccttgacggctggcggtttcatctttctgggcctgcttcagtgcttgccaattcatcgatgatttccgttactttgcaaaagcctgccccactgatcgaaacagaactcaaagaactgcgttccaaggcctccgactcatataccaatgaactgttttcaggcatggagcgcgagatcgatgaattgatgcaacaagccgccgaggactcgcagcggaaagccgagaaacaagcagaggcagaacaggccgcaatgcgggatcgcttacgctctctcctgagcggtggagctaaagcatga

SEQ ID NO: 97523 - DNA, 132 bp, Enterobacter aerogenes
atgacagcgaaaccaaagaaaggggatgaatgccccattcatgtgatcgacgagaaagcgttgaaacgcgctatcaaaaaggcgaaagaacttgccgatgcagagccggaaaaataccgccgaataaaataa

SEQ ID NO: 97524 - DNA, 735 bp, Enterobacter aerogenes
ttgcaacaacagacacaaacagaattaccccctacacagttagcacaaccacaaaccacgccttacagaacagttgtccacgatcacgggcgctatccggtcatcacgggcgacaaatttttccataacggctacctctatcccgtcaatactacagccgaatccggtgttcggttagatatccttaccccgatagccgcagagcttgacgcaatactgagttcttatagtcgtgtttacctcacccgctttgatcttcgcttaccagcaggcacacccgtagacaccgccaacgaatgggtaagccagctattcaagaaactacgtgagcggctgaaatcgaaatttcgtagacctgaaggagttgcagatccgatcctcaacttcgcttacggctgggtgcgggaaaaagaaatggcaaaacaggtacattaccattgctggatagcccttccgcaccggcaggtaaaacgacttggaacgccaacaagtggcattgctggcgctattacggaaatctggacgagtctgtcaggaggtgagccaacgctgttggagtttccaaaatcaaacgacagatacacgaaatactatgttatcgaacgagataaaccggaaacccttgaggggccaatcctctggttgtcgtacctggcaaaggagcgcgggaaatatcagacgggcaaaggtgacaaggttcattcgacttcgcagcttcgaaacaaaaaaccatga

SEQ ID NO: 97525 - DNA, 579 bp, Enterobacter aerogenes
atgagccgcacttttgcatattgccgtgtttccaccagcgagcagaccacagaaaaccaaatcatggcaattcgtcaggctggctatgatgtgcctgataatcgtgttgtctcggaaactgtatccggtggcgtgcaggcaatgaagcgtaaaggcttcgccaatatgattactcataagctggaagccggggatcggctggtggtgcttaagctggatcgtctgggtcgtgacaacattgatgtgcagcaaactatagcgatgctggtagaaaaagagatagatgtagtgtcgctggacctgccggtgcgtaatctcaccagtgcggaaggaaagttgatgcttcaaatgttctcagctttcgctgaattcgaaaagtcccgcatcattgaacgtaccaaagagggcctcgctcgggcgaagaaggaaggtaagaagttaggccgtcctgtggcgacggatacccttaagcgtgtgcaggaagccaaagcgaagggattgagtcagtcgaaggcggtgcgtgaattggggctgagcctgcccacaatcaaacgtaactggaacattaaagaagcgtaa

SEQ ID NO: 97526 - DNA, 1752 bp, Enterobacter aerogenes
atggataaagattggattcttcaacagaaagagactcgacgcacattttcaaaatcaacttggatacccctgcggcaatcgtcagataatgagcagggaaatgttaaggatatcggctacaccaatgaattttttggatgtggatcagttgcatttccgccagagaatcgggaagtcgccgaagacttaagctggggggaaatcgggattggttcaacgatatcaccttacgcatacaaggacgggtattattctactattgatgaataccaatataatgataaagacccaattggcgttcacttagttctggaattgcctaggccagtagtcgggggaaggcagtggatactcaatcctgatcttgttgcagcactgcgcctcattaaagagggagaacaatgggtcagaccggaagaaaattttgtagttgtcgctcgtgaagttctcgacgaaaagggtgagcaacgtctgatcgaaatcaagagagaatttttacttgattacttagctgctagaaatctgtcgttacgactctcttattatcgtcaacgagtggaaaatgtggcttcatttgaaactagtgaatatgcagaattagatagccataaagaacagcgcgatggtgggcgatacgagttactaatccgagaaataaatgatgtgtttggcggcagttgggcgctgttccgtacatggagaacagatgtcgacgaagatgaagatgctcctataatggggccagaaacagacgagaacaccgattatgaaaaatctgaagggcgaaaaggtggttatgacggtgttcgagttgaaggggaattttggcgagatgagtggattgaacaccaaggaattagcacacgcgtaagaggggactcagataaaaatctaccatccttcatcgttgaaacagacgggacccggttgccgtctgtcgaactagataatgaagatgttgggagatggttatggtttcgctccagcatagtaaacgagcttcttgagcttcgaggtttttcacttcaatggtattcagcagaaactggagggatcatttctacttctgggtataagatccattttggtataaattcttccgatttaataaccatttacgcttatgatgtggcccgccttccggcgtgggagcaacacatatgggcggctcataacattgcacctgatgggaaggtttcaagtgagcttttggattctcaggtgaaggccaaaccagcatcaactcatgcggtggaagagctatttttccaagtcacagattggcttgaaggtggctttagagaagtcttcaacgttccgcttttcacgcacgacatcgatcgtactgaggctatgaagcaagtttcccgctttgccagcaaagatcagtcgtctcttttgaggttagcaaaagaacttgtacgtgttttttctgatcggttggatgtacgcgagcttcgtaaactttcgacacacgccaataaggataaactgggttcaaacaagctgcttgaagacatattggcccaaaaaattggacaagagaaagctcgaaaagtatttggccccatagcaggggtgtacgatatgcgtgtaggtgatgctcatccaacaagttcgaaaattggggacgcattaaagctcgctggtattgatggcagcaattcatacctgaagcagggcgaacaactaatatccaattttggccaatcaatttggtggattggaaagctactgttcaaagaaaactga

SEQ ID NO: 97527 - DNA, 573 bp, Enterobacter aerogenes
ttgaccactaatcaactgaaacaaaagaatttgtacttctatttctacatggctgcaccggcagtgttccccataaccttttactttacgatgcacgaaaaggcggcctatgctgcgttgtatgcggttttgttgatctgcgtcgtttttgaccaacgggcgttggttcggtctggtgcagagtccgaaactcatatcgtgggatctgcgctggggattgttattttgccccccatttatgtatacgctcgcgccagagacactgggatgaaaaaatggcgctggctgttagctttcatcgcaattacgctgggctgtatttttatcagcacaaccatcgatgataacgaagccctgaagagatcggcctgtgagatcaccacctcgatattcaaagacaaaaacagtgatgttcaatgtcttgccgtagaggacgtaaagaaagtttcagataagcattatcgcgcaaaggcggcgttgtcgaatggagtcgacatgccgatcaccatcgaggaacgtggcgacgattatatttatgtcacgctggtaccattgagcggcttgcttgattga

SEQ ID NO: 97528 - DNA, 210 bp, Enterobacter aerogenes
atgaaaggctatgcaatgatattgtgcggtttaatggtggccttcaacgcaagcgccggacgcgtgaccatgagcaacccggaacagtccaccacggcgaacgggcagaccctgtgcgtctactccaacagcatctacacctttacctttgtcactaggtcgaaacactgcccgtacagcaaaagtttcgacactgacgaaagtgaataa

SEQ ID NO: 97529 - DNA, 414 bp, Enterobacter aerogenes
atgaagcagtacaccaacgaacttaccgccgaaatgctggcatcctttgaccagtcactattcacagccgaacagctcacgggaatgaatgaagaaatccgtaccctgatcgctgaaagaaacgcctacaatcttgcccatccggttacagccgcttatctggttgctacagaaggcagcttaacccgcgacggcggaacggttttcagtgaatacaacgggcagcagattgaaattgagggtggtgtacgattaaacgtttcacttgtaggggatgaagttcgttatccagatggtactaccgcgaagatagtcctgaaggagttgttcaagaggtcaaagaatggcgcaaagccaatggtaaaccgggctttcgtgaagaatgagcttgcgacactaagcattaaatgctga

SEQ ID NO: 97530 - DNA, 738 bp, Enterobacter aerogenes
atgcaaaaaagcattaagctggcggtagccaccgccgttttatcttcggtattagtcctctctgggtgcggtgcgatgagcaccgcgattaagaaacgcaaccttgaagtgaaaacgcagatgagtgaaaccatctggttggatccctcttcacaaaaaacggtttatctacaggtaaaaaatacctcagacaaagatatgtccgccctccagagcaaaattaccaaggcgctacaggataaaggctataccgtgacaagctcttctgataatgcctggtactggattcaggcaaacgtgcttaaagcggataaaatggatctccgcgagacgcagggcttcctcaatcagggctatcagggggctgtggctggcgcggcgctcggggcagggatcaccgcttataactccaactcggcaggcgcgacgctgggtgttggtctggcggctgggttgattggccttgcggctgacgcgatggttgaagatgttaattacaccatggtgacagatatccagatctctgaaaaaacaaccaacagcgtacagactgataacgtagcggcgttgaagcaagggcgttctggctataaagttcagaccagcacgcaaaccggtaaccagcaccgatatcagacgcgtgtggtctctacggcaaacaaagtcaatctcaagtttgaagaggcgaaaccggtactggaagatcagctcgcgaaatctctggcgaatattttgtaa

SEQ ID NO: 97531 - DNA, 1251 bp, Enterobacter aerogenes
atgaaaagcagattcacattatgtgcattaacgctactttctctccaggctaacgtgcatgctgcgggttttaactgtacgctggaaacgctaaatgaatcggaaaaaacgatctgtcagactccctatctgagcggtatagataacgttgccaatcagttattcataaacgcagtaaataatacgctatcaaaagagatagtgcagtcagggcaaacaaaatggctcaaggaacgcaactcctgcaaggccgacgttgaatgtattaagcagaaatatctgttgcgtaactcggaactcagcagcattgaagcctttcactctttacctgaagtttttccagcgtctctgctcgataagccatttaacggtgaaatgaaaaataaaaatggctttgttattcgggataacccctggcaggtaaaaaaactcttcgactttgcgcaaaaagaacgtagtttcgatatcgatagcggtgactggtatatactaacgcacctgattgccaataataaccttgcgattatatttaccatcagaggagattatggtacctatctcgtgttaatttccgacatgaccgcaaaatcttatatcattgactcttacaacggagactcagattcagaatcaacaccggaaatcaccctcgttaagcgtgatagcagtggttttacctatcaagtttctaatatatacgatgccactcatcaaaaatttatatctaaatattataaaattgaagtcaatagcagcgaaatatctaaacccatcgctatttcaccgccagcgaatatagataaagaaaaaacctggacaggctactgcggtcgattctcctgtgatagcgagttacgctccccggatgggcagtggcgattggcctcaggcgaaggcaccattccacatcaatatgacggggtgtactacttcccgcacgatcgtccagaccttggcgtaaacgtctttttatcggtcggcgatcggaaagaggatggctggagttactctcgcaactacgcctggggtgacaaaaatagtttcttctttgacaatgatggcgggttggcttgcatctggaaaaccgacattagccaaaaaacaacggagcgtattttacctgtcgaagggctaaagtacccttattacctccgctatgataatgaagactatgtcatctcccaatatattccaacaggagatgctgatagtcatttagccggattttacattgctcgcagcgggcaataa

SEQ ID NO: 97532 - DNA, 1503 bp, Enterobacter aerogenes
gtggctaagataatcattaaaaaattacggcatattaatagtcttgagtttgatattcctagcactggagtttggttgcttacaggcaccaatggtactggcaagtcatctgtcctaggttgcctgcgccgaattgggtataagaacgctttccctgtccactttccagcatcacggaagtctgatcgacttgactccaatgaaggggcctcaattagttattcgaacagtaacggtgaggttgcatatacttacgttaccgaacgatggtcaccaactcccaaaagtgctagtaagttcttagaaagtttaggttatcctgaaactatttatgtagccgctgatgctgaccggattgaaccccgaaaggaggattttgcaccaaataagcttcgccctgctcagcaagatatcgtcgatgctgctaataaaatctttgggacacaaaagttttctgctttgaagattaccaacgttcgaacgggtattggttctcaagcgtttgttttagagctgccagctcatggcaagcaagctaagagttattactcagaaaagaattttagccttggtgaaatctgtattctgaagcttttgcgtaagttatcttcatgtaagcgtggagctatgattttaattgatgagattgagctggcgttgcatccgacagcgcaagcggaattgcttgaatatctcaaaaagatcgcaatagataaatcacttacagtcgtggtgtccacacactcggctaccttaataaaacaagctagcagaggcagtattctgcacttgcaatcggatgcgaatggccatgtaatttgcgctaaaaattgcttcccttcctatgtgttaggtgcgttggcataccaagaggagtcagcctctgacgttgtcatatatgttgaagatgaagctgctcgaacgattcttgaacagtttgtacgaagatttcttgcagagtcaattgcggcgcagtacctaactccaagtgtagccgtaattgcggtgggaggctttgtagaagtattgaggttttacgtccggcagcggcccatgctgccatcaattacgcggtcttacgtgatgcttgatgccgatgcggaagatggtctcgagaatgctacgaagctcgacctgatcagcatctacagagacgagaggcaaagaatatcctttctaccattcacgccggaggaaggagttgctcaatatatacatatgaatagagagcacttagaggctgaagttcgtcgatacttcgggctcaatagtatacaccttcgatcgcgcgatgtccggcaacctcctcagcagggagcccctaagtcgcgtgatatttgcaaggaaatagttaacgaagtttgtaatgcattattgctccagattccgaacgtgactttcataagtgtaaaggaaacagtattaaagatttttgctgaacactactttgcagcgaatcggccagctatcatgcagctagttgggccaataatccgaggttag

SEQ ID NO: 97533 - DNA, 735 bp, Enterobacter aerogenes
atgcaatcgataaaaatattcacatttttgatgggctgtttattttcattgccaatatgtgctgccgagaacaaatatcaatctttaggcttattgataaatgcagggaataataactacctgttctatagtaagggagaggtaaaggagttattgctgaataggaaaggtaagccgctgatggcgaagaaacatgcgtgtgcttctgtttcctactttggaagtgatagtgagatcaaaagaataaataatatcgtatttaatcaagatgataaatgttatcgaaatgaaggggtaagtaagctttacgtttcggagtacgcttatggcggcgcgccgaaaggctttaaagagatgggggaaaataaagtgtatcttgcgtataattatactccagataaagaaaacaggtttttcttctaccttgatgggcggattaaatattatgtatttggaaattatgacaatctctatgttaagtctgaaatgtgcaatgtcaataaaaaagtaatgacgtgcaaacggtataatcagtcaggtcccgcaattggccgacttaacgaagagataaactacgtggatgtctatggaagctatcaagaagaaggagagcatattttatatgatcctgatggaagcgttacattgattgaaattaaaaataaagatgacaaaaaatataaaatcatattcgaccggtatccggaaagaagaaaacgctttacctttagctaa

SEQ ID NO: 97534 - DNA, 729 bp, Enterobacter aerogenes
atgaaaaaatcccgtttaatcccgcaggcaaaatactgggatgaagatctatccgaaccaacggaagaacagcgttactatccccggttgattcgggtaaatgaaattaatgatgtatggatggagatcccgcgttacgaaaatcacggatggggagggctatggttttttgcaattatttcacttatacccctttgcaatttttttgctatgactattagcttaggctttatatatgatttatttggcaatttaatatatttttttatatgtatctcattcccactgttttgttttcgaacattattattcgttcctcgtggtgctcctgtccgttttaatcgtaaacgccagaaggtgtatgtctatgagcatcagcgtagcgtctggccatggaagcgttggccaacaaccattaaggtgttcaactgggcagatattcgtggcgaaaggatatttatggccggacgcgcagattatggccaccgcttgtattgtgcagtctgcaaaccaggaacagacgaggttgtcgaccgatttattcttagctggacggtgggcgatataaaaatgatttacgggctatggagccattgctgtcaatatatgcagggcaaggccgtatcggataaaccgctgaagacggaaattccgcttagctggacgccatttaaaaatatacactggccagaagagattgaccgggaatcaacaacggccgcctcatag

SEQ ID NO: 97535 - DNA, 564 bp, Enterobacter aerogenes
atggcaattaaggatttttttgtacaaactgcaccaggtcggcgtcgctatggcgtcgcattattagttggggttattgccggaattatgtcggcattcgttaagtggggggcggaagtacctctgccgccgcgaacattttccggtgggcgtgatgaatttaatcctccttatctctttttacgcgactatcttggcattgaccctacacataccgtctacaccttctctgagcatatcatcaacccggtaatggtcacgcatatcatcttttcgctggtgttcgcgattggctattgcgtggtggcggagatattcccaaaagttaaattatggcagggagtgtgggccgggattgtcgccaccattgcggtacactggatttcatttccgctattaggacttacgccgtcgttattaaacattccggctgatgaatatatttccgaactgcttggccatattttttggttctgggcaattgagatgatccgccgcgatctgcgtaaccgaattacccatgagcctgacgcagaaattccgttagatgcgccattcagataa

SEQ ID NO: 97536 - DNA, 759 bp, Enterobacter aerogenes
atgaccacaactatcgatatcccacgtatctttaccatcagcgaaagtgagcatcgtatccataaccccttcacggcggaaaaatatgccacgcttggccgcgtacttcgcctgcaggcaggggcgcaaatcctcgaccttggcagcggttctggtgaaatgctctgcacctgggcgcgggaccatgctatcggcggtctgggcattgatatgagcccattgtttaccgcgcaggctaaacaacgcgccgcagcgcttggcgttagcgatcgcgtcacttttctccatagcgatgcggcaggttacgttgccgaacggcaatacgatgtagcggcctgtatcggcgcgacgtggattgccggcggcgtcgctggaaccgtggcgcagttagcccgcagccttaagcctggcggtatgctacttatcggggaaccctggtggcgtaaggtacccgccacagaagaacaagcgcgcgcctgcggcgtttctgcggtggccgatttgttgccgcttccagcgctggtcgccacttttggcgaactgggctatgacattgttgagatggtgctggctgaccgcgaagggtgggaccgttatgaagccgctaaatggctaacgatgcgccgttggctgcgggcgaatcccgatgatgagtttgcggttgaggtacgtgcggagctcgatgccgcaccgcttcgccatgtcacttatacccgggaatatttcggttggggcgtttttgcgctgatgcagaaatag

SEQ ID NO: 97537 - DNA, 540 bp, Enterobacter aerogenes
atgacaaaacttaccttacaagagcagatgctgaaagcgggtctggtcaccagtaaaaagatggctaaggttcagagaacggcgaaaaagtcacgtgtgcaggcgcgtgaagcccgcgaggccgttgaggaaaacaaaaaagcccagcttgagcgcgacaagcagctcagcgagcagcaaaagcaagcggctttagcaaaagagtataaagcgcaggttaagcagctgatcgaaatgaaccgaatcacgattgcgaaaggccatatcgcttttaactttacggataataatctcatcaaaaacattgatgtggataaaaccacccaggcgcagctcattagcggccgtctggcgattgcccgtctcgctgttgataataacggtaaatatgaatacgcgattatccctgccagcgtggcggataaaatcgcccagcgcgacgccgagagtattgtgttgaacagcgccctgagccaggaagcagaggacgaagacgatccgtacgctgactttaaagtacctgatgatttgatgtggtaa

SEQ ID NO: 97538 - DNA, 525 bp, Enterobacter aerogenes
atgaaaattcttattacgctgttatgcattgccgcaagcgtatcggctttagcgtctgagagcagtttgacaagagaaatgctggcaataggcctggaaaaggcgttgttgtgccagaaaaacgacgtcgctattggcgccgacgctgtgcgtaacatcaccggcataaccgtacaaaagaacgatgatccctattacaaccagtttctttacagcttcaaagaacctatagcggtaaaccaactcgcgctgtatagcgttcaacagaacgtaggggaaggcggtgtcgtgttactggccgagacagctggcaaggtgcaaaattttgccgatcaattggcggcccatccgcttgcagaaaatgaggatgtgctcggcgttagcggcgtgatgtttctgaaaaccgtagctggagcaggcgcgggaaatgaaacagcggtcagtaaaatcgttatcggtcagaatgccgtacagaaagcacaggggcggtttttttacggttgtatccaggccatgacgctgtga

SEQ ID NO: 97539 - DNA, 729 bp, Enterobacter aerogenes
atgaagcgatttttacctgtggctctggccgcagtccctgccgccacttttccatgtttgtcccttgcagacgcgcactatcaccgtgcggaagaggtcatcagccattattatcagccgattgacaataaagcagcgccgtggcgcaagagtcgggaagatgccgttagcgtcaccgattacgccttgtgttttaacaaaatggttaaccagcatccgcaacaaacgctggtggtgatgtgcccggatatgtcgcaaagcacctttgataacgaaccagaaccgaccgatctttacgtgcttgaagaaagcgagcagggcatgcagctcgtgctggccgagcaaaacgtgggttatcgtttcgagggcattgtccatattggtgcgggcaaatgggctatacatgccgctaacagcgcgatgaatcagggatatggccagactcacgacgtattactcctgttcgtaggcaataaatttattcccatcgcccaatggacttcgtggctgagcaatgagggagcgcttgcggctaatgatgaggggatggaaaaaattaaaaataccttgtctgtcgatacttcacagccggatgctgaattttatcccgtagtgattcactcaacggggttaagcaataatgaaaaaatcgataaaacctggtcttttcagtatgcaatggataagggcgaatatcgcattgctgaaaacctgcaaggcggttattaa

SEQ ID NO: 97540 - DNA, 810 bp, Enterobacter aerogenes
atgtttctgattaatggacaacaggctgaggttttgccgatcagcgatcgcggactgcagttcggtgatgggtgtttcaccaccgcgcgcattcgttcagggcaggtggtgatgctgaatcgccacctgaagcgcttaaaggcggcttgtgaaaggctattcataaacttttcacaatgggaattattagctgatgagatgcggcaagtcgctttaaaccacaacgaagcagtgcttaaggttattattacacgtggcagtggcggacgtggctatagtggcatgggttgcaacacaccgacgcgcgtggtgagcgtttcgtcgtaccctgcgcagtatgcccggtggcgtgagcaaggaattgttctgacattaagccctgttcatcttgggcgtaatccctcactggcagggcttaagcatcttaaccgcctggaacaggtgctgattcgttctcatcttgagcagacagacgccgatgaggcgctggttcttgacagcgacgggtggcttacggaatgctgtgccgcgaatgtgttctggcgcaaaggaagccaggttttcacgccgcgtctcgatcaggcgggcgtcaatggcattatgcgccagcactgcatggacatgttggcacgttccccttttggtgttgtcgaagtatccgtgcgtcctgatgcgctgcgtgatgccgatgaagtgctgatttgcaatgcgcttatgccgttggtaccggctcgaggttgggatgatatctgttggtccgaacgcgagctttaccattttttagccccattgtgtgaactgcctggttag

SEQ ID NO: 97541 - DNA, 537 bp, Enterobacter aerogenes
atgaaaggaaaattggccgctttagctctactgacaacaatgggcatcagcactgccgtgttagcagatgatggtaaaatcaacttcactggcaacattattgagaccggttgtgaggtaaatagctctatcgcgtctcctctaaccgttaaattaggcgatgtggccaaaactgctttcaccgctgcaggcgatacggcagccaacactaagttcacccttgtgctgaccaactgcccggaaaccctggaagggaaaccggttgttgtgaaatacgacggtactccagatgccactaataatgactacctgcagttgaccgattacggtaatgacggcgtagccaaaggcgtagcaattcagctgctgaatggtaatggtaccgcgctgccgctgggcgtcgaatctgacagcaaaaacgtcagtgcggcgtctgacaccgagatcgacttcttcgctcgttatattgccaccagctccaccgttgccgcaggcactgcaaacggcacggtaaactttaccctggcatacaattaa

SEQ ID NO: 97542 - DNA, 678 bp, Enterobacter aerogenes
atgaaactgatgaattcacttattgctacaacttttattctcaccataaccagtgcgcaggccgggatcatcgttggtggtactcgggttatttatgacggtaataaaaaagaggcctcacttaatgttaaaaatccggataaatactcttacctgattcagtcatgggttgataacgaaagcgatggtaaaaaagcgccatttattattaccccaccgttgttccgtttaggcgccacagaagaaaacaagctgcgtattattcgcgccgggggtaatttaccgaccgatcgtgaatcaatgtattggatgaacattaaaacgatcccggcaacggaaaatcagcaaaatgccaacaccctgcaaattgccatcaaaacccgtttgaaattgatctatcgcccgcaagggttgtcagcgatgtcggataaaaccaccgatcaactcacctggcagcgcaacggtcaacagctcaccgtcaccaacccaacgccttattacatgaatttcagcattctgaaggtcgggggaaaagtcgttaaggatgcaacttatgtcgcgcccaaagccagcgccagctttacgctgcctgccggtgccgcagggaatattagttggcaattaattaatgacttcggtgctgcaggtagcgaacaccatgccaacagcaatggataa

SEQ ID NO: 97543 - DNA, 2562 bp, Enterobacter aerogenes
atgaaaccaaaaatacactataagagactgacactaagtaaaatagcctgctttattgccctccagtgcgcattgccgtgttttaacacggccgaagcgcgtgaatactttaaccccgccctgttgggtattgatggcccaggcaaagacatcaccgacctgactatatttgaagaaggcgtcggacagatgccgggcatttatcatgtcgatgttattgtcaataacgcctctctcggtgcctatgacatttcattcgctatgcaaaaaaatgccagcgggcaggacgaattgcaaccttgcatcagcagcgaactgctaaaacagatcggcatcaaaagtgaaaattaccctggcctcgacgccggagcacaatgcgtcaacctgtcagccatccccatggcaaggactgaatttgtttttaaccgccagcagctattaatcactattccccaggcggcaataaatacacaggcgcgcggttacgtttcccctgaacgtctcgatgaaggcattaatgcgctctccttaaactacagctttaccggcgcgaataccgaagcgcgccaggcacactctaccgattccgatagctattaccttaaccttcggcctggcctgaacattggtccgtggcgactacggaattacagcacctggacccgtaacacatctaatggtgatacgcagggcagttgggagtcggtatatacctatgcgcagcgtaatatcatcgcactgaaaagccaactgacgctgggggacagttcttcgccatcggatatgttcgacgccgtgcctttccgcggcgctcaacttgcctctgatgacgatatgctgcctgacagcctacgcggttatgcgccggtggtccgcggcatcgcacgtaccaacgcccaggttatcgtcaagcaaagcggctacaccatttatcagacatatgtttccccaggtgcatttgaaataactgatatctacccaaccggtagcagcggcgacctcgacgtcactattaaagaagccgacggcagcgaacaacatcaggtggtaccctatgcttcgctgccggtattgcagcgtgaaggacggctaaaatatgggctgaccgcaggccagtaccgcccatatagcaatggcatagacaaagactttttctctcaggcatcagccatttatgggcttccagccgggatcaccgtctatggcggcggacagttttcacaacattatcagtccctgcttgcgggtattggtaaaaactttggcactattggcgcggtttccgtcgataccacccaggcatggtcgcaacaacaggatgaagagaaagaacgcggccaatccattcgtgttcgttatagtaagaatattcaggccaccgggaccaatatatctatatccggctaccgctattccacctcaggctattacaccctgcaggaaactctggatacctggcgcgacagcggttggcaggacaataccgagcgtcgtcgcaaccgcgctgaattcctggttaaccagaacctgggcgatagtgccggttcgctatcgctgagcgcgatcagtgaaaactactggaacagcgatcgtaatatgcgttcgctcagcgtcggctacagcaacagctggaacggcattacctataacctcaactacagctataaccgtaacaccaacgacagcagtaatagtcagaagacctatgatgaagaccaagtcttctccctgggtatcagcataccgctcaatcgttggttaaataacagctgggccagctataacctcaacaccagcaagcgcggcgctaccagccacaccgttggcctcaacggcacggcgctggaggaccagaacttaagctggagcctacaggagagcgaaaccaataagggccagggtaacggcggcaacgccagcctgacctaccagggtacctatgcacgtatcaacgccggatatggttatgacaaaatgcagcgccgtaccaactatggtatcgaaggcggcgtagtcgcacacgctcatggcatcacctttagccagtcgctgggtgaaacttccgcgctggttgaagcgcccggggtaaacggcgtcaacatcaataaccaaaccggggtaagaaccgatttccgcggctacaccatcgtgccgtacgtcagtccgtatcgcaataacgacatttcgttaaataccgaagccatgccggatgatgccgatattgataaatcggtacagacggtcacgccaacccgcggggcgattgtccgcgcacgctttaaaacacgtattggtaaacgcgttctgatgacgcttacccgggcaaacggtgaggtggtccccttcggcgctatcgtatcagacaatacctcagacgcatcatccagcgccattgttggcgacggcggccaggtttatctctccggtatggcggataacggtacggcaacggcgaaatggggtcattcggcaaacgagcagtgttcggttaactggcatttaccagagaaagcgcctgccggcggggtatatgaaatcagtgcgtcttgtaggcaggaatag

SEQ ID NO: 97544 - DNA, 1002 bp, Enterobacter aerogenes
atgaaaaaaatctctcttttaatgatattactcgctggcaccatggcaaatattccggttgccaaagcagattatttcttttttatcagcacaaccacgcaaacctatgacttctcctcaaccagtattccaaataccgtgggcggaaccactgcatggttagggacgacagtttatccaacatcatttcaaattggccaggataaactaaactcagtaggcagttatattacactgaatatcggcaccacgcttttaggggatggtatcacctggactaccagcaatcctgctatcggcattcaatataaattgtcaacttctcccgttatatccggactcgactctgagtcgagtgttgcaccttcgtacaagttaacaatgacaggctaccctactggaggacaagcaataaccgtagatggtaagcttaaccttgcgtatcgtctggtaaggctaaaagaacaaatccctgccgggaaaattaccggtccgagcgtatccgcaacattttataatacttatgacggagcgacaaaaacggacgtgctttatagcggcgcggccacccaacctacctatacgccctgcaccattgatgcgccaacggaaattaaattacccacgttatatgtcgatgatttagttaacggtgctcagggagcatcatcaacctacagcataaaattaaccaattgtcctggcgcgcaaaataacattacttatatgtatgcccccttatatggagcttacggcgatggcacccaagggtatatgtacacagcgactggcgagggaagcgctaaatacgtctatctgcagttgcaaaatccagatggtacaggtcaggcagtaaataacaatataactttaaaaaattataccggcagcggagactacactctgccggaatttaaagtggcttattacataaaagatgtaaataaagccacagaaggaaatgttacatcagccattgtaattgatattacttacaattaa

SEQ ID NO: 97545 - DNA, 525 bp, Enterobacter aerogenes
atgcaactcaaaaacaaagcaataataatagccttgacctgcgggagcctgttttccgctgctagctatgcaaactctgcgacgatgaatatcactggtaaaatcattgccggtccatgtgttgtaaatggtggtactgatacccttgatgtcaatctcggcgacagcatccaggccgacactctcgcgacttccggcagcgcgactgactggactaacttcagtctggcgctgaccagttgcccgagttcaactaccagctttagcgtcgctttcagcggcactgcggacgatacggtaaccagcaactacaaaaatagcggcacggcgactaacgtctctatcgcgctaaccacgcaggacggcgtaacgactcttggcaacggtagttcactagctaacgtagcgataccgactgacactcacgcctatgacctgaaacttcgcgcccgcgcagtttcaaagggcagcgtcatgccgggaactatttccagccaggtgcaggccacctttacctaccagtaa

SEQ ID NO: 97546 - DNA, 234 bp, Enterobacter aerogenes
atgaaaactttcgatactcaacttgcgatgagcattgtatcgcactcaacgggaggttttagttatgacacactcgctagggcattgatttctaaagataaaaacgaaaattctgacgtccttcttgagtcatgtcgaaatttttgtctctctcttgaggaaaaaggtattctgaggcgatgccaaagatgttctcattctcaagatgagtatttcgagtatattcctcactaa

SEQ ID NO: 97547 - DNA, 939 bp, Enterobacter aerogenes
atgcggcacgccaaccgcggataccgtatccagcagccccataaactcgatactgatggggatgcccagcagggtcgggccgcctggcaccaccgttcccgccggcagcatatttgtcgcatcgagcggcattttagcgtcatcgagcagcgactccagcccgcgggcgaaggcgcgggcggtggcggccccccggcagtagccgtagacaaagagcttgattttggcgatgcgccgctgcgaacgctggatatgcagccgcgtcggctgccgcggccactggttgaccacggtacccagatggtcgtcgcagaatttgtcaagcgcgcttttacggttgaacttctgggtcagccgcgagaagggccagacggtagccatacgttgccgatatctggtcagctcactgtcttctaccctttcctttttcaccgcatagcaaatgctgctgtaggttttaagcagcgcctggttgatacggtcctcaccgccattggcaaacagctcgccgtccagcgagtagtgctcttcgtcaatctccggaaagcgcgccccacagccgggaaagtagtaacaaaagtagccgtcatcttccgctggcggcgactgtccgttccagtttgccgcatggtagaggcgaccgatattggtcaacggcgggtttcgcgagccatacacttcatcaccatcttcttcattacagcaggtaccgtcgaaaaacaggctgatatgcaggctggccgggcagcccggttccgtttttttgtccgattgatgatcggactccccgacataaccctccagatactgcctggcatagttgccttcggtctgcgttctgctcgccggcaggcgcccgcgctcgttgtattcggttttctgctgcgtggagttatccgcgggctttttatcatccggcccgggaaacttcggcggtaa

SEQ ID NO: 97548 - DNA, 150 bp, Enterobacter aerogenes
atgccccgtccgttagtaagtttctggtttaatttactgctaaaaacacctattgcaacgcaatatattgtcacattgcaattgtcagttgctttattttttattctcgcggtgaatattcttgatgtcaatctaaatatggttcattaa

SEQ ID NO: 97549 - DNA, 810 bp, Enterobacter aerogenes
atggatggaggtctcactgattcagtgaaacatgctttagaacagaggattaagagtcccttgtgggggttcattattctggcgtggacatggtttaattggccgaacctagcaatgttgttcatgagtgatgcgcctgtaaagttccgaatcgattacatcctttcacaggattatttctatctgtattacgtgtttgcccccatcctttctggcagcattttggctgttgtctcaccctatgctcagtggctcctgtctcaggcacataggtgggctgatgacagatacaaggataatgtttttcagtccaaggagagagtgtttcaagataacatcaagctatcaaagcttaaggttcaatcagatatggcagtggatgttgaaattgccaaaatcaacgctgatatacagactgaagtcgaaaggggcaagcgcgagcagatactaactgaagagcttgaaacccaaaagaaaatccttgaggaaaaaaatgaacttcttaccaaaaaacttgaggatgagaaagccgattttgaagagttgttaaaggaaaagcaaaagattcaagatattgcgataaacgttacgacactgttagaaaaagccctaagacttgatgacagaaggtcagttaagcaattggtggatgaaatttctgatttgttcagcgtggaagacttcgagctttcagaacaaaggaatgctctgaagaatggtataaggaaaaaacggagcgtagctgaatttattgaagaggttaaactcaaccaaagcgaaacatcagagattaatcttcaaaataagtga

SEQ ID NO: 97550 - DNA, 189 bp, Enterobacter aerogenes
atggaagagacaattaacgcaccgattaactattacgactctaacggctttctgattatcggggctaacgtggttggaaagattcaccctcagttaatggataagttaatcagacgttcaggggatggctcaaaacgtacccagcaagcccgaattaccagctacttagaaggactcttaaatggttaa

SEQ ID NO: 97551 - DNA, 261 bp, Enterobacter aerogenes
atgattactccaatgaaagggctgtcaaaacgcggtagttataatcatctgactgattcggtcgattacaagtattttaacggtacatcagaaatcagtgaatcaacttataagctacttgcttcaggtaataaacctaagccaactgtgaagccagctaaagcagtcaccacgtataaggtgaagcctaagccaacaattgaacagcaaagagatgcagctttaaaggctgctattaaacagatggtaagcggaggttga

SEQ ID NO: 97552 - DNA, 564 bp, Enterobacter aerogenes
atgactattttaaatcaagctgtaaaaattgaatcaccagttgcaagcattagtcacctgttaccgttcgaacagaaacagcatatcgaaaaattgtacttcccacggattcaacaggcaactgaccgaatgaataaggctgaagctgaatatcaggatgcagtagaatcgcgccagcaattgattaaccggaaagctgctgaatatctggctaatccttcagaacgtcacggattcattgtgaagcaggtttacccaacaaaccaacagcaagtgattcaaagcatggctgaacaaggctacatggttcatcgtgtaggaatgggattaatctatttcatctcaactaaaaagaatgctctggaagacgcaaatggcaaggcaactgctgaagctgaattaactgttgataagatgattgaacgtctgaaggtaaaagcctctgaagctgtccaccagcgtaatgtgattgttacccaagcacataaagctctgaactctgtaaaagacttcaccgattacctgaacgtgattgtaactgattctgaagaggtaaccgaataa

SEQ ID NO: 97553 - DNA, 330 bp, Enterobacter aerogenes
atgagtttacaggttttgagagattcagttcaaagacgcaaaccaatctcatttcattacaacaagccaggaaaaacaccgggcgagagaattggaaacgttcatgcaatcttcataatgagaaaaaaagatggcaccgaatccactaaattgcacattgtccagacatccggcgtaacagacagcgagcctgatttccctgagttcagaatgtttgatatagagtctctatcaaatatcacaattctcgaaggtgaaccccaattcccaatcaatgataaatataaccctgagtacgacggctataagaatgtaattgctaaggtttaa

SEQ ID NO: 97554 - DNA, 1005 bp, Enterobacter aerogenes
atgagcctgaatcactctttcctcataggctcagatgaatcaagtgagcttatgctaaacatttctggtcttgatgctaacgctaaagaagtggattccttatgtgccaatttctttgcacactgtgctaagactggcacacccaaattcacatgtaagctgacaatacaaaatcttcaaaatctttatagccatctatccagctatagcatggtatgtgatagcacttcttcaaagactggaagattcattgaggtcagagataattataatgagataatcagcattcttgaacacgctgataataattcattagttatggccttgcagcaccttgtaagcagtaagttaaccaataatgacatcaatacaatattagggagaaaggaatctctcgagacctacgaaaaaatgctcactgagcctgatagttataaggaggcagactggcaacgtttttttgaaaccaatgaatggatttttggttatggcttaaagtataaattcctaaaaattcttcaaagggaagctcacatatcaagaactgatttaaacggcgggaatgatgtaattgctgattttcttatatctgactcaagattcaccaagattgtggaattaaaaacaccaacaacaaaacttttcactaagcgacaagggcgctctgatacatggttcttatccagtgaattaaccgacgctgttagtcagatattggcgcaaaaggcaaattgggagattgaatctcagtctagaaattacactacagatggtgaacttatacatgaagatacatttgatacagaatgcattttaattataggttcattatcttcaattgagggtaatgagcgagaaaaactaattaaaagaaaaaccctcgagctttataggagaaatttaaaaaatatagatatcttgttttatgatgagttgcttgagaggtcgcgctacattgtcagaagtgctgaagtaatagaagataagcttctctcagcactgtag

SEQ ID NO: 97555 - DNA, 366 bp, Enterobacter aerogenes
atgacctatggacaggcatatctgaacggctggaaagaggcctttaattttaccggtcgcgctggtcgactggagttctgggcatttttgatcttcaatttactgatattgtcagcgccgctgctgctgtggtatctggcgatgtcatacaacgatgattacgggatgtttatcctgtttgtcgttccagtggatattgtgctgctattgccaatgactattccgatgctggcggtaggtttccgtcgaatgcatgacattggccgatccggtctttggttcttaccggggttcattttcccgtggttttttattttatcgctggcaatgtgttgcctgcgttcagcgccggcaccttctcgctaa

SEQ ID NO: 97556 - DNA, 1221 bp, Enterobacter aerogenes
atgaaataccattcagcaccgctcatcccgcacaaatccgccctcatgtccgcgccggctaatctgctggcggaagaggtctgtctgcccgccgcgctgctaaaaaagtcggcgctggaaaataatatttcatggatgcagcgttacgccgacgcccgcggcgtgtcgctggcgccgcatggtaaaacgacaatgacgccatggatttttcaggcgcagcagcgagcgggagcgtgggggattggcgtgggtagcgcctggcaggccagcgcggcgatggccagcggcatccaacgcgtcctgatggttaatcagctggtcggcaaggccaatatgcaggtggtcgcgcagctaaaagcccactatcgggcagtggattttatctgctgcgtcgatagcgaggccaacgtgcgcgccctctccgcattcttcgccgcccagggacaaacgctggatgtgctgattgaacttggcgtgccgggcgggcgctgcggctgtcgtagcgttgatgacgcgctggcgctggcgcagcgggtaagcgatctgccggggttacggctacgaggactggaattgtatgaaggagtgctgcacggcgacgatccgcaaccgcaggtggaagcgctgttacagcaggccgcggcgcttgcctgccgcatggagtcgctggttgacggcgaatttattctcaccggcgcgggcaccgtctggtatgacgtggtgtgcaacatctggctggcggcggcaaaaccgcgtcgctgccgtatcgtcatccgccctggctgttatatcacccacgatcgcgggatctacgatctcgcacaacaagaactgatcgcccgcgatccgattgcctgcgatctcgccggcgatcttacatcagcgctggagctgatggcgatggtgcaatcggtgcctgaggcggatcgcgcggtggtaaacttcggcaagcgcgactgcgccttcgacgccgggctgccgcagccgatcgcccattatcgtaacggccagcagttagcgctgcgcgcggagtcgatcgtcagtatcggcatcatggatcagcactgcatgctgcgcctggcgccaggcagcgatgtgcaggtcggcgatattctgctgttcggcacttcgcacccctgtctgacctttgataagtggaagacattgctgctggtcgatgacgactacaacgtgctggacgagctcgacacgctgttttga

SEQ ID NO: 97557 - DNA, 1254 bp, Enterobacter aerogenes
atgaaaaaatctctcaaccctggtgaaaactcgtctttaaacgcatcaactggacaggtaaccatctcccaccgtactggcaatgggcttgatatcaatcttaccgcttttctgctgacagcatctggcaagacagtggatgatagcgacatggtattttttaatgctcaaaagcattcttctggtgctgctacttttatacaacctgaatcaaaaaataatgtcatgtcccatagcattcattttgatttatcaaaattaccagtcggaattacaaaaatagccatcgctttgactcaagacggaagcgcaggaggattttcagaagttaaagagctgcgtgcgaaaataaaagcgggtgaacagacactggagttagctcctggttcatttaatcaggagaccggaattatagttctggaattatatgtacgtaatgaccaatttaaggcccgttccgtgtggcagggttttgcctccggcctggtcgggctttgcaacatgtatggtgttgaggtagaggatactccaatgcctgcgacaacatccgcagaaaaaaacacaactgataatactttgatatctatggagaaacctgaagacaggcaccgtatttccctaattaaaggaacggatgcaccgaaaaaaattacaattagcgccacctggatagataacggcgatgggcgtgataatgatgacctggatttacgggtaggtattctgtggcctgatggcaatatgtctctcatacaggcacctgataaatcaggcgcctttaataaaaaaccctgggtttatcatactggtgatgttgttagcgcgagtctttcagttccgggtgtagaaaaggtagaaataaaccctgagatctcccgactggctggcggaaaagtagctttagtatgtagtgtctattcagcggtgagtaacggcgcagtatccgtcgcatcattaaagccgaaaatgcgtatggaatatggtgatcgggtagtggagtgttcgttcgatttcactaaaaagaaaggtttcttgagtagctgtatttacacgtatgttatcggtttgattgaaatagatcaggatgctatagaactacgcccgtcaggggtaacctctaagccgaagagtgaagccaccccatggttgtcccgacaaaaagataaccgtctggagcttactatgaacggccctgctgtattcaaaggtgaacaaaatagcggtagctggggtaagaattacgtagacttctaa

SEQ ID NO: 97558 - DNA, 1281 bp, Enterobacter aerogenes
atgtattttactaccggagatttgctcctggcattagccattctcttttttatttatgcctctcctgccatttacatcgctccggtgctttatggcatgataaaggctggcaatgaccgcccgcaactcaaaatcatagcattggtcaatgttgtcactatcatcaatattactttctatttatttactttgccactcgattttcacgatgagaaaattaattttttcgcccttagcctgtttattttctcacctgccggctggtcgctatttttcaaaatgcagagcaacaccagaaggatcacatacctgacattattcatatgttctttattgatttataatatctattactatccccagaagatagcgcaagataacacaacacggatggataccttgctgcagcagggagatattagcaagctcaaaacgacatttcgcagtggatgtccggataaccaaagtaatctcttctggttacacatgatgttctcaaatgaagtctatcccgaaagcgcttttctctaccttatcgactgcgccaacgtaacgagcgaagcgggtaaacatactgatgcgcttaacgaatattatcttaaggcgctgcggtctcaaaataccaattccaaattattaaatctggctatgcatcgtttctatgctgagttaaatcaatatgacaaagatagaatcgccagttctctgctcatggatattaacaccactgataatgcgaaaagcaggcaactcagcgccgagcgtattaacgcaatcatagcgtctcatcctgactttaaagcgtttattaaagttgatgataaacacattgaaaacttgattaaaaatggccgtcagttttcgataaattatctgcggtcattttacaccacgaaaaaaagcaactatttactggctatcgatgtgctcaataacaatccggaacttattaataaaattaaaaacaacaggaacattctcaatacttatctcttcagcgaacagggagggatttgggaaactcgagacgtagaactacggagctatattttttactacggttcaaaagcattaatccgttatttgctggataacaatctggataacacccacacattcgatcatcaaaaatccatttacaatcacagcagccaccaggacgaaacggtctgcgccaactatctgactaagtacatcgattttaatcctcaactaaccgagagtgaaaaagaaagcctggaagcagaactccgcaatcgcagtgaatgcccggccaggtag

SEQ ID NO: 97559 - DNA, 1311 bp, Enterobacter aerogenes
atgaaaaaaacaaaagtcagcctggcctggcagattttgctagccctggtgcttggcatacttctgggcagctacctgcattaccacgccgaaagccgtgattggttaatctcaaacctcctgaccccggcgggcgatatctttatccacctgattaaaatgattgtcgtcccgattgtcatctcgacgctggtggtgggcattgcgggtgtaggcgacgccaagcaactgggccgcatcggcgccaagaccattatctattttgaagtgatcaccacggtggcgattgtgctggggatcaccctggcgaacgtcttccaaccgggcagcggcattgatatgtcgcagctggcggcggtcgatatctcgaaatatcagaacaccaccgcagaggtgcagagccacgctcatggcctgatggggactatcctgtcgctggtgccgaccaatatcgtcgcctcgatggcgaaaggcgatatgctgccgattatcttcttctcggtgctgttcggtctgggcctctcttcattgccggcgacccatcgcgaaccgctggtcaccgttttccgttctatctctgaaaccatgttcaaagtgacgcacatggtaatgcgctatgcgccggtcggggtctttgccctgatctcggtgaccgtcgccaccttcggcttcgcttcgctgtggccgctggctaagctggttatcctggtttacttcgcgattctgttcttcgcgctggtggtgctgggtatcgtggcgcgggtatgtgggctgagcatctggatcctgattcgcatccttaaagatgagctgattctggcttattccacggcgagctccgagagcgtgctgccgcgtatcattgagaaaatggaagcctacggcgcgccggcctcaatcaccagcttcgtggtgccgaccggctactcctttaacctcgatggttcgacgctatatcagagcatcgcggcgatcttcatcgcccagctgtacggtatcgacctctccctgtggcaggaaatcactctcgtgctgacgctgatggtgacctcgaaaggcatcgcgggcgtaccgggcgtctccttcgtggtgctgctggcgaccctgggtagcgtggggatcccgctggaagggctggcgtttattgccggcgtcgaccgtatcctcgatatggcgcgtaccgcgctgaacgtggtcggcaacgcgctggcggtgctggttatcgccaagtgggaacataagtttgatcgcaagaaagcgctggcgtatgaacgcgaagtgctgggcaagtttgataaaaccgcccaataa

SEQ ID NO: 97560 - DNA, 948 bp, Enterobacter aerogenes
atgaagtacttaggaatgttgattctattttttacgcagtgtgtctgggcctactgccctgagccaggtctacaggtaagcctgcaggggagaatcgagctgcggacgtatcctggcccgccaaattgggaagatatcaaaaacggtgatgagccgctggacagagatgttctggtgctggatagcgcaatgatgtgcgatctcggggagatacagaacgaagtaccggagatagaactcatttatcgccaggggctgaagggttgcacggcggacactcgctggtgcggtaaagcagtgttggtgtccgggctgaccagagagtggcaaagcgccagggaccacacgctggtgcagcttgtcgttagtgatattaacgaggtcagcgaagcgttaacggcggaacaacaaaagagcatgctgcggcagttccaacaatttcagcaggcgctgcgggaaaaaaatgtggcacggcttaagactttttttgttttcccgttggagggacagtttttcgatttcacccttgaacctggcgatctgactaatgatgaaaggttcagcagcgatgattttgaccgcaatgcattgaaaatcattgcgggtctccagccattaactcaacttaccgtcgttcctgaaaccctgacaataagcgaataccgggtgaatgctttatcagcagaagaacaacagcgtcagtacgcacctgcggatgaggaaggcatgttttattacgtagaaaatggccagcgacatgaaatctttggcgcttgcgataacgttattcatggtgatattgatgcgaaaacattaaacatttatcagggaacaagcgccaataaacaacttcccggtatatccgaggcctgtgacggcgggacatcctatttatttaaactgattgacggtaaattgcggctggtgaggagtttttcggcgggctaa

SEQ ID NO: 97561 - DNA, 1095 bp, Enterobacter aerogenes
atgaaaaaatacattgtactgttgctggttattgtctttcctgtttgtggttgggcctgtgatgggattaattatggcagtgtctctatgaccaatttaccggaaaaaattctcgtcaatgcggggagctattcggcggggaccattttatatgactccggcaaaattacgcgcgcgcagacaacattattaaattgtgaaggcgaaacctatgctatttttaagtgggcatcaaataatgcgggtacgctaattggcgataatatctataccacctcggttgcaggtgtcggtattcgtgttaaagtctggctaaatatcactggtgagtatggcggcgataccaatgattttaacagtgattatcaaacgcattatattggcgatacgaacttttatctgggcaagcctacgggatttggtgatagttttgcgacaaccaattactcgccagcctaccagctacagttggtcgccaccggtgggccgattgccagcaatagcactttaacgtttggcgatccgatttccagagtatcggtgcaggataatgtcaatacgaccagtatttccccattacatattagcggtaccaccacgattcaactgaccccgatgggctgtgtggctaacagttcgggactcaacttcgcaatggggtcggtcagcgcttcggcgtttaattcagcgacgaaagtgggctcagctcggcagtcggttacgctctcctgcgaaccgggcaccaacgtatcgatgcgggtgacggcggcacaagccagcggtgataaccctgataacacggtgatggcgctgacggcagatagcaatgttgccaccggcgttggcgtgcagctcaatctgaatggcgaggcgctaccgctgaatacggatatcagcttgtattcttcaagccgcaccacggtgaccaatagcggcgcggatgccggctatactatttttactaatcctgatagccccggcggcgcctatgctttagacacgttgctattctcaaccaattattacaaaacaggggcgacggtgacggcgggctcggcaaatgcggcaggggtaatcacttttacctataactga

SEQ ID NO: 97562 - DNA, 564 bp, Enterobacter aerogenes
atggacagtataaaaaaaacagggttgatattaatcagtcgtcttagctatctgacaggcagcttttttattgctgcctcggttcaggcttacactgattccagtaccattaatgttagcgtcacggggagtatagaagaaccttcctgcgaggtggcgataaagccggcaacgaacgttgacttaggtaccgtgtcttatcaaaccctcaccggtaaggctggttccagcggcgcggatacaccggttcagttaacgttttccaactgtgcagcagggttatccgcagtcaccttgtcatttagcggttcgtattttgatgatgctcattccacgatttataaaaactatcaaacgggcagtaacggcgctaccggtgttggcatgcagttattaagccaaactgaccaacaaccgctaggtcctggcgatagttatctttttacttttgataatactgatactcatacttttaatatgatcgccagaatgtactccccctacgggaatatccgagccggggtagtggggtttacggccacatttgatgtgatctataaataa

SEQ ID NO: 97563 - DNA, 2574 bp, Enterobacter aerogenes
atgattatggtatgtcaggaaagaaatacactgcagttgtacaatagtaagggcttaatctacttccgtattattttaatcctgtccgccgccgcgttgagcattagcgtacaggcgagtgaatattttaatccccatctccttgaggttacggaaagccaatcaactgctgtcgatttatcctatttttctcaggaagcggtgccgccgggccgctatagcctggatgtttatataaatgataaattcgtttcttctgaatctattgattttaaagaacatcccggcgatgccgcgatggcggttcaaccttgcattcgacttgagcatcttaaaacgtggttaattaatacagagagttacccgcagctggctgcagcgggaacggaatgcgctcgcctgtctgccattccggggcttgagtacaccgtcgaactcgcccagcagcggattaatttttcgattccacaggccgcgttacttaatcggccaagagactatgtgccggaaaatcagtggcagcaaggcatcaatgccggtgttctcaattacaacctatccggccagcgtagcattccgcgtcatggcggcgccgcgacggagagtcagtttgccagcctgcagccaggtattaattgggaggcgtggcgtatacgcaactacagcacgtttaaccatagcgatgatggcagccggtgggaatcggtttatagctatcttgcgcgagatattcatcggctgaaaagccagttggtgatgggcaatacctataccgcgtcggatatttacgacagtttgaacttcactggtctacagctaagttcggacaaagaaatgctaccagatagcctgcatggttttgctccgacgattaagggaattgcgcggacaacagccgaagtttctgtttaccaaaacggctatagtatttataaaacgacggttgcccccggcgcctttgagataaaagatctgtactccaccggtagcgctggcgatttgtacgtcaatattaaagaatcagatggcagtcagcaaagtttcgtcgttccttacgcatcattggcgattttgcagcgcgaagggcagttggattacacgtttagcagcggtaagacccgctcggccaattcaggcggtgaagaatataattttgtccagtcaactctggcttacgggctttccagcaacgccacgctctataccgggtttcagcaagctgaagatcggtatacgaatatactcgtaggtaccggattcaatctcggtgttgttggcgctctttcgctggatgcttccggctctttggctgagatgagaaataacgataactcgctctccgcaaccaaagagaaagggcaatcctatcgcctgcgttttaataaaagttttatgcaatcggggaccagtttttccgtcgcgggttatcgctattccacttccggatattattcttttgccgactttatcgatgagactaccgctgataatgaccgcagttcattaaccggtcgcaaaaaaggtcgttttgatgcgtcaatttcgcaaacgctatctggatacggctcactgtcgctttccctggtcaatgaaacgtattgggataactcaagaatggcctctttaggcgttggttatagcggtaccatcggcaaagtgtcttactttgttaattactcgtacaaccgtaatgtccaaagtacagacgatagcgtggagagcaatccagacagcgacactatcgtgtcactcacgctgagtgtgccgctcggcgaaacgatgtcagccaattacagtatgagcgctggccgtaaaagcgataccacgcacagtgtcggtcttaacgggatgatgcttgccgatcgttcgctgaactggaacgttcagcaaggctatgacgccacggataaaagtatctccggaaatattgctctggattaccagggggcaaagggggaggtgactggcggctatggttacgatcgctatagccagcactataactatacgttgcgcggcggcatggttgctcattctgggggcgttacgctttctcgttttctgggcgaaagttcggcgttgattgaaacacctggcgtcagcgatgtgacggtgcgcggtcaaacgaacgtcagcaccgattctgcgggctacgctattgtgccttatatccggccttatcataccaacagcttgtcattggatgagcagcaggtcactggcgccgaagtggataacgtggtgagaaccgtggtgccgacgcgcaacgccatcgtaaaaataaaatacgatacctttatcggcaataaagcaatgattaccttgaaaacgaaatctggaatcgttccatttggcgccattgtgtctcgggatacaaacaatgcgcgagccaacgatatccgcagcaatatcgttggcgatgacggtcaggtatatgtaacgggcctccaacaaaaagggatcttgctcgtcaaatgggggagcggtcagcatgaacagtgtcaggctgaatacgattttagcgggcaacatacgggtcgggacattattttctatcaggccaattgccattaa

SEQ ID NO: 97564 - DNA, 687 bp, Enterobacter aerogenes
atgagatattttctgttatttttcggtttattatttatcaccagcgcgcaagcgagcgtagtggttggcgcaactcgcgtgatatttgacggtgcaaaaaataatgccgaagtcgctgtagagaataaggataatagctctgatattgttcagtcgtgggtctcagtggtggatgccacatctccggcgaaagacgcatttatcatcacccctccgctttttcgcttaaaagcgggagaaaaaggtttcgtgcgaatagtgcgttccggtaagcctctggccgccgatcgtgaatctatgttctggcttaacgtgaaaggaatcccggcaatgaataatatgccggataccaacatggttcagttcgcgattaattcaaaaataaaactgatctatcgccctgctgaacttaaaaatagttcgcctgaaatgtatgccgaaaaattacaatggcagcgccacggggatatcattagtgtaaaaaatagctcgccactttatatgaatttctcgcagatcgctattaatggtaagaacgtctcaggagcatggtttgccgctccgtttacaacgttaaaaattccaatggaaggtaatttatcctcgacaggaaaaaaatcgatcacatggagcgtgattaatgattatggtatgtcaggaaagaaatacactgcagttgtacaatag

SEQ ID NO: 97565 - DNA, 543 bp, Enterobacter aerogenes
atgaaaatcagtaaaaaatatttgttcagcgcgctggcgatttccgcctcctgtatgttgtctactattacgcaagctgcgccgaataccattaccttcaccggtaccgtttctgatacaacctgcaccgcaacaattgacggcggtgtgactgcgattgccatgggaacagcgtcggttgcagatttaaaagcctatacctacggtgcggcgaaaaacttttcctttaaactggctgattgtccaaccactgaagagggggggagcactatcgctcgcgtaacatttggtggcgaagcagacagcgctaatagcgattattttaaaaaccaggcgggctcggaagcggcatcaggcgttgccgttgctatcttcgacaatgcgggaaatttactcaaaaataacgttgagggcgctgatgttgatatctcctctggtgaggcgaccatcccttttacggtgaaaatggctaaatcaggaagcgctgacccaactaaaggcgcagtacaaactactgtgacttataacgtgacttactattaa

SEQ ID NO: 97566 - DNA, 285 bp, Enterobacter aerogenes
atgggtgatgcattggggcttatcgaaaccaaaggtctggtggcctgtattgaagcagcggacgcgatgtgtaaagccgccaacgtcgaactgatcggctatgaaaacgtcggctctggccttgtcaccgtgatggtgaaaggcgacgtcggcgcggtaaaagcggcggtggattccggtgtggaatccgcgcagcgcatcggcgaagtggtgacctcgctggtcatcgcgcgtccacataacgacatcaacaaaatcgtctcgcattacaaaattgcggactaa

SEQ ID NO: 97567 - DNA, 279 bp, Enterobacter aerogenes
atgagtgaaaataaaacgttggaacgttcctccaacgacgcaacaactgagtggcgggttgggccgggagcatggatctcgctggtcgtggtgttattagtcttctccgggctgctttttaaagtggaaggaatggcctggctgggggcctttgacttcaccaccctgggcggcgcgtttggcacgatgaagcccccggaaaccaatactttcatcggtagcggcgcatcagcgctaaggccggtttcctgtttgcgctgtcgctggttccaacggtga

SEQ ID NO: 97568 - DNA, 213 bp, Enterobacter aerogenes
atgttgctacaaatcagggggggagtaattaacaacgtagcaaaacaggcaattgaacggcagaaacacttaccgcaaggaatgatgcaggagattgtcattgatgtgcgtgggcaagttctttctcttgcgcaagaagatgcaattgtccgaggtatagttcaaaaatccaatggtatagttaagcccaccaatattcagtttaaaaggtag

SEQ ID NO: 97569 - DNA, 414 bp, Enterobacter aerogenes
atgaaacatgttggatttataggtgggagttcaatggttgagttaggcttcccctctgaaatggatgattttttttcatttttctttaacaatttaaaaggaaataaaaatcatgctgttctggacagactgtacagaaaatatgtcagacttgaagatcttgatgaaataagtaagataactcaagagcttaaggggtatttgtcacctgatataaaagataaatactcaaaatatatctctggtattgaaacctgcatcgaatcagccaagttattttatgaaagttggaatatctatcagcctgttagagttggaataactgatgcacctttctatattgatgataagagaagaaccttagatcaatatgatgcccttagcccggaagaacttcctttctggttacgttaa

SEQ ID NO: 97570 - DNA, 1362 bp, Enterobacter aerogenes
gtggaacaaagaaatataaccatcgacccgcagacaacctttgaaaaagggaaagcggagacgatttcagttccgttagataatacattacaacgtagtactcggattaaaaaaattcagacaacggcaatgattctgctatttctggcagcagtcattaactacctcgatagaagctccttatccgtcgctaatttaaccatccgtgaagagttagggctcagcgccaccgaaatcggcgcactgctgtctgttttctctctggcctacggtatcgcgcagcttccctgtgggccgctgctggatcgcaaaggtccacgcatcatgctggggcttggcatgtttttctggtcgctgtttcaggcggtctcgggaatggttcacaattttacccagttcgtactggtgcgtatcggcatggggatcggcgaagcgccgatgaatccttgcggtgtaaaggtgatcaacgactggtttaatattaaagagcgcggacgtccgatgggtttttttaacgccgcctcaaccattggcgtcgccatcagcccaccgattttggccgcgatgatgctaatgatgggctggcgcgggatgtttatcactatcggcgtgctggggattttcgttgctatcggctggtatatgctctatcgcaaccgggaggatatcgacctcactgccgaagagcaggcctaccttaacgccggaagcgtcaacgttcgtcgtgacccgctaagctttgccgaatggcgcagcctgttcaaaaacaagaccatgtggggaatgatgctcggcttcagcggcatcaactataccgcgtggctgtatctggcctggctgccgggctatctgcaaacagcgtataacctcgatctgaaaagcaccggttttatggccgccatcccgttcctgttcggtgccgccgggatgctcatcaacggctacgtcaccgactggctggtcaaagggggtatggcgccaattaaaagccgcaaaatttgcattattgccggaatgttctgctccgccgcgtttacgctcgtggtaccacaggccacaacatcaatagctgcggtgctattaatcggtatggcgctgttctgcatccactttgccggcacttcctgctggggattaatccacgttgcagtggcatcaaggatgaccgcttccgtcggcagcatccagaacttcgccagctttatctgcgcgtccttcgcaccggtggtgaccggatttatcgtcgataccacccactcattccagctggcgctgattatctgtggttgcgtgaccgccctcggcgcgctggcctacgttttcttggttcgccagccgattagcgatccgcgtaacagctaa

SEQ ID NO: 97571 - DNA, 915 bp, Enterobacter aerogenes
atgagccgttcacaaaaccttcgccataacgtgattaatcaggtcattaacgatatggcgcgcggctttattccctcgccgctgccctcgcaaagcgcgctggcagagatgtacaacatcagccgcaccaccgtgcgccacatcctcggccacttatgcgaacgcggtgtactgagtcgggtcaatcaggattaccagatcctccgtttgcccgaagtgcgggacggcttcgatggttccagcgcctcactggctgaacagaaccgtatcttcgagcaggcatttttcactatgatcaaccagcgccagctgcgcgccggagaaaagttttccgagctacagctggcgcgtgccgcgggcgtcagcccggtggtggtcagagagtttttattgaaattcagccgctataacctgattgaaagtgagaagcgcggccagtggaacatgaaaaagtttgagcaatcctgggcggaacagctgttcgaactacgggagatgctggaaacccatgcgctccagcactttctcaacctgccggacaacgacgcccgctggctgcaggcgaaaaccctgcttgagcgccatcgcgccctaagagacagcatcggcgacagttttcgtatgttctcgcagcttgatcgtgattttcatacgttattactttccgctgccgataatatattttttaatcaatcacttgagattatttccgttatcttccactttcactatcagtgggatgaaagcgatcttaaacaacgcaatatcatcgccattgacgaacatatgaccattctgagcgcgcttatctgccgtagcgacctggacgccaacctggcgctgcgtaaccacctgaactccgcgaagcaatcaatgattaattcccttaagcagaatgagtccccgctttattaa

SEQ ID NO: 97572 - DNA, 1023 bp, Enterobacter aerogenes
atgacgtcgatgaatactttagtgtgtcaggaaccaaaaaaacttacctgggaaatacgtcagatccctattcctgacgacgatgaagttctgattaaaataaaagcggtggggatttgtggaacggatattcatgcatggggcggtaatcaacccttttttagctacccgcgagtgctcggtcatgaaatatgcggtgagataattggcctgggtaaaaatattcataacctgaaaagcggtcagcaggtcgccgtcattccttacgtagcgtgtcgtcagtgtccggcctgtctgagtgggcggacaaactgctgcgagaagatttccgtgattggcgtacatcgcgatggcggatttagcgaatatctcagcgttccggtaaaaaatctgctggtggtggatgatgttgaccctgaggccgtagcgctgattgagccgttcgccattagcgcccacgcggtgcggcgcgcggctattcagccagcagatcaggtgctggtggttggcgcgggaccgattggactgggggcggcggcaatcgctaaagctgacggggcgcaagtggtggtggctgataccagcccggctcgacgcgatcatgtggcgcagcaccttggcctgaccactctcgacccctccgatccgcagtttaccgaccagttgtgtgaaacgtttggcggctctctggcgcagaaagtgatcgacgcgacggggaatcagcatgccatgaataacaccgtaaatttaattcgccacggcggcagcattgtttttgtcggcctgtttaaaggcgaactgcagttctcggatccagagtttcataagaaagagacgaccatgatgggtagccgcaacgcaacggaagaggattttgccaaagttgggcggctgatggccgaggggaaagtgactgccaggatgatgctgacccaccgttacgatttcaggtcattggctgaaatctacgaaagcgaagtcattaacaatcgccagcttatcaaaggcgtcattcatttttag

SEQ ID NO: 97573 - DNA, 1446 bp, Enterobacter aerogenes
atgaaatcgttaaacaggaaagattttcccgggccgcagtacccgacgcgcgtgcttcagtttggtgagggcaatttcttgcgggcgtttattgactggcagctagatttgttaaatgagaaaaccgatctggcggcaggcgtgaccattattcgcccgatcaacaccgagttcccgccgtcgttaaatactcaggacgggctctataccacggtgattcgcgggttggatgagagcggcgaggcggtgagcgaaacgcggatcgtccgttgcgtgaataatgagatcaatccctggcaggattttgccgcttatctcgcgctggcccgtaatccggatattgagtttgtattttcgaatactaccgaagcaggcattagctatcatgccggagaccggcccgatgatatgccgccggtgagctttccggcgaagctggctcagctcctgcttgaacggttccgctattttgatggcgcagcggataaaggctggacgattattccctgcgagctgattgactataacggcgaggcgctgaaggcgctggtgctgcgttatgccgaagagtggcggctgcccgcggcatttagcgattgggttaaaacagccaataccttctgttccacgctagtcgatcgcatcgtgacgggctatccgcgcgatgaggcgcaaaagctggaagcggagctggggtatcacgatgcgtttcttgatactgccgagtacttctggttgttcgtcatccaggggccgcaaacgctggcgaagaaactgcggctcgatcgtttcccgcttaatatacgtatcgtcgacgatattcggccttataaagagcgcaaagtcgccattctcaatggcgcgcacactgcgctggtccccgtggcgtggttgtgcggcgtggataccgttggtgaagcgatgcaggacgaagtcattcgccattatgtgcagcaaaccattagcgaagagattattcctgcgcttgatttacctgtcgacgagttacggcagtttgcggatgcggtcaccgggcgctttcttaatccgtatatccgtcatcagttgctgtctatcgccctgaatgggatgaccaaattccgtacccggatcctgccgcagctgctgacgaatattcgccagcatggcgcgattccgccgcggctaacgttcgctctggcggcgcttatcgccttctatcgcggccagcgcgaggggcagatgtatccgctacaggatgatgaagtctggttaacccgctttgccaaaggatgggcccaggtggcgaacggtcacccactgcatgaactcgttgtggaggttttgcaggatgaagcgcactggggggaagatctgctggcgattcccggactgagcgaacaggttacacgatatctggaggtaattctgaccgttgggatgcgcgaagccctgaggcggctatag

SEQ ID NO: 97574 - DNA, 366 bp, Enterobacter aerogenes
atgaagcaattaactgtattcgagatggaagaaatttctggtggttattcgtgggatttttcttctttttcagccgcgctcacttctattgcatccaatggtgttgaggctgttgccagcgctttattaggtggcgctgtttactctatgataggttccatcattggcggcgctcatggcggtaatggcggcggtgcattagggtttggcactctcggtatgatggtcggtggggtttgggggctgatagtgggtgcgataggcggtgcgattaccgccgttactttaggttgggacaaaactgtggaactgaccacgggaatgctggaaggttggagtaacggtaccttcactccttgggcttaa

SEQ ID NO: 97575 - DNA, 885 bp, Enterobacter aerogenes
atgagcaaatatatctggattgtctatctattactgagcgtaatgagtggttatatctttaatcatctttccgtaaaagggctggcgctggttttcgccgcaattctctttttccgcatcatgaagtggatccgccccggtggggccgcgcgttactatttttgcctgcaactgggcgtctcaggggcgttgatcgtacaaagctggcagcattatggctgggtcatcgggctgtttgccggttttgctgtactgtttctattacctttctggacgccgcaatcggttcctgccgaagtgcaaaatacggtagagcccgacgaggcgcctgcggaggatgagcgctcaaattgggaaaaacgagcgggaataacatttacgatctataaagagccagatccctatttcagtgctggcaacagcagtaagggaaacggccttacggcctggttcctgcctgaattagctgaaggtaaagcagcagctagtggcgccggcaacgattggtcattttcgtttattgaaaagagcgtatcggcgatccctggcggaagatatatagcgcctgtgacgcttggcgatgcgcatgccgatagaatctttgcatggcggctgtgcgcttttgttagagacgatagcggtgatttcggcctgcgccatcagcacgcctgcatccagttcccggcggggagcttgcagaaaattgcctttgtcgaatttacctgtcgcggaagcgactggtacacgctgctgtttatctccgccaattcatcagcggagctctcttttgatggcgctggtaaagccgagctttccctgtttgcgatggcgctggcggaagcgtggaatgtgccattaacgcagcgcttcgtgaaccataactga

SEQ ID NO: 97576 - DNA, 462 bp, Enterobacter aerogenes
atgcggacaggacgaatattatatcatatatggtggtttggtctgttgggccctctgttcggcgtaccagcagggatcatcactttggggctctttgatactaacagtttcgccgattatttatttcacattatgccactgctccctatcctgatattctttggctattactggggggctattcctgcgttattgaccggagctatcgttggctgtctgcctcgctgtatttataattattgctcgctgcgaatattgtttagcgggctcattggcgcagctatcgctttctgtatccagtatctgattgataatggcggacgcaatattttcgttaatgaaatgttatgggtaatggccagcgcaggtcttttttctggactggttatgggatggctgatggttaaaatatcaaacattgaggaatcacccattcgtacagatattgaaactcgaaattaa

SEQ ID NO: 97577 - DNA, 456 bp, Enterobacter aerogenes
atgcaacttaaacggattttacatcatgctggctggtttactttgctgggcccctttgtcggcgtaccagcaggcattgtaaccctcgcgttttttgaggacggcgatattggtcaattttacttcgatgtggccaggacactgatgcttatcatgttctccggctggttttttggcgcgattcccgcgctattaaccgggatcgccgtcgcctgtctacccgcggttctttatgattgccactggcggcgggtggtatgtagcgggatgatgggaatcgttgttgctcttattggcgcattactcgttgaaagccagatgcgatatttccttgcaaaggaaatactctgcgccgctgccagcgcaggattattttccggcctgataatgggatgggtggtggtgacgctttctggttttagcctcaagccagcgcaaaaggggagcgaacaatga

SEQ ID NO: 97578 - DNA, 426 bp, Enterobacter aerogenes
atgaaccgtctactgcatcatattgtgtggctaatcgtgatcggccccatcctccccttgccattcattgctgtccttgaggcctttggcagcgagcatccccttggccggtttattcgtattttttcgcgaatgctggacttcgaaaccctgtcgctcgcctggattatcggttttgtaccggccatgctaacggcgatggtactcgctaaattaccggaaaatctttatcgtccatggcttatccgcacgatattcggtgctattgccggtgtgattagcaccgtcattttcaccggcgcaaccgccattatcgcccccgccttcgcctatcttctcgccttcttgttgattaccgggctgttctccggcgcggtgatggggctgattatcccgtggctgccgttcgctgaaaaatcagcttaa

SEQ ID NO: 97579 - DNA, 1332 bp, Enterobacter aerogenes
atgtcttctcaaattaaccagccacttaatagtgattttcagtcagaatctactgatgagcgaaaatatactcgcttcggatggttggtgattggtattggtctatgtggttttctattatgggcggcttttgctcctctggataaaggcgttgcgtctccggggtcagtaaccgtttccggaaatcgtaaaactattcaatctcccagtagcggtattatcagcaatatcgcggttaaagaaggggataaggtcaaggccggacaggtactggttcaaatgagccaggttcaggcgcaggcgcaggtggactccttgaagatccaatattatacaactctggcaacagaagggcgtttgttggccgaaagggataacctggattccattaaattttctgacgttttcaattcaatcaaggacaaaccgcgtgctgcggaaataattgcattgcagcaacagctttttatttctcgcagacaggcattacgtagtgaggttgatggtttcagacagtcaatagatggcatacgtttccagcttaagggcttacaggattcccgggcgaacaaacaaattcagctaaacagcatccgtgaacagatgaccagtatgaaacagctttctgctgaaggatatttgccgcggaatcgctatcttgaagctcaacgtcagtttgcagagatcagtagtagtattgatgagactgtaggaagaattgggcaactgcaaaaacaattgctagagtcacagcagcgcatagaccaacgttacgcagattatcagcgagaagtgaggactcagttagcgcaaacgcaaatggatgtaaatgattacaaaaacaaacttgatatggccaactttgatctgggtaatacagaaattatctctccggtggatggcactgttgttggattaaatatttttacccggggaggtgtggtcggcgctggcgatcatcttatggatgttgtacccagtgaggctgcactggttgtggatgctcaattaaaagtacaacttatcgataaagtctataccgggcttcccgttgagcttatgtttaccgcctttaaccaaaacagaacaccaaagatccccggtactgtgacgctcgtctcggcggaccgtttaatcgataaagcaaatggagaagcctactatcagatgcaggtgacggttacaccggaaggcgccaaaatgctacagggtgaggaaatcaaacccgggatgccggttgaggtgttcgttaaaacgggttcacgttcgttattgagttatctgttcaaacctattttggaccgcgcgcgtacttcattgaccgaggaataa

SEQ ID NO: 97580 - DNA, 891 bp, Enterobacter aerogenes
atgaatattgctgctctaatcgtcacttataatcggttagacaaattaaaaacaactattgaggcaaccctggcgttgccttttcaatatatagttgttgttaacaacgcatcaaccgatgatactcaatcttatcttcatagcttatccgatgaacggttaaaaattttacatcgggaagtgaacagtggcggtgctggcgggtttaaatatggtgcacgctggataacagaaaatatccatactgattgggttcttttttatgatgatgatgcttatcctaaacctgatttcaatgtagcgtttcagacgcttgatatatcggttgacaacgtctatgtttgctcagttgtcgatacatcaggtcaattttgtaaaatgaatattccctggaagaaaattcccaatggtttgttggagaatatagcttacaggggtaatccaggacgctttcttcccaataatagtcaacaagagcgcgtggtaagtgtttcatttgttggaatgttgattagtcaaaaaaagcttaaagaagtaatctcatatatatatgatgagctttttatttattttgatgatgtttattttggtcatcatcttatccttcaacaaactcctataatatatataccaaaattgtgtgttatccatgatattgatactgctcataaaccgatttcaccatggaaactatattatttaagtagaaaccttatctggtcacgaaagatattcaaaaccaacacgccttttaccatgtttgatatttgtttgcggttattgaagtatatattcaccgcgttgaggcatgaaaagcggaatgaatgtatgattaatgtctataatggaatcaaggacggtttctggaagccaaaaggtagaggtgcataa

SEQ ID NO: 97581 - DNA, 981 bp, Enterobacter aerogenes
  misc_feature (966)..(973): n is a, c, g, or t
atgaataataacattgcattgcagtcatcagtatttcctgaaaaacaccaccgtgatattagcgctctgtattttttgtctgataacgtatcaggatgttatcctgatactgattccatcaaggttttgaaaaataaagaaatttgtttcgatactttttataactcatttgatctttataaatggtctaaatacactacagttaaacagttaggttttaaaattgacgtcgctggtcgaggtattgcctctatttatttaaaagtagatggtgttctaacgacgatatttcaaaacgaaatcgatggtccattcacaatagaaaatttacaaataagtgaatggagtgttggtcgtctttattttcaatggtcggcaattgatgatagtgaaataagaaattttgcttttactacatctggcgaagtagctgattttggtaaactagcgattgtcatcactacttataatcgtcaagcagcattattatcgacgttatcaagatttgagcgagcattctttagcgatagtgtttaccagtcaaaatttaatgtgtatgttgttgacaatggttgtaatctggaccttgagcccagaccaaatgttacctatataaaaaataaaaatatgggaggggctggtggttttacgcgtggattatttgaagtaaagaatacaaataatgagacttattgtatttttatggatgatgatgcatcctgtgaaattgaaagtattaaaagagcttattggttcatgtgtttttcgaagagtgaaaaacagatgattgcaggtagtatgctatatgaggataagcctaaggttgtttatgaagcaggcgctctttatccttataagcaaattcggatgctgccgttaaaaaatggcattgatgtatcgacaccaggcggtcttgatttgttcaatcaagaggataatcgagccacttatgccgcctggtgtcgnnnnnnnngaggataa

SEQ ID NO: 97582 - DNA, 849 bp, Enterobacter aerogenes
  misc_feature (17)..(24): n is a, c, g, or t
atgccgcctggtgtcgnnnnnnnngaggataatcgagccacttatgccgcctggtggttctgcgcttttaaggtttccgctgcaaaatattatgcttttccattctttgttcggggggatgatatcctgtttggtgtaatgcatggttacccaatcatcactcttaacggtgtcgcatcatggcagatgaattttaaccaaaaatatagtgcactggtcgagtatttaagcgtcaggggactgttggtaccttcatttgtttatccatcggcaaagaaaagaagacagattgccttctgggtattagcaaaggttcttttgctatgtttctcgtaccgatattcttcagcacaggcagttatcgaggcgtatctcgacgtattacaaggagctgatttttggcaaaacgatcctgacgctgtaatagcgcgtaaccggattaatgaactgtcgaaagacgaacgtccgaaagacgtcccatttggtaaaatagtgagaacaactaatcgctatgggcctgagtcgaaatggatgaagataattagattagttcttcttaacggtcatttgattcctggatttataatcaaagggaatattgtacgaattccgaatactgaaattcatccgacaaaacaggttttcttgaatactgaagtttactatgaaaccaccgaaggtcattttatcgtactgaaacaagataagttgcgctgtactaaattgatatttaaaacgttgtgggccattagtaaaggtttttttgtctacaatgctgtagcaagagagtatggtaaaaagatctcatattttacatctgaaaaattttggaagaaatactttatttaa

SEQ ID NO: 97583 - DNA, 306 bp, Enterobacter aerogenes
atgtttataatgttgcaagtgagaccccgtagcctgtttagctttatttttgttgtgttccataaccaacgcgtcaagaaggagaacctgacggtatttgtttatattaccacacgaatgttaactggtggttatttttttgttgttgtgatcggtttcacgatagtggatttaacattaaatttgcttaagtatgtgaaattaagcctggagtgcggctcccatcttgctgaattaatttttttaaacgctttcattatccaggatcaatggagagatatttgtcaggtaagctcagtgtgttaa

SEQ ID NO: 97584 - DNA, 144 bp, Enterobacter aerogenes
atgaacaagacaaaagcagtgcggattaaaaagacagataatcaactggtgaaactgaaagcggttaatgctggagcaaccatcagaaagactctggaaaatatgattctaatttcctatgtgaaacacattaatgttatctga

SEQ ID NO: 97585 - DNA, 585 bp, Enterobacter aerogenes
atgtccaaagctaaattattcaatggagttaagactccggctggaaagccaataacaggtaaaggcttcttctcagatgaccacgatttaatagatacccccgaataccgcgaatctcttaaaaacaccctcatcgaattaggttacaccagcttcaataaaccattacccgcaagtaataaaccttaccgcagaagaggaacaccccgtaaggctatggagaacgcacttcagcaatattttattgataaagactcagtaagtaaccttccttcaaaagttgaggatgtattcacgggttgcgttaatagctgtccagataaactatccccatctttctgctttaatttaatgaagcgattaaacgttatcacagcagcggctgtagaggatgaaacaggttttagtaaaagctggtgtaatgatattactcaggcattacagttagcaataacaatgattgaacattgccatgataaaggcgaaattcaggtaatgtttaacagtgactatgaaaacgatgaattagattctgacagggaattagaagacgtccttgatttacacattcaaaaggcagcataa

SEQ ID NO: 97586 - DNA, 555 bp, Enterobacter aerogenes
atgtcatctgtaatcgcttatgtccgtgtatcaacttctgaccagactattgagaaccagaagaaacaaatcaatgaggctggctatcaggttggtaagtggttctctgatgaggctgtatcaggtggtattaaggctacagagcgtaaagggttcagtgacctgctgaattatgtccgtgaaggtgacacgttgattgttatcgctattgaccgcttaggccgtaacactattgatgtcctctcaaccgttgagactttacaggccaaaggtgtgaaggttatcagcttacgtgaagggttcgacctctctacaccagtgggtaaggctatgctcacgatgatggctggtttagcgtctttagagaaagacctcatcgcagagcgtagaactgctggcatcaaacgtgctcaatctgaaggggttcactgtggaagaccgattaaagcaacccctgaacaggttcaggaacttctttcacaggggatgtcaccaaagcaggtgcaggatgagctacagattagcaaggcgactttctatcgactgaataaataa

SEQ ID NO: 97587 - DNA, 924 bp, Enterobacter aerogenes
atgaaagaaaccatttataacatcttctgcttttgtcctgatggagttcacatcacgcattgcggaatcgttgctcatgattttgaaggtgacgataatcaaaagctggaatttttaagaaaacagttagacattgatttagcctcctgtaggtcatttcatgacattcacccttcggtgcttgatggtgacaaacaactaactctggcaagatataattcaaatatgagggtaggaaacaatttagccccttttgaattagctctacaggctatgaatgccccccttcaccctttatctattgttacgccagtggtagaaggtaaacttcattatcacatccaactatcattgtctgaacaactaaggcataagcacatgccccatcaccacatagaaggtgttaaaagcttccctgattaccttgatgattacatgaaagaagatggttttcatattaagaaattactcaatgacgaccatatgaagcccatcagaatgctttttaatgaaaaacattatctgtctagtttcaagctgttaatgtccttcattgacaccattgcttacattgaatatggtaattccaaaagggttttccaaaactggcttgatacttactcagaaattaaaaaacttgaaataacatctgatgaattatatgagttaagaaactcactcttacacatgactaacctgaattcacataaggtgacacaaggcaaagagcgccgccttagtattgctgtttgcaaacgaggccacccaactcagtgtcacgctgacattgtttatttgaactttacagattttttatttttatttgatgaagctatagataaatggcttgatagttatcgtgacagcaataaacagttaacgtttattgaaaggtatgatgaagtggtgagggataactattaa

SEQ ID NO: 97588 - DNA, 324 bp, Enterobacter aerogenes
atgtctaataaaaaacatagtgtgttcaaagctctttcaatggggtttgaaaaggttcttgatgagcgtggttacgataatggtgcttattacgtcaaggatggcaagatttggatttttgatattgtagctttaaagcaaaaattaggtgtctcttcaaatgaagaattagaagcacaagattatgatgttgagacatatctttcactggaaaaagaaccgaatgaattagcagcactatatgaagatatggctgttgaagatggtgaaccagtttatcttgaaggtggaatgtatctttaccctgatggctcaattcgctga

SEQ ID NO: 97589 - DNA, 1557 bp, Enterobacter aerogenes
atgccaaaagcaatctcatacatacgattttctacaaaaattcaatcagttggtgattctactaagcgtcaaagcaagtacattaacgattggttaaaacgaaatcccgattactatttagacgaatcattacgttttcaggatttgggtataagcggcttctctggtgctaatgctaagtcaggtgcattcggtgaattcttagccgctgtggaatctggctacattgaagcgggttcagtcttacttgtcgaatctctggacagggtaagccgtcaggacatcgacacagcaggtgagcaacttagaaagattctcaggtctggcgttgaagtggtgacacttgtcgataacgagtggtacacgaaagaaagcctgaaagattcacttagcatgattaaagcgatgctggtgatggaaagagcacatgaagaatcagcgatgaaatcaacccgcttgcgctctatgtgggctgctaagagggaaagggctgcaaacggtgaaatcatgtctaagcgttgtgcagcatggttaaaggtctctgaagaccgttcacactttgaattcatccctgaccacgttaaagctgttcagcgtgtatttcaactacggttagagggcttgtctcacatcaagatagctaagcaaatgaatgatgaaggattctataccctgaaccagcacaaatccgtaaaggggggctggtctcaatcatcggttacagaattgctttccaaccgctcagtgattggtttcaaagttccgtctaaatcaatggctgtaaagggtgtttctgagataccaaactattaccctgcaattatcagtgaacagcaatttcacgctgtacagcagcttaaacagggggcagggcgtaaaccttcttctgacctacctttgctaacaaatctcttcaagggcgttctcaggtgctctgagtgtggatttatcatcattgtttcgggtgtcacagctaatcggtcaggtaattaccgatgctcaatgaggtatgaagggcgttgtaacgctaaagggttcagcagattgcagactgaccgcgcgttggttcaggggctgctgtacaacactaaccgtctttcactcaatcgtgataacggctctgctattggtactcttcaaagtgagttagaacagcttcagaaacagcgtgagaggctcattaagctggctatgctggcagatgatacagaatctatggctaaggatttgaaagccctgaacagtcagattaaggacgctgaaaaggctgtctcagaggttcaccaacgagagcaatcaagccagcttgagacaatcagccatttggatttgactgtgaagaaagacagggtggaggctcaaatcatcattaagcggatagtgaaagaaatccgacttaacaccgctcaaaaaaagtgtgatgtcttcctgcacaacgggttaaggctacttaacttcccacttgatagggtggttgatggggagattttcttagaagtcttacccctgttagaagctgatgagttcgactttgacacttacaggatgattgagtaa

SEQ ID NO: 97590 - DNA, 915 bp, Enterobacter aerogenes
atggttagtacaaaacagcaaagggttgatctaaataacaattggcctacaaagtcattatttccagccgaaaagtctctaattgataaaatggctaaatttggcattgagcaagttttccaaccggcgaaattacaatactcaaaagaccaaaattttcatgatatgcttagtcattatttagaggctctagatcaactacccttgagaccagatattgcttttgattgtatttggaaggcattagatgcggagtttgtccgacttcagaaagagaatggaagcaaagaaggtagatttagtcttttctataaacacataagcaaaagcacatatacttgtaactcatattcacagttaacagaagtaataccattacaaacatgtgaatttgtggcaaagagaatattagaaaataacatttcatataaagctagcccgagaaacaacgacttccaaagttttaggaagagaataatccaaagcttcggtcaaagtctttataacgtctttattgataaatacgagacattgtgggcatccaataaagctaacacacaacgtgatgcgggacttttgatccaaaagttgctaaaggggaagaaattattaattgaaacaatcgagtttcaactttcggatcaagatagggctctttttttgacggcagtaaccatgcctcagttcagaaatgagcgatttcatggtctaacgacacctccttttagatcaagcgctgccacattaaagacctattctcatgcttattttgtattccatgtggcatatattcaccttttagaggtattcctttataggcaatttaatactattgacatcaagactgcaacccaatcaattaatgacaacttaaatttgttcttaacagtatttaaaagtgaaataaataaataa

SEQ ID NO: 97591 - DNA, 243 bp, Enterobacter aerogenes
atggtgagcggtggcccagttattgggctgtactgtgagcccgaggtttcggaagatgacgaaatcgatgatgtgggtcaattgaatgcattttttgacattcttgaatcagagccggaatcaacagagcgatatcagttacccgatatagatggagaagatgctttcatccgtattggctctattgcgatggtccgaatagatcttgatgctttggagtctgtcgaggaaggtgatgcgtaa

SEQ ID NO: 97592 - DNA, 375 bp, Enterobacter aerogenes
atgcaaatacaatatctgtcccctcaaagggcggcatcgtcacgtccgtcatcagtcgaaatctggcgaaaattactggagtatctgctggagcaacactatggccttaccctcaacgacacaccgtttggcaacgacagtgtgatccagaagtacattgatgcgggtatctcactgtgtgatgcggtgaattttatcgtggaaaagtacgacctggtgcgtactgatcgtcaaggcttcagcgtaaaagagcagtttccgtttatcggcagcattgatatgctccgcgcccggaaggctaccgggctgatgacccgcaagggatataaaaccgttactgacatcaccagtagcagattcagcggcaggaaataa

SEQ ID NO: 97593 - DNA, 360 bp, Enterobacter aerogenes
atgcagaaagcaacccgtttaatcaaccataacatcgcggacacctggtggggcctcagacgcaacgtcacgccgtgttttggtgcacggctggtacaggagggtaaccacctgtattaccttgctgaccgcgccagcattgccgggacattcaatgacgcagatttacgccatctggaccaggcatttccggtactgatgaagcggatggagctcatgctgaccagcagcgagctcacacctcacattcagcgctgcctcacgctccacgcaaaagggctgatatgtgaggccgatacgctcggctcctgtggctatttgcatatcgtaatttatccgacatctgcaataaccgcataa

SEQ ID NO: 97594 - DNA, 234 bp, Enterobacter aerogenes
atgcagtatgaactgtctcacctgaataccttgtgggatgaactgggggaaacaacggtcggggatgaggacggtgatgttgtgaccgacgaacccttcctgcatttcccggcaggtacccctctcttccatatatgggcatggttcgaatccctgcactacgggttcgtcgttgccgtgaagttgtacaacacatccgtcccggatacgtcaacagacaggaaaagcaaatga

SEQ ID NO: 97595 - DNA, 480 bp, Enterobacter aerogenes
atgaccgacatgattaatattaacgataacaatcagcgacttctgcaggcttgcgataacggttctgcacctgctctggcagccacgcccgtagcggacgaacagcgtgtggaattctggccgcagcactttggcaacatcccgcagtggataacccttgaaccacaggtctttgcgtggatggaccgattctgcgctgactacagcggcggtatctggagtttttattctctcagcaacggcggggccttcatggctccggaaacggacagcgatgccttctggtcgctgttcaacaccatgaatggcaacgccacagacatgagcgccgaagctgcagggattgcagtctgtcttgtcgcttacagtcatcacgcatgccgcacagaatgcgacgccatgacggaacattactggcgtctgcgtgactatgcactgaaccacgcagaatgcagcgccatcatgcgcattatcgactga

SEQ ID NO: 97596 - DNA, 231 bp, Enterobacter aerogenes
atggctaccagtacaaccccatccgccgcgtcattacttaatgcagaagactctcttatcgacatggcatacatcaccaaacacaccaagatgaccgacaaatggttttacaagttgattcaagatggcaggttcccgaaacccatcaaactgggacggtgttcccgttggtataaaagcgaagtagaaagctgggtgcaacagcgtattgcagactcgcggggagcttga

SEQ ID NO: 97597 - DNA, 255 bp, Enterobacter aerogenes
atgaattttaagacccttaccagtgaggaacagaacgacggaattcgtatgctgaaatgctacctcgccagtgaccgccgtgggcattttgtgacgaccagtgaagcggcaaacatgccgggacaggtatggggctgtgtatcctatggctgccgactcatcttacataacggcacgcacgttgactcccccctggttcgagcacgaccaagcgtcagtagctgccaatacgctaatgaactatgcgcatattga

SEQ ID NO: 97598 - DNA, 363 bp, Enterobacter aerogenes
atgaaaaccactctatacaaagatttctcctttgaagccgcacatcgtcttcccaatgtaccggatggccataaatgtggacgcctgcatggacactcttttgtcgtgcgccttgagattactggtgaagttgataagcataccggttgggttatcgactttgccgaactaaaagcgatttttaaaccgacgttggatagactggatcattactatctcaatgacatcccaggtctggaaaatcctaccagtgaagtgcttgcagaatggatctggaatcagattaaaccgcaactcccgatcctgagcgcagtcgtcgtgaaagagacatgcacagcaggctgcatctaccgtggtgaataa

SEQ ID NO: 97599 - DNA, 2172 bp, Enterobacter aerogenes
atgtgtgcagattggctgaaaaacttttacgctgaagataaacatctggattatgacagggcgatgcagggcggttatagcatccaacaaatgaacacgctgattcagcgggccgctgcgcaacgtatgccctgcatcgttccttctacgcgaacgggaaaaacggtgttttatgctctggcagagaatgcgagaagcctggacgaattacggcgcattttgaccgcggcgctcggttccgccgacactaatgcggatatcagatccctctatcacactaacgatccaggggaacagttgcttctggataaatctccggacggaattctgaccttcgactttttaccggtgccggatggatcgccgcaacaggtaaaagaatggcagatagcccgaatgaaacgggtctacgccatgctgcaaatggtgatggatctttatcatcagagacccgtcttacattcgctggtcagtcggcaaactggacgaatcctcagagatttctacacagcatgccacgctcgcgatggcaagattgccgaacagtatctggaagagttacgcggaaatcagatgctttcttctcttaatctcctgtttcttgagctacaggggatggcggcttcggcaaaatgggactcgattctcaaccaccctcggctggaagcattgttgcgcggtcgggtgccggagcgtatccagcgtctgctattgcgatcctctggccatttaatgcttaatgccatccgcgatgcgcacttcccgctggacaggcgtgaggatgctaggcgactggtgctgggcttattgccgctgtacaagcataagccccgctttgctcatcaggcgagtttcctgcctgactggcaaatgtggaccatgggggccgcgctgctggggatcgacgaatggcaaacggcgtcgcctctattagatcctgactggatacagcaggtcgaggggtgggcgataggcgcaagttcgctgcctgcgccgatagaagcggaagaacaggcgttgatccaggcgccggttgtcgtgctgataagccttgaaaacgcgaccgatttgttacttgaagcgctagtggcggacgctgagcgcgaagatgagatctacgcgcaattggcggcgatgcctgaagcaacacgacatgcattgcaaaaaatacccaaactctgggaggcgtggcaggcgctggaaaaacgctgtgaaccacaagactatggctggagttgctggcttgcagatatacaacaggctacggaatccgaacggtttgaatcactgcgccagcaggcgactgttcactacatggactggacaccgtcaaccttcagcgaaacgcagtggcaggcgctgctagagcagcagtccaacgcccagttgagtaaagttttacgagacgtactgccaacccttctgaactggctggaagaatataatgttcaggtatctgcctccttgtggccggactggcttatgctgctggctgttgaggatattcgctcagaggaggatgtgcgtcttggtggtatgattctggataaattcctttccggtaccttcacccgcgaggaatatgcgtccgcaattgaatcggtagcaatgctgtgctctgaaaatctgtcggtaagaaccctgggctactcgcttgatattgctgagcttctttatgataaagtcaccgctgatgacgccgccagattaggcttctgggtcacgttgcaggagttgctcaagcagcgctgggagcgtctggatgtcagcatgcagctttctacgcgcatggtagaaaggctctatctaggcgaacatgcgggacacactttccctgaagaggataatacaccgggcgtcgcgtcttcgcttcatcgcgatctcagcggtaaaacgttggcgatttatagcctgatggagggagcggcaagacgcggaaaagaggcgttgcttcagctttatcctgggctacgcgtggaactcaaccacgatcacgtcgctacctcggcgctggtgaaccttgcggaaaaagcggactactttatcttcgccagcggcagctcaaaacatcaggcgttctataccgtaacggattatcgcaaagagattatctatccatctggtaaaggggcgtcgagtatgatcgccgccttcatcagtgcgctggggtaa

SEQ ID NO: 97600 - DNA, 546 bp, Enterobacter aerogenes
atgatcggacgagcaaaacagcggcagatttttttacatggttccgcagggcaacggcagttgcgagaagtcctcagcgcccagcttgttgctctgattatgcagccagagccaatctggctggtttcgccgtgggtgagtaacttcccactactggacaatcgctcaggccattgggacagcattgatcctgcatggggaggccgggagatggatttcattgagctgctagcctgtgcggcgaataacggtgcgccgctttcgctggtgacccgcgacgaccctatgaaccgtatctttgtaaaagcattggaaaagcgcctgagcagctttgcgaattttcgtctggaatggcgtaaccatctgcatacaaaaggttttttgacgcctaacgtcttcctgaagggctctatgaattttacccggagcggcgtcaatcgaaatgaagaatttgtagaactgaactgcgattcgcatatgatcggtgaagcgatggccgaatttgaaagtcagtatctttttagtggatcacaggaagcgttctga

SEQ ID NO: 97601 - DNA, 4539 bp, Enterobacter aerogenes
atgagtgaaatcactactgctgtgctgcatcacgtcctcgacgctcttgaagcagaggaaaatgaattgctggtgtggggagacacaggtggcttcttcagtgaagaagagttactgactcacatcagaagagagttgcgcgttgtttttaaacgcactccgaccgatgaggaatgtgataatacacaattggcgatgctagacgccgccatgctgatccaagtgccgcacctcagcggcatgcctgtctggcgaacccgaatgggggagacggtccatcttttgcgtaacttgcggcagtggatgcatgggcaaaagctggaccagagcaaaacgctggtatcggactatcgctttattcgccggccgcgcacttatcccgatcgcatttacaaaccgaccacgctgattactggctggaaaaagcagctgaaattaagcgagcgcgtttgtgacattatgcgccaagcgctggcgtcagataagtccttcctgctggcgggttttcaggtgcgatctaccgaacgcattatgcagtgttggcaggatcacaaggtgaaaagcgacatggccagcggaaccattatttgtgccggtaccggtagcggtaaaacgctgtcgttttacctgcctgcgctgacccgtcttgccgaggagatttgcagcaaccctgagcgcaaggtgcgtatcctcgctatctatccgcgaaaagaactgctaaaggaccagtttgctgaaactttttcacagtgccgcaagcttgacgactatatgctcacggcggccggacgaaaaattcgaatcggcgccttttttggcgatacgccagtgaaagcggaatggtcgaggaaagacgttaagggtaaggttgggctgccgttcgggttgatgaaatgccagcatccccacccgcatcatcctaagcaagcgtgcggaggggcattgatttggcgtcgtgaggacatatttgacgcgcgagaggtgctcacctgtacgcagtgccagcatcaattggatcagagtgaaatcatgatcacccgtgatgcgcagcaaaatcgcggcgatgccccggatattctatttaccacaacggagatgctgaatctccagttgaactccacctggagtaatcatctgtttggcgtcggagagggctatggcccgacgctggtcctgcttgatgaggtccatacctacagcggaaccaccggcgctcaaactgcgctgttgctacggcgctggatgcagcgcaccgattgcctgccgcattttgttggcttgtcggcaacgcttgccgacgcgcggcacttctttgccaaactggtgggcgcacctgaagagcaggttgcgctgatccacccctacgcggaagatatgatcgaagagggggctgagtacctgctggcgctgcgaggcgatcctgtctctgaaacggcattactctccaccaccatccaggccagtatgctgatggcgcgcatgttggatagtgaagcgaataagtcgaaaggcacgtggggtaagaaaaccttcatcttcaccgacactcttgatggtaacaaccgtctgtaccatgacctcagcgatgccgaaggctgggtcacggggccaggggcgtcgcgcattgatcacccaccgttggccgtattacgcagcccctttgatgatactgcacctgagcggtctaaaaccgaactggggcagaactggaaggcggctatggagattggtcacgacctcgcgcaaaacaaatctatttcccgaacgtcgagccaggatgctggtgttgatgcatcagcggatgtcgtggtcgctacctcttcgctcgaggtgggatataacgacccgctggtcggtgctgttgttcagcataaagcgcctaacgatgtcgcctcttatttacagcgtaaaggtcgtgccggacgtccacggggcatgcgtccttggatgctggtagtgctttccgagtttggccgcgatcgcgtcgagttccagcgttatgaagggctgatgagcccggagatcaaacgtcagggcctcccgctgggcaaccagcacgtgcagaaaatgcaggcagctatggcgaccctcgactggatcagcaaagtcgggcagttcaaagacctctggggtatgttgaaaaaagttgaacataatcagctgaaatatgaccgaatgtatggcccgcttatcaagctgattgaggaggttctgagcggcggcagacggctgaacgagttgacgcgctaccttcaggacgccctacaattatctgacgacgcggtgcagaatatcctctggagcccgccgcgctcggtcatgtttgagtttctcccaaccatactacgtaacctcagaactcgctggtcgattaacggcgtggagtgggccggactgcgcccgaatcagccgaatggagagggcgaacagcaccggagcaattcgcccgccccggaatacatcccgcagaacctgtttagcgagctgaatttgccggaactggacattcgcttgaagcgtggatttgacgatgaagaccactgggaaactctctctttctggcagggaatacgtgaatttgcgcctgggcgactctctaaacgctatgccgtcaaatcgaacaaaagtaccgactggctggtgccacaatcctacgagccgatggcaggggaagggcggcaattcgttgatttccagataagcgatgcgttcggtgatagctggcaaaacgagtgtgaagttgactatcagggaaaaaccatcaaggttgttaaaccgtcgaaggtcatgaccacccgggccgacattcgccgtataaatgataaaagtaatgcgcaactgcaatgggtattcaacgtcattaaccccgctattgctacgccagacgaggtgccgaagggaccctggaagcacacgctgagtgatgtcacgttctacaaccaccagcatatgaccccgctggaactggtccgcttttctaccggatcgcaggcgtcgcttcggttcaggaataaggagcgggctcacgttgatttcacctgggttaatggcgaggaacaggttggcgtaggaagtcgtcaatgggtggatgcaatgcgcctgcgttttaacctcacctgtgatgatgtgcttggtctgctgcatcaggaagaaattcagcgaggcatgcgccccgtttattttcaacatcttgtaagacagtcgccggaatttgaatttgacagcttcaacgcggactgggccattgaatgttttatggctcagcttgcggagacactggcaaacggcgctcactcctcggttgagtcggcattacgagaaatggcctcagaaagaggggtagaaaggctggcagagatcccggccagcctgttccagccggataccgacaatgaagcaggcactgaccaggcgctacagattggactcaacaaacttcttcagcgaccggaaatacagcaactgctgctgaactgcgcgcaggcgctctggaaacccctggctgaaatcgacggttttgttgaatgggcacgccaggtattagcggataccttggctgcgggtgtgcagcaaacgctaagcacgctgcttccagacgttgatgagcgggcggtggtgacagactccttttggatgagcgatcccgacaagggcgcagaatggctggagatctggctctgtgaaatggagtctggcggtagcggtattctgattcgtttacagcagaagtgggcagaagatcctgtctccttcctaaatgtgttggtgcgtaatctttcagccagcgactacgagcagatcgattacgatctgcgaactgtgttgcagatgctgcaaacggatgaggcgcttcgtatggcgatctcagccgttcgtgaagccagcaacatggacgcccggcgggaggctaacaagaatctgcatttgcggctttcacagcgcggtctgcgcctttcccacagctttaccacggtgctgtactcgcggattctgcgggcgggcagcagcgatgacacagacacccagctttatcagttactgtcggactggtcgtcgcttgaagtgagcgcgggtattgagttcagtatgaacaccatggcgcacgcgctggcggtgaacgcgcttagtgtggaaaccgatgcttccgtcgtgtttaacgcgcagtgccggaaccaaaacctgctctggccgcgtggctacacgatccgccaggctgagctcggcttttacaatatgttttgctcgcgcaaagtcacaaccgagcgtctgcttgctggcgcgttatttagcgaacaaatcgaaaagatcgctcttgacgatgactggcttgggcatttgcatgcggcgctgcgtaaaggcggtcgtgcggaactgatcctcactcgccagcagcgaaatcaattacatcaggtcattaccaccgtgcaaattgaacccatcgatcatttgggactgctgctgtatccgcgtctcggtgaagtccgccgtgagcaggatttactcatattgcgtattgaactggcggaggcgatgcaatga

SEQ ID NO: 97602 - DNA, 744 bp, Enterobacter aerogenes
atgaacacgcttaagcagcaactcatccaacttcgcaaggattttcaactgaagaagcaggtgaaacaagaagataatgtttacgaaaagtaccggcaaattcgcgacgatttgcacaacgttgcttcatctttaaaggagacggcaactcagcttcatgtcattactcaactgccttcaccgttgtcgcaaatcactcttgatgcccatgaaaaagcggcgatttatgacgctgaaacagctctgaaagaatttgcagaaaaattccagcatatggccgatgaggctcagcaaaaagggggattaggcgagatgctcgatgcgctgatgtccgtccaatcgaaatttgcagataaaattgatagcaactggcagacattcatccacgatcttgaaagccaacagatgctggaaacggtcttccttgaacagcaaaagacgttaggattcaataacacctataacgactaccgaaaggcacttgatggcttcaatcatcagaaaatgatggggcccgctaatcccattgtgattaaaaaactacagcagtactgtgatgaaatggtcgagttaaaaggcaaaatggattttaaagcgccagcctgcgtccttgattttttccaagcgctcaataatagcaatcgcgcaccgttgactttgctgacgcctgaagtccttagctggctgatggaaaaagaaatgctgaactcattcaatgtgatgcgcaaaggtttactgggatga

SEQ ID NO: 97603 - DNA, 3138 bp, Enterobacter aerogenes
atgaaaatgctggaatattggccgtctttaccgaacatcagacagtgcattcgtaccgaggcggaagagctttcggaccatacgctgctggccgttcatgagccagcccgaatcttacgaatgaatacagacggcagtccgttggcgtatgaaacggaagagcagttgctaaaacactttctggaagtgcagcgcccactgccaatcataggcaacacaggggtagggaagtcccatattatccgttggctggatgcgaacctgcgcctgcgccctgaatttaaaaataaacagtggcatattgtccgtatacccaaaagtgcaagcctacgggaagtacttgagcttttactggaagggcttgagggcgaaatttttgatgaagcgcgtgaggatatcaacaaggtcagcgataaacgctcacccaaagagatcgctgaatggcttttgatgttgatggggcaagagcttcgtgatcttcatgcgcgttcaagcgctgattatgagcagcttaagcaggaagcggcggaagcaagcccggagcagcagaatgcactgcgcaagaagtcctctgagttaaagaaaatcaatattcatgccgcagaaaatgccctgccgacgctgatcaacgacgcttatttcaaacagttcttactaaaggaagaacagtgcctgttccgtttcgccagccgtctaatcagtggcgcaaacagcgatgaacttgaagagggtgaacagcaacttaaagccagcgatcttgatttccaaatacacctaagtgatctgagccttccgacgcgttcgtatatcagtcggacgcgactcaatacgcatgaacctggtcggcaggaagccgctgaaattctgaacctggtgctcggtaaagcagcacaaaccctttttaatcagctctttaatttccgggggcgcagcttttccgatctatttctacagattcgaaaagcattgcatgaacggggaatgaccctgatggtgctggtggaagatatgtctctgatcaccgctattgaagatgtgcttatcgacagcctggagcgtgaggggacgcgcgatggtgaagaagtgctttgtccggtgtgctcggcctttgcgacgactgaaggttatcagggatataaccgtcgtcgccaggggatgcgtgaccgtgcgaaaggtgaatggcggatcgaagaggttgtaggtgagcgttcagagacgcggcagcggattgtcgacttttgcagtcgctatatcaatgccgcgcgttttggggataagtctctgctcgagttctggaaaaaacgtaccagcgatacgaactgggtgccaaactgggatcagcatgctgaagccattgagggtattgatgcttttggctacagctctctgggctatgcgctttttccctttaatgaacgcgcaattcatgcgctggcggatgttcactgtggcgatggtaataagggcataaaatttaatcccagaatcatccttaacaaaatcctgttaaacatcttgttcaactatcgggttatggcacaagaaggacggtttccgcctccgcaacttgatggcattaccgcacctcatgggttgagaacctggctgagtcgaaaaacgttggcggagcaggaccgctctgaaaccgtcgcggctatttggggatatccggcagacaatggtcccgcccttgctaccgcattgcctcctgcggttgtgcgctgctttggcctcaatgatttggcaaacgaactcgcgtcgactgagaaaggcgcgatcaaccccggtaatgctgcaacggttggacgaaaaatcgagcctgtcagtgcgaaaacggtgaagccaaaccctgttccgcaagaatcggttgagcctgttgatcccctcgaagcacgtgtttacaagatggaggcaagcgtttccgactggatactgaaagatgtattactcgatcaggatacggcgaaatatatccgtaactcgctggcaatgatttatgaccagcacgccaatgctgactggtatggtgcgaagtctaagcccgatattcgcagtgggaatttcgttaacattaatgtcccaaatgcgcacggtaacaggctgaaacaggtagtgaattttgtctccgaggcggagtataagaaacggtcagtctggataactgaggtatcgctggcccttgcacgtttcgggctctatatggacaaaaaaaatggcccggactggacttattcgaaagctgcggaagattatctggttatacagtcctttgctgaccgttgggtgccctacgctctcaccgaactcctgcgcagcaagcgtgaaaatcaggggatgatactgactgaacatctgcagttggcccgggcccttggcattatcaaaccgaatgcgacctccaaagaggtgctgaatcaattgctaatgaacaaagaggcattgatcggccaacataaatctgccgccacagagagcattgccaaagtacgctctgacgctcttgataagtgggaggaggtgaagtcgaaatggctaaatctctatgccccaaacgatcatgcactggaaggcgatattgtgcagaaaatggtgctggaggccctgaaacaaccagcagacagcaggatagagcaggcggcgaacagaacggtaagagagattgcgtcaacgctgaccgaggtcacgtatttctccgattgcgaaaacagtgaggcattcgctcaacttatcgaggatgccgtatcgttgttggaagagttacgtgaagaaggtgactatccggttaatgctgaggtggactgcagtacgctgcaagcagaactaagtgctttaaaagaaggtggcacgtgggcaatgatcctcaaattacgaagcattacgcagaaagaagaaccacttgctttgtggcagttgctttgcgatttagatggaaaattactcaagcgttttacagatactctgcagcggtggcaaaagatttgtaagcaaaccttgagtgcgattacggggtacaaccaggataaaggtggtcaccgaatcagtgagtgtcgcgcgcaaattgacagagtcctgatggagatgatgcaggatcttcagatcctcaaagagaatgcaggaggtagcgatgaacacgcttaa

SEQ ID NO: 97604 - DNA, 903 bp, Enterobacter aerogenes
gtggcaatcattaataacgcccatccgggtagccagattcgcttgatctgcacaattgatagggtcctcaatcgccgtggaggaaaaccgattttgcatgaagatttggttgaactgctgcgtccccaggcgctgccgcaatccgatattggtgcggagcgttttcggaagaacctggatttctggttggaagaagggctatggcagcagactgaggcgggtatttcccgacatactccactcgcgaatgagcgcaatctgccgagccgcgtattacgcacattgataacaaacgagccaaaagagtcattgctggaaggcacccgtggacagcctttcctactaagtatcaccgcgttgcttgcgcaggataattttgccttcatcggcaagagcacgctgacaaaagagagtgtcacgggaggcgttggaccgctgctcaaggattcgaacaacgaaggagtacgtcgccagatcaacttatcaaatgaagcgacaacgttccttgaatttgcttttttcctcggttttgttgagccatttatggatggatatctggttgatccgacgcgagctattgagggcgtactggaccgtgtgctggagaaccacagcaaccttcccgcaattgacttcatatcccggcttgcagaagtcttaccgatgatcgatggcggaagctatcgtcagcaggttgaaccaatgattacggcagataactggacaccgaaagaaccattatatttgagcgcctctctgagtcaggcgctggtgcgtcttgagctggcactgaagataaagtttgagattagggctgatgatcatcaggcgctattgttaaccgggccggacggtaatacccaacggataagcgccattagccctggggagcttttaaaatga

SEQ ID NO: 97605 - DNA, 2481 bp, Enterobacter aerogenes
atggaattccaatggaggcaactccgtgagctactcgcgatggacgagtgtcaggacaataattttgtaatccatcaggatgacggtcagtttttctatcgtctctggcgatgtctgaacgatgcaggcgcggggatctcagaccgattacatggctattatgacgctttacaatgtgcccgagctcatgggcttctgccgttgcgcctgccgcttaaagagcacatcttatcagaggatttactgcgtgctggcctacggcgcagccgggattatcctggtgaggttctgttagacgagaacgcattacagatcgcgccagagttattggcagtgtggcgaaaggagaaaagacgtctgctccagaccccgccgctggatacgttgttaccgattctgttgaatgacactaaatacactcattacacatctgttgggcagcagcttgctgtacgcacggtgttgacgagtgataaagaccgttttttgtttattaacctgccaacgggggctggtaagacgttcattatccattctctgatgctggcaactcccgcaagtcaactgacactggtgattgttccgactatcagccttgctattgagcaggctcagcgcgctcagtccatgttactgcaggcaaacgccgaccatggtggcgaatacacctggcactctgggcaaacaccagaggcacgcgaggcgattaaggcccgtatcaaagccggtaaacaaaggttactgttttgttcaccggaagcggcatccagtggttcgctgctattgcttctattttcactggccaagcggaaaatgattggcgccctggtcgtggacgaagcccatcttatcgatcaatggggtgcggaattccggccggaattccaactgcttgcgccgttggtaaaatcattggtggaagtgagtaaggcgagcattcgcacggtacttctttccgcgacgtggagtcaggcaacgctcaatacccttaaagagctctttgccggtgataaccctcaggcgatcgttgaagttaacggcagtttcctgcgaccagagcctatgtggtacgtcagcaaagcggacgatcgtgaagatcatcgtctgcaggtggaagatgcgatttcaacgctaccgcggccgttgatcctttacgttacaacggtcgaggacgccatcgactggcaccagtatttgctcaaagccggctataagcgctgcggattggtccacggtaaagtatctccacggcagagagaaaagcagatagccgactgggctgaggataacgttgatatcatggttgcgacctctgcatttggcgtcgggatggataaaaacaacgtacgcgcggtgctgcatgttaccgtcccggaaaacatcgaccgtctctatcaggagagcgggcgtggagggcgtgacggctatgcttcagtagcacaactcatttatagggacgatcagatctctttggctcgtcaccttaaccgcgataaccttataggtgcaaaaaaagggtttctacgttggcaaaaaatgcatcagaaccgggaatcggaatcacccggttatttctcagtttatctggataccaagcacgacagcatcaaaattgattctcgtgctaatgtcgcgtggaactggcgcacactcctcatgctccaacgtgccggcttcttgagtctgcattttgctgcaccggatctcgaaccgtttgcctcagataatgtggacgatgcgaaggtagaacagtactttaaccattatttcagccatattggcgtcaaactccatcgtgaaggtcatcttgatgtgcaggagtggaattgcacgttaaaagaattgcgttccagagagttgcgtgcccggcaaaaagggtttcaggtgcttgaagattggttgaatcatcaggaaaatccgctatgtagtgtccttgaatcgttctacacgcttgatggttacgccccagaactggcttgtggtggttgcccaggttgtcgctctcaggcgttgtcagcatatacgcctacgctgggcttgaatgcatatttgatttctggcgaagaacgcgagcgcatcggtagcgatatgcgtatttattaccctccggcccgatcctccgctttgctgcttcgccagtggatcgactggatcgcacgtttgctagtcacacgtgagattcaggccatccgcgcaagctcgaccgtactatcccaattaagccaacaactttataagagcgtgccattctggtgcgcgctttcacatgacgatccctcgacaaactggaatgaactggtacttgtcctgcccggagagagcctgccagaacttgacccgtttagtgatatcaaacgaatcattgtggccccagagacgctccctgaaaaaaacgttcggggaaggctatggtgggagagtgatcccagagcgcgtacgctggaccaatttataaggagtttaagcagtggcaatcattaa

SEQ ID NO: 97606 - DNA, 2706 bp, Enterobacter aerogenes
atgaaccctgcccattttcttgctgcccgttcaaacgatgctccgtttttttaccctctgcgcgagcgatttgtcagcgcgtggattaagcagcgtgcagcatgccgatcgatatcttcgttgatcagcagtcgcgttgaggtcgagcctcatcagattgctgttgttcgtcgaattctccaagaccagaaccctaaatacctcctggcagacgaagtggggttaggtaaaaccattgaagctgggttggtcatccgcgagcatattctggaatttaatcgcgacgctagggttttggtagtcgtaccgcaggcgttaaaaggccagtggagtgaggagttgatcggacgctttgcattaggtgaagtgatgattggaggagggcgaacgcggcaaatccggctttgcaaccatgatgagattaccgactccttgatgaaaacatgggggccgacgttgattgtggtggacgaagctcaccaactcgcacgtcacgcttgggctgaaaacgttgctaaacttgctcaatataccgcgttgacaacactttgccatcaaacgggcattgtgttgttactctcagggacgccgatgcatggtaacgaactgaactttctagcgatgttgcattgcatcaatgaagaagcctggccactggacccggcaggttgtgagcattttctccaacgcgtggcagagcgtgagagccttggcgggatctataccgcgctccagcctgaaaacgacaacggcattatcgaaagctgtcttgaggagttgtctgagaagtttcctgatgatgaggaacttcagggtttaattaatgaggtgcggccgcttgttgattttatcgccgatgaagaaggcgaagagcgtagcgagaaaattttggcgcttcgcaattggttaggtgagcattaccgtctgtttcatcggctgttacgtaaccgccgcgaagatccttctcttgcctggcttttccctgggttagcggggctgaatgtcgcgcactggtccgtcaagcctgaagatgtcaccttagacgaacttcttgaggactggcgttctagtgccaaaaattctcctgagaagcatcgccatatcaccagggagaatctgagcgattgggtggatgcgctattcaccagtcccctgacattttcacgtcgagcacgcttagcgctggaacagggacccgccagcatagatgaacaaaattaccttgaacaagcgcaggcaattgcgaagcaagagcaacgccaaaaagacgagcaattgatgagcgccctcaacgcttggtttgcgaatcacaaagaagggaaagcggtcatattctgtagtgaagaagcggaatccgctcatcttttcacaaagctggatctacagtccacctggaaaatcgtccgccacgcgccggataagtacgcgcttaacaaccactggcaggtgctgatatgcgacaggcgtggggaggatggccttaatcttcatgggaaaaatcgtctggccgttcattacagcctaagtcgcgatttcaaccgttttgagcaacgtcttgggcgcttcaaccgctactcaggcaacttaaggggcatcaaaccggtagaaagcctcgtcatcctgcctggaagagacggcctgtcatcggagtggaccaggcttttagataagggcattaacctgttcagacaaagcgtagccagcctgcagtttgtgttggatgagcaaatagaggctatgtggcggcgttattttgagggcggtcttgccgtcatcagtactaccatcgatgccttggggggagaaaaagggttcgtagccgttgagcgtaaaaaagtgtttgagcaggagaacctgctttctatggagcaagaggtcattgcttcacaggcattttctgaggcattgctggagtcggaagatgatgcggaacagcgtgcgctggacatgctgcaatggatcaccaaagcactccagtttaatcaacaaattgagcaagataaaaccgggttcaggttacgctttgaacgagatgaatataaggggcgcacgctcgttgatgtgcaaacttttatcgacaactgtttgcttggactggatttttcagagggctatcctccttctacagcaatcatgaccctctcgcgtacccaggctagtttgcacaaaaatacttatcctctccgctacgggcaacctttcgtggataccgtctggcaacttatgcagagtgatcctcgcggtacgacgatggcgatcctacgcatgatgaaaacgattaaactcccgtcgccacagttttatttccattttcaatggttaagcagcgctagcctggatggcgataataagctggtagctcaacgtcagggagatgagcgttttgccccgcggctggaaaccttctggctcgatgctaatggtcgcgaagttgatgaaaagattatcgctgttttggaaaaaccgtacgataaaaaagggactgtgctctacgaagatatgaacctgcgaaccgatgtatggccacagatgacgcgttggtttgatcccgaagcctggaaaaatacggtgctggagttaacagaaaaagcgaagcagcgtcagcaaattcgttacccttcgagtgacgtattgcctattgggcaccagttgatggcggtgaaggcgataattttgtgcagcaaagagactttccagatggagtaa

SEQ ID NO: 97607 - DNA, 1128 bp, Enterobacter aerogenes
atgagtgaatatcgtgttcctgccctgcgaatccgacagggtgaggagaggcaactctatagccttgcgatagaaggtaaacagatcagcaaaattgcagctatttcgcgtattcgtcgcggcgaagagagtttggttggttatcagcgtccagaagtacgtaaccatattcgcgaaattcagcgctacattgagagcgcaaatccgatgataccaaacccggtgattatcgcttttgataagcgtgtgcgttttgaaccgcttatagataatgacgacatgggacatctggtaatacctttctccgaagataaggattttgagaagccaggttttattgtggatggtcaacaacgtactgctgctttgcgggatgcagaaatcaattcgttcatgatgccggtctccgcttttatcgctaatgacgcggaagaacagcgtgaacagttcatgctggttaactccacaaaaccgttgcccaaaacgttgttatacgaactggcaccgcatacccacggtcgtttgccatccgatctgcaaatgcgtaagtttccttcactgctgactcaacgactgaacttcggcgaaggttcacttgcagggcgtatcaaaacggcgaccaatcctgatggggttattgctgacaactcgatgatcaaaatgatcgatgccagtcttcgcgagggagcattgtatcgcttccgtgacccggcgacagggttaggggatgaaggaaagatggtgaaactgctgaataacttctggtcggctgtggaaactgtgtttactgatgactgggataaaaagcctcgctattcccgcttgttacatggcgttggcattcttgcgcttggcagcttgatggatgaaatcgatcaggtccatcaagactataaaggtgaacctggctggactgagatcccttcctatactcgttttgtcgaagagctaaaccgaataaagccgctttgtgcatggagcagtggcgtgtggaacttcggcacagatattgatggtcagcctatcgtccgtaaatggaacgaactgcaaaatctttcaaaagatatatctttggttactgactatttggtaaccagctatataaaaaccgtaaacgaagatatttaa

SEQ ID NO: 97608 - DNA, 1272 bp, Enterobacter aerogenes
gtggcgtcacaggagagtaagttgtcgaagctaaagtattttttccctgatagtcaggattttatcgatcccagtttcgacttcttccgcgaaacgcgtaacgaacatcgcgtgcgtcaacgtgacgatcagtatccgcatgaggtttttcctcatccttacgatggtatgctggtttctaaagctgtagttgatggtcttggcggcggcgagagcaaatatactcgtgcccagcgtttgcgttacttccgtaatggaatgaagcactttttccgtctgccggaaaatatggaaactatgggtgattgcggagccttcacctatgttaatcaggacgtcccgccataccgtgtggaagaggtgattgagttttacgaaacttcccgctttaaccatggcgtttctctcgatcatatcgtttttggctatgaaaaacctggtgaggtattcagtggcgaagtattgagtgagtgtcgccgacgccaggatatcacgctgaccttggctcaagagtttttaaataagtctcaaaagtcctgtttcaccccctttggcgttgcacatggatggagcaaaacctcctaccgtcagtctgtagaggccctgctggccatgggatacaaaaatatcactatgggggggatggtgccgttgaaaacggcgcagatcctagagactctcgaagagattaagccgttgctgaaaagtgatacgcgtgttcacttgcttggtattgcccgtccagagagtttctccgactttatcaagtttggtgtgaccagtattgactcgactacaccgcttcagcaggccttcaaagatcgaaaaaacaactatcatacgcttgatggcccggcctataccgctgtgcgtgtccctcagtttgatgcgaatccaagtttgagtcgcaaaattaaatctggcgtgattgatcaggatattgcacggcatctggaaaaggatgccatgaatgccctcttcgaatacgataaaggggctttgtcccttgagaaggctcttgatgcagtcctggcttatgaacgtctgcattcgggtgaaaaagaggccgacaaaattcgtgcggattatgaacgtacgctaggagaacgaccctggaaacaatgccagtgcaatatttgccaggccatcggtatcaatgtcatcattttccgcggagcagaacgtaaccgtcgccgcggtttccataatattcaggtgttgtacaaccgtttacagcacacattgtcattacgctcagaggaactgtcatga

SEQ ID NO: 97609 - DNA, 306 bp, Enterobacter aerogenes
atgctcatgcttaatatcagtgtggcaaaatacattgtgaaggaatttacgtcaaaacaactcaatgatttaaatgagttatctcaaaagttaatagaacaactcaaggagttacctgagcgtgaagtgaaaaaaggaattcgtcgtagtccggaggaagttaagtctttcattttaaagattatggaaaaaaatcctggtatcagtgcaacacacgcgttgcgtgaatttcgtgactcgggaaattcatttgaggaaaaacgttttcgggctgagtttatggccctgagagaggctaaaccttaa

SEQ ID NO: 97610 - DNA, 1779 bp, Enterobacter aerogenes
atggggcatgatgatggtgacataaccttaacgcagttttatttaccaagtcgagttgcacatgcaaatgattatgagctcacattaactgttcttgataataaatcttttaaaatctctggcaagacaatcaactttactggtcatatcggacaactcttcgataaagaaggtatcctgttaaaggttgataaactcgatgctaagattggcacaacatttaccatcaagtatttaaccagattacaagcaattgcggaattgcagcgtaatttcactgtcggcgatgttagtaaagatagtgggatgctgcaactaacatacgaagatgctaacgagagtgcggcacagagaattcttcaaagtatcagtgataattatttggctcagaatgttgccctccaggctgcgcaagatgaaaaaagtctggattttttgaataagcaattaccaatcgtacgtaatgatttagaccatgcagaagaccttcttaataattatcgcaggaaaaaagactccgttgatttatcaatggaagctaaatctgtattagatcaaattgttaatgtcgataatcagttaaatagcttaacattcaaggaagcggagatctcacagctgtttacaagagagcatccaacttacaaagctctgatggaaaaaagaaagacattacaagatgaaaaattaaaacttaataaacgagtttctttaatgcctgagactcaacaagaggtactacgtctcagtagagatgttgactcgggcaaagccgtttatatgcaattgttaactaagcagcaagagcttaatattgcaaaatcaagcgtaattggaaatgtacgcatagttgatgaagccgtaacacaaccaaagccagtcaaaccaaatgctacgttggttatatttattggcgctgtactagggttagttatctcgtcagcgttagtgttacttaaaatattcattcgtaaaggggtagagtctcctgagcaacttgaggaactcggggtcaatgtatatgcaagtgttcctgtatccgaaaatctgattaagaagactactgggaataaaaaaggaattcaggctgaaagtgctccattagctatagataacccagcagacttggccatagaggccattcgagggctaagaaccagtcttcatttcgcaatgatggaggctaaaaataaagttttaatgatttcaggtgcaactccaagtgccggtaaaacttttattagctctaatttatctgtgattgtggcgacgacaggtaaaaaagtcctgcttatcgatgctgatatgagaaaaggttatgtacataagctttttgcggtcaataatgagaaaggcttatcaaattatctatcaggtaaactatctataacagatgttcttaataaaacacaatatcagggaattgatttcatttcccgagggatggttccgcctaaccctgcagaattattaatgcatccgcgttttgaagaattaattaactgggcaaatgataattatgatattgtaattatagatactcctcctgtattggcagtaaccgatcctgtcattattggtcggtatgcaggtactgttttattggttgcccgctttgagcaaaacactgtgaaagaaattgatgtgagcgtaagacgatttgagcaaagcggtataccaatcaaaggatgtattctgaacggcattgtcaaaagagcaagtagctattatggttatggatataatcattatggctacgaatataaagacaagaaatag

SEQ ID NO: 97611 - DNA, 417 bp, Enterobacter aerogenes
  misc_feature (367)..(376): n is a, c, g, or t
atgtcatctattgttaataaaagtactgataaaagctcagaggaaatggagctggtcaagttactaggtgaatttattgatcatcgaaaaattatattcgcgatcactttgttctttgtattattctctataatatattcgttatttgctacgccaatctatcaggctgatgcaatgatacaaattgaacaaaaacaaggaaatgcaattctgagtaatttgagccagatgcttccggatagtcaacctgtatcagcgcccgaaattgcattacttcaatcgcgaatgattttaggaaagactgtagatgatttgaatttacaggcaaaaatttctgaaaatcatttccccgtctttggtaaaggcnnnnnnnnnnaggctgggctcgccttatggggcatgatgatggtgacataa

SEQ ID NO: 97612 - DNA, 132 bp, Enterobacter aerogenes
atgctttatggccattggattgatcgtcgtgaaatccccgacccctacaaaaaaagcgatgaagcgtttgattcagtgtatgaattaatcaaacgtgctggtcagtgttggattgataaattaagctcataa

SEQ ID NO: 97613 - DNA, 1140 bp, Enterobacter aerogenes
atgaaaaaaaatattgttagagtttcagcggtggcgttggcggtgagttttctggtagggtgcacaattgttcctggtcaaaacctaaacagtctgcgcaagaatgtggttgaactgcccgacagcgattacgatcttgacaagttagtaaatgtttatccgctaacccctggattggttgatcaactgcgtccagagagcatatcagcgcgcccaaacccacaattagataacctattaagaagctatgaatatcgcatcgggattggcgatgtactgatggtaactgtgtgggatcacccagaactaactactcctgcaggtcaataccgaagtgcaagtgacactggtaactgggtaaattcagacggaacaatcttttatccttatataggaaaagttcaggtcgctggtaaaacgttgagtcaaattcgacaggaaatcacagctcgtttaaatacctatattgagagtccacaggttgatgttagcgtagcagcatttcgttcacaaaaagcctatgtgacaggagaagttgcgaagtccggtcaacagccaataacaaatattccattaacagtcattgatgcagtcaatgcggcaggtggactgtctgctgatgccgattggcgcaatgtgattttgacccacaatggtaaagatataaaaatttcgttatatgcactcatgcaaaagggtgatttgactcaaaaccatttattgtatccgggtgatattctctttgttccaagaaatgacgacctcaaggtattcgtaatgggggaagtagggaaacaaacaacattaaaaatggatcgaagtgggatgactttagcagaagcattgggtaatgcagatggaatgtcacaaagcaccagtgatgctacgggtatatttattataagacagctacgcaatagcaagaatgacaagattgcaaatatttatcaattaaatgcacaagatgcttcggctatggtgcttggtactgagtttaaacttgaaccatacgatattgtttatgtcactgctgccccacttgttcgctggaatcgtgttatatcgcaactagtaccaacaattactggtgttcatgatatgactgaaactcttcgctatataaagcggtggccaaattaa

SEQ ID NO: 97614 - DNA, 3078 bp, Enterobacter aerogenes
gtgaagttcttcgctctcttcatttatcggccggtggcgacgattcttatctcgctggcgattaccctgtgcgggatcctcggattccgcctgctgccggtcgcgccgctgccgcaggtggatttcccggtgatcatgattagcgcctcgctgcccggcgcctcgccggaaaccatggcctcgtcggtggcaacaccgctggaacgctcgctggggcgcattgccggggtcaatgaaatgacctcgtcgagctcgcttggcagtacccgcatcatcatggagtttaatttcgatcgcgatattaacggcgctgcccgcgacgtgcaggcggcgattaatgccgcgcaaagtctgctgccgagcgggatgcccagccgccccacgtatcgcaaagctaacccgtccgatgcgccgatcatgatcctgacgctcacctcggatacctattcgcaaggcgagttgtacgatttcgcgtcaacccagctggcgcaaaccatcgcgcagattgacggcgtcggcgatgtcgacgtcggcggcagctcactgccggcggtgcgcgtcgaccttaacccgcaggcgctatttaaccagggcgtctcactggacgccgtgcgcagcgccattgataacgctaacgtgcgtcgcccgcagggcgcgctggaagataagacccaccgctggcaggtgcagaccaacgatgaattgaaaaccgcggcggaatatttgccggtgatcgtccactacaataacggcgcggcggtacgccttggcgacgtggcaaaagtgacggattcagtgcaggatgtgcgtaacgccgggatgaccaacgccaaaccggcgatcctgttgatgattcgcaagctgccggaagccaacatcattcagacggttgatagcattcgcgcccgcctgccggaactacagcgtaccatccccgccgccattgacttacagattgcgcaggatcgttcgcccactatccgcgcatcgctggaagaggtcgaacaaacgctggtgatttcggtcgcgctggtgattctggtggtctttctgtttttgcgctccgggcgcgcaacgcttatcccggccgtcgccgtgccggtatcgttaatcggtacctttgccgcgatgtatttgtgcggcttcagcctcaataatctgtcgttaatggcgctgaccatcgccaccggtttcgtcgtcgacgacgccatcgtggtgctggagaacatttcccgccatcttgaggcgggaatgaaaccgctgcaggccgcgttacagggcagccgtgaagtcggctttaccgtgctgtcgatgagcctgtcgctggtggcggtgttcttaccgctgctgctgatgggcggcctgccgggtcgtctgctgcgcgagttcgccgtcacgctatcggtagcgatcggtatttcgctcgccgtgtcgctcacgctgacgccaatgatgtgcggctggctgctgaaaagcggcaaacctcatgaaccaacgcgcaagcgtggctttggccgcctgctggtcactattcagggcggctatggcaaatcgttaaaatgggtgctgaagcatagtcgcctgactggcctggtgctgctcggtacgatggcgctcagcgtgtggctgtatatcgccattccgaaaaccttcttcccggagcaggacaccggggtgctgatgggcggcattcaggcggatcagagtatttcgttccaggcgatgcgcggcaaactgcaggactttatgaagatcatccgcgaggatccggcggtcgataacgtgaccggttttaccggcggctcgcgggtgaatagcggtatgatgtttatcaccctgaaaccgcgcgatcagcgccacgaaacggcgcagcaaatcatcgaccggctgcggaaaaaactggcgaaagagcccggcgctaatctgttcctgatggcggtgcaggatatccgcgttggcggtcgtcagtcgaacgccagctatcagtacaccctgttatcggacgatctgtcggcgctgcgtgaatgggagccaaaaatccgcaaggcgctggcggcgctcccggaactggccgacgttaactcggatcagcaagataatggcgcggagatggatctggtctacgaccgcgacaccatgtcacgcctgggcgtcagcgtgcaggatgccaacagcctgttaaacaacgctttcggccagcggcaaatctcgaccatctaccagccgctcaaccagtacaaagtggtgatggaagtcgatccagtttatacccaggacgttagcgcgctggaacaaatgtttgtcatcagtaaagacgggaaacccattccgctgtcgtatttcgccaaatggcaaccggcgaacgcgccgctttcggtcaatcatcaggggctatcggccgcctcgaccatctccttcaacctgccgaccggcaaatcgctgtcggaagccagcgacgccattgaccgggcgatgacccagctcggcgtgccgtcgagcgtccgtggatcctttgccggcaccgcgcaggtattccagcagacgatgaactcacaggtgatcctgattatcgccgccatcgccacggtgtatatcgtgctggggatcctctatgaaagctacgtgcatccgttaactatcctctccaccctaccgtcagcgggggttggcgctctgctggcgctggaattgttcggcgccccattcagcctaatcgccctgatagggatcatgctattaattggcatcgtgaagaaaaacgccatcatgatggtcgatttcgcccttgaagcgcaacgcaatggcaatcttccgcccgaagaagccatcttccaggcctgcctgctgcgttttcgcccgatcatgatgaccaccctggcggcgctattcggcgcgctaccgctggtgctatcgggcggggatggttcagagctgcggcagccattggggatcaccatcgtcggcggtctggtcatgagccagttgctgacgctgtacaccaccccggtggtctatttgttctttgatcgtctgcggctgcgttttacgcgcaagtctgctcaaccggtaagcgaataa

SEQ ID NO: 97615 - DNA, 714 bp, Enterobacter aerogenes
atgcattttaagaacttcaccttaagcgccctgctactgttttcagccagcgccgcggcggaaataactgaacaacaaatcgaagccgactgcgccaaaatccccacctacgcccggcagggtgaacgggaatatcaggcgaaaaactatcctaaagcccgggaagccttcgagcagcaggtcatctggagcgaaagctgtgcgctggatgacgacgctatcgccaccgcctataacaatgtcgccctcaccttgatgcgcgaaaagcagtggcgcaaggcgcgcgcctggttactgatccggccagacgatcgtaagtcggtttataacctggcgctcattaaagaccaactggccgccttgccaacgcctcatagcgcatcaggcgaatattggcaatatgccggacgggcctcatggaatacactctcgctcataaaacagcaaaaaccgaataccttcccggctgattttcaggggtattattttggtctgatgagcgcgtattacggtcctaatatgggtgagttttccgcacccgtagtgctgaaaaacggcaaaggagagatcgcgattgatgaagataatgaaattaactgcaccatttcactggacgttgcgcccgaaggtttgacaatagcagccgatgagccggataactgtgggttcggcgccaacgtccgcgcgcaaggccattacctgcgcgttgaatag

SEQ ID NO: 97616 - DNA, 555 bp, Enterobacter aerogenes
atggcgctggacccggacatcagtcctgatactgttcttgccctcgcaggctttgtaactcaccatcagaaaacggtgctggttaactatgagttgccggtgtctgccattggttttgttatggggcataacatgcttgacgagtactggtatactgacagtcattcatcaatgttccgtcccggtaacaggatggatccacggttaggtgcaaatggcaaactaccgcggaaggatatttcctgccgggtaaccggcccgattctggagcatctgcaccataattttgccatagcgtggcgtaaagaaaccggccaggatctgatgactatccgcaatgctgccgttgtggctaaagatctgaaaccaaggcccattcacggtactccgctgatggcacagttattacgtactccggcacagccagggaaacatgatattgaaacgctctatctgaaagcggtgaataatgcgacgcagtttatctatatcgaaaaccaatattttcgctggccaccactggcggaattaataaataagattgcggaaagatag

SEQ ID NO: 97617 - DNA, 654 bp, Enterobacter aerogenes
gtgactaaagtcacggatgaaggtattggggcgggaacgctgaatacccagcgcatgcttgagacgctcgatcaggctaataccattcctgaagtgacaaaactgcgtaaaattgggctactcagcaacgaaacgtttggtggctctggctatattgatctgggggaaataaataaacataaccgcgagatgagtgagaaaattgctgactttaaaaagaaagcgaatgaaattcagagcagcgagatactgcctgaagaacgccccgggcttaagatccatctctgttcattagttgctcctgactcgctgccggaagaatggatgccggtctatatccactccaagctgatgatagtgaatgacgtgtttaccacgcacggctccgccaatatcaacacgcgcagtatgcaggtagacagtgaaatgaatattgcacatgaatgggccggcgtgacgcgggatttacggcgacggttgtggaatctgcatacaaatgggaaaggggggctggatgatccggccaaggcatttgaggaatggggttatctccttgatagaaatgaagcccatcaagattcaaagaaagaacaaccggaggcctccctgattaaattcttttacaacaaagcgacgctgagcgatctggactga

SEQ ID NO: 97618 - DNA, 1095 bp, Enterobacter aerogenes
atgaaacgactcttctttttattctgtttagtgctggccgcctgtgatcagaacaatacccacaaggatgcgcccatgaacccgctgaccgatattaacgcccggctggcgtttacctgtaaacaccagagtatccctgaggtatctgctgatgcagacgtgctgtttaagtatgcccgctggttgcagaaaaacaatctgattaaccgggacaaaacggtggatgtggaaatcgcacgactgtaccgtatcgcagcagaaaacgggcactacaaatccagtattaacctgcaaaacggggcgctgcgcgggcgtttttcgctgagcagccatgagcgtctgcgcctgagtcagcgactgatagatgcgaaggtggccgctggctattactttatcgccatctatctggagcacggtgcggcaggactggcgcaggacccggagatggcgcagcgttattaccgtaaggcggcggatgaggggaatccccaggcccaggcttatgtgggcaaaaaactggcacctgctgatatagctccggatatatcccgtcagatgcgccattgcgctgccgaacagggggaagggcgtgcggccaatgcgctggcgaatgctctctctgttgacaaaaaatatccggaggcagttgaggcattccagttaggggtcagtgcaggagattcaggttctgccggttttttgaggcatggattcagcggaccagaaccagcggacagaatgttctatttgggcctgcaaaaagacccggagcgtgcccgccgttatgagcagataggcgaagtgctggcgaaatactcctgggcacatcccacggtcccggaaatcaacgatatcgtcccgttaccgcccgcaccgcttcctgagtgggacggtaagctgaagtggctggaagagtgggaggccaatgtgtcgccgccaaagcccagtgcgtcgctgatagcagaactggcaaaagcgaaacaactgaacccggcaacaggcagaccgctgccgacatcaccggacttcgacaaagatagcgtggcgcaactgctgtgccgcagcggtgaagcctgcccgaaaagcggctactga

SEQ ID NO: 97619 - DNA, 285 bp, Enterobacter aerogenes
atgggagtggatttttcgtctttaccgcttaaagaccataccatgggcttgattttcgagatggatccgcaaggcattcttggtactaatgagcggtattttgaaaaatacattgaggataaaacaaagtttttttatcagcctaagcaatccagcggcgatttggcgcagtcaaatttggtgatttatgactgtctgagctttagccagtctaaagagcttgaagaatttattctggttttaatggcggaatcagcgtataggaaagcttatccgaaaaaataa

SEQ ID NO: 97620 - DNA, 351 bp, Enterobacter aerogenes
atgaaaaaattgattctcgcggcgctgctcgtcctccccttcgcttcaagtgcaaccacattcacctgcaaggcgatccaggaagggcagatcgattctggtagccaaaagtcttctgtcgagactctcctcgatgtgcaggacaaaagcatgaaagtgagcatgggtggtaaaacctggcgactgggtttcgttggagagaaaagtattgcgaagatgtacgccaccccagacggtgggattgccgtcacatatatcgacaacggtagcgatcctgttttcgttatgcgcccaactaacaacgacgggcaaaccgctatctatacgcttagtttgtgttctgaggcttaa

SEQ ID NO: 97621 - DNA, 195 bp, Enterobacter aerogenes
atggtggtgatatgtgggctactgttttcaccgttggcggcagcagggcagatcacaatgaccgatccccagcaggaaacgacggagagtggaaagacgctctgcacatacgagaacagcatttatctgttcacctacgtaacaaagggcaagtgcccgtatgcgaagacatttgatactgcgaattcggaatga

SEQ ID NO: 97622 - DNA, 225 bp, Enterobacter aerogenes
atgcggatcgtgaaaaattatttgctgatgcactggctcgatttgatgaataccgaaaggaaaaaaatgaacatccgattcaccgatgaaacccacaaggcgcttgttgagcgtgccaaccgtgaagataagtcagccgccgcgctggtgagtgaattaataacagcagtcctaaaccgagaggaacctaatgaccgaaaagaaaccagtagtaaactttgttaa

SEQ ID NO: 97623 - DNA, 1461 bp, Enterobacter aerogenes
atgaccgaaaagaaaccagtagtaaactttgttaatgcgatttgcggctcaggaaaaagccaccgactgaaagagtacattctcagcttcaagcgcgaagctgtcccagaaaagttcttaatcgtagtaccaacccacgctttagccgagcagttcaagcaagatctgaatctcttgagaatcccaaaccatcacattttcgttgaaggggcgactctcaacctgaaaagcaccctggctgataacttccagacaaatgtggtgataaccacccatgaatgtttcaccaactactgccacctcgctacgttcaatcctgagatgcgttctctactggcagaacacaatgtggtggtagatgagattcctgatggttggtttggagcagaagcgacgatccgccatgctgacaggacggcagaaaacttcccattcctggaatggctggaagagcgaaacgggctgctgtacctgcgcgaagagcactacgacaatctgtacaagtattaccacgagaagcacgctaacagtgacaacttgaagaaggttctttacgtggcgctcgacggtggtggtgtgatgcacaccgaatgtgactcgtcatacagcttctttgcctacacctataatccgatactgaaggccgcaaaatgggccaagagcttcactgtgctcggcgctggcgtgagtcgcagtgggtttgtctggatggcagagaacgtcgctcagatggcggttcaggaagcgggtgaacaccttcagcctgatcccgacagatgcaaacataaaaacgtacctatcaagatcatggtggttctctcggaggaaatcagaagagcggggcagtcggaactcgcccatgtcttcagcaatcacctgaacgagataaagcgggttgttgggaaggattttatcttcgctactaacaacgataaacccatctgcgacttccagaccattggactcactgaacttggggatcgcatgggaggtgaagcagtatcgatgtccagctacggaatgaacagctaccagggcattcattgcgctgtgttcctcgggtgtgcaaatctgggcgacaaagaccgtaagcgatgggctgactattgcgaacgtatcggttgggattttgaaacggtaatggagaagaagcgccaggcaatgtattttgaacggtgctaccagtttcttagccgaacatccattcgcaacactgacaccgatcaccctctcgtgtttgtcgttcccgacatggcggcagcggaatacctcaagacccattacttcccaggctcaaccatcgaatgccttggaatcaagaaagctggaaagcagcatgaaacgcgtttgaaggttctggaacataaggctcaagggctaacaccgaagaaaacggttgaagcgatgggtgtgtctctgagaaccgttcgaagctattggaaccaagaggtttgcgtatga

SEQ ID NO: 97624 - DNA, 939 bp, Enterobacter aerogenes
atgcggcacgccaaccgcggataccgtatccagcagccccataaactcgatactgatggggatgcccagcagggtcgggccgcctggcaccaccgttcccgccggcagcatatttgtcgcatcgagcggcattttagcgtcatcgagcagcgactccagcccgcgggcgaaggcgcgggcggtggcggccccccggcagtagccgtagacaaagagcttgattttggcgatgcgccgctgcgaacgctggatatgcagccgcgtcggctgccgcggccactggttgaccacggtacccagatggtcgtcgcagaatttgtcaagcgcgcttttacggttgaacttctgggtcagccgcgagaagggccagacggtagccatacgttgccgatatctggtcagctcactgtcttctaccctttcctttttcaccgcatagcaaatgctgctgtaggttttaagcagcgcctggttgatacggtcctcaccgccattggcaaacagctcgccgtccagcgagtagtgctcttcgtcaatctccggaaagcgcgccccacagccgggaaagtagtaacaaaagtagccgtcatcttccgctggcggcgactgtccgttccagtttgccgcatggtagaggcgaccgatattggtcaacggcgggtttcgcgagccatacacttcatcaccatcttcttcattacagcaggtaccgtcgaaaaacaggctgatatgcaggctggccgggcagcccggttccgtttttttgtccgattgatgatcggactccccgacataaccctccagatactgcctggcatagttgccttcggtctgcgttctgctcgccggcaggcgcccgcgctcgttgtattcggttttctgctgcgtggagttatccgcgggctttttgtcatccggcccgggaaacttcggcggtaa

SEQ ID NO: 97625 - DNA, 570 bp, Enterobacter aerogenes
atgataaagcatatccgtattttacctggcggactggcggtgctggtcgccgtttttctctgcctgctgacggcctgccgcgaccacagtcgcgatggcatgagcggcgctgatttaaatgtctataaccacggtccggacgccatcgtttcggtgcaggtgaatggctacggcgggccaggcgctaactcctacggcggcggcggcggcttctgctgcgtgatggtgccagatgtctggcgcccggggctgacggcaaaaattacctggacctccgatcctaacgcctggatggacccgaaacatatcccagacgatcatgcgagtcattatcagcgtcatggaccgatcaccgtccccattgaacgctgggagaagggacaggcctgtggctttgaagtgcatattttcccgtgcgacaaggtaagaattgttcgttcttgtcgcgatcgctcatctccggaatatccgatacatcgtgcgcccgatgaggatgaaaaggcgaaaaaaatattattcgaccatgttaaggagaatatcgtatgtccgacgccgcagactccacgctga

SEQ ID NO: 97626 - DNA, 570 bp, Enterobacter aerogenes
atgataaagcatatccgtattttacctggcggactggcggtgctggccgccgtttttctctgcctgctgacggcctgtcgcgatcacagtcgcgacggcatgagcgccgccgacatagctgtcttaaaccacggcccggacgctatcgtttcggtggaggtcaacggctacggcgggccaagagctaactcctacggcggcggcggcggcttctgctgcgtgatggtgccagatgtctggcgcccggggctgacggcaaaaattacctggacctccgatcctaacgcctggatgaaatcaagtgagatgcccgatgattatgaaactcactatcagcgccatgggccaattaccgtgccgattgagcgctgggaggaggatcaggcctgcggtttcgacgtgcatattttcccctgcgataaggtgcggatagtccgttcctgtcatatgcgtgattcccctgaatacccagtacaacctgaacctgacgaagaaaaaaaagcagatagcgttattttcaaacatatcaaggaggaagttgtatgtccgacaccgcagactccacgctga

SEQ ID NO: 97627 - DNA, 981 bp, Enterobacter aerogenes
atgagtaagtttggtgtgattgtgtacgaaggtggtgaatttgagaaagcaaatttattgaaccttggggattatgttcaaagtacagcagctaagcaatttcttccaaaagttgatgaatacattacacgagaaggaatgcatctgtacaacaaagatacagttaaaatgattatgaatgcctggtatatggcgaatccggataattttccgccatctacgcaaattgatccattatatgtatcgctgcatttaaattcatcgattgtcgataaaatatttagacctgaagtgattgagcattttaaagcccatcaacctattggctgtcgtgataatcatacccgtgatctattaagagcgaagggtatcgatgcttattattctggttgtatgacattaactctcggtgagacgtacaaacgtactactgttagtgatgaggttatctttgtcgatataatgcatgactcattaactatgaaaaagttgttaaaacaacctttacgactagggaaacgaattttaactggtcgtataaaggagctagtaatccgtagaaatatattgcaaaagtattttgatgatcaagttttggataatgcagtttatttcgatcaaatggttccttacatagatgctaatgaaggattcaaaatggccgatgagtatttaaaacgattgtcagcggcgcgttttgttgtaacatcaaggatacatacagcactaccgtgtctcgcaatgggaacaccagttatttttgttaatggtggttttaaaactgcagtggacaaatgccgtttcgatggtttgtttgacttttttaaccgcatagatatagataagaatggtgagtcctccgttaacttcgcatttgacggaagtaaaataggtatgaatactgtcttgcaaaataaagatctacatattcctttcgctaaaaacttaattgaaaagtgtcgtaactttacaggtaaatga

SEQ ID NO: 97628 - DNA, 954 bp, Enterobacter aerogenes
atgtttgaccactggagcgacgaggttaacctgaaaaaagcctacgtcggcgtcaccaacgtcctcgaatccaaccccaacgcctatatctgggccggccgcgacttccaccagcgcccgcaacaggggatcaacgactacttctggatgaaccacgacggccagggcgcgggggtgaagaacttcgatatcggcggcgtgcagttcgacgtggcgacggtgtcgcaggtgaaatcctgtagcccggaagtgatggccgatgagaccaacccgtcgcgcatcacctgtaccggcagctccgataccggcgataacggccactacgcgctgaccaccaaaacccacaacatcaaggccgggccgatcgacgtcgaggtgtacgccaactacggctttgactcaaaagcggtggacagcgacgcgcgcctcgatgcctggcagggcgggctggtgctgagccacaccaacgacagcggggtgaacaaggttatcctgcgctactccgacaactcggataacagcgtctacaacaaaaccgacgacctgaccacggtctacgccagcttcgagggcagccataagttcacccagcaggcgcagatcgagtatctgctggccttccacgactatgacaacggcaaggataataccgacaaccgtaaaaactacggcgcgatcgtccggccaatgtacttctggaacgacgtgcactcgacctggctggaagcgggctaccagcgcgttgactacgaccagggcggggataaccacggctggaagctgacgctgtcgcagaacatcgccatcggcatggggccggagttccgcccgatgctgcgcttctatgtgaccggcggccaggtggataacgaacacaccgcgaaagtagacggcaccagcgacgagcggctggattcgctgaacatcggcggcatgtttgaggcctggttctga

SEQ ID NO: 97629 - DNA, 363 bp, Enterobacter aerogenes
atggcatggcacagtgtgtcacaagcacaaaacatgacggggaaaagtcgcaggaccctttatcgtgatatggcgtctggccgcttgtcatggcgaactaatactagcggccatcgcgaacttgagacctcagaactgatccgtgtttatggcgagattaaaaacgatggcacagctgaacggcacaccgtgtcacagcctgatgtcacagtatccggtagtgacatcagggatgaattgcgtgccttacggcaggaagttgcagaccttaaatctatgcttttgaggctggaacataaacaggaagagccgcctgaaactgcggctccgtggtggcgtttctggcagaaaaaatctacttaa

SEQ ID NO: 97630 - DNA, 150 bp, Enterobacter aerogenes
atggaaccgggctgcccggccagcctgcatatcagtctgttcttcgacggtacctgctgtaataaagagggggctgatgaggtctacggttcgcgaaacccgccgctgactaatatcgcccgattttatcatttggaaaaccggtattaa

SEQ ID NO: 97631 - DNA, 246 bp, Enterobacter aerogenes
atgagacacgatcacgacatcatcaccagagaggaaatgatcgaactgacggggacaccgcttaaatcgcggcagtgtgaagcgctacgccgggccggagtctttttcatggaaagggcagacggccatcctaaaacgacgtggggccatttcctgaacccgataaaataccgcaaccagcaggaagagacggtgcgggaggaagaaccagacttcggagctatctttaatggccggaaagcgtaa

SEQ ID NO: 97632 - DNA, 186 bp, Enterobacter aerogenes
atgctgaaactcacactgaaacgaggcgacgcgcttcacgtcgtttttccggacggtactaacgggataatcgaagcctgcgcgcgttgcgaactggctatgcattttccgcgcagtgccaaaatcacccgcgaaaatggcgcgttccggaataaaccaaacctgattaagcctaatcagaaataa

SEQ ID NO: 97633 - DNA, 561 bp, Enterobacter aerogenes
atgacttccactacagctattgccatcgccgcgaactatcagaacctgctgcaactactggaaagctctgatgacctgactccggaaatgatcgccgatacccttgaaggcatggaaggagaactagccgataaactggattccatcatggttatcgcacgtaataacctcggcaatgccagcacctgcgatgatgaaataaaacgcctggccgaacgtaagaagtcctttgagaataaggataaggctctgcgtaagtatattctctcctgcctgatggcggccgggctggataagctgaaaactgcaaaaaacactttcactgctcgcaaaggtagcgtaagcgttgtgattgataataccgatcttcttcccgatgaactggtgactactcaggttgttatcgcgcccgataaaaaggccatcaaggaagcgattgaatcagcacaggcagcagcggcccagattaccgctgacggcggagagataccggaagaactgttaaacccagtgccgggcgctcaccttgagattggcgaacgttcgctgcaggtgcgctga

SEQ ID NO: 97634 - DNA, 2154 bp, Enterobacter aerogenes
atgaccatctacaacggctcatttgaaccaaagaaatcggcgattaaagactgcggcgccgtgcagctggcgatcgccatcgatgcgccaaacaaaaaagtggccgaaagcattatgaccggcaaactctgggaatcatacccggccaatggtgacaactatttcaaaccgaaactgtgggaacacgttgaaggccagccgctgccgaccgttggccagttcgatgagtcattcgcccagcagcatacttttgacggtgaaaaatgggtttctactgcgcaggatagcgcttccggaagtggtgcaggtttacctgccgacgatgaagtgatcgacctgatgaccgtttcccctgatgaacgctttgctgccgtcctgctttttagtaccgcggcgattgatggccatctttattctcaggttgtggattatctggataatctgaaaaaccacgatggggaatttgaagaggaagatcgcttcaactttaacgtgctgtgcgccctgcaaaataatttcccggtgcaaagcatgcatgtggaaggtctgaataaccttgttcagggtattttctcccactttgaaaaccagacgccgggcaaagcggctatctctcagttcgttaaacgctggcttgagaatccgggcaagcgcgacgaactggcccccggcgtatataaaaataccgctctcagcaccagcaccgatgataaaacacccgtggtaatttctaagcgcgggtataaacacacttatgcaacgctggatcaggagatcgctaccgcccttctcccgctggcgcctgatgcgccggtactatccggaaaccttctggacgctaagaagatgatttccgatgaccgggaagattttaaacgctggtcagcatcgctgcacaccacgccgcagatactcaaatacgaccgcgccagcatcttcggcgtggtacagaacgtaccggcgaaagatacctaccatttccctgacagcctgcgccgccacatcgattcatggctggaggccaacggccgctttgaagaaaccgattcaggatccgtaaaacaaccagaggcaacgcaaaatacagcctcaaacgtgggcgaaaaagcggaagtgccgcagccggttgtaactgatactcaggccaatcaggcgcgtgagacgctcaacgatatgggctatggcgtatatgcatctggtgaggatgcagaacaggaagagaaactgagtgaaaaagtaaaaactctcgttcaggacgttgatcagcttgttgaacgaattaaccgagaagagaacctgccgaaggcctccgaagtcgtccagagcattaacgaaatgcaggcaaccgaacgggacaacctcgaattgtggaaaagtgtattcaagacagatgagcgctttactacggccttctcagtaaacggtggcggtacatccattaatggcacctacatgaccatgatggccacccgagagtttgggcccaaaggtcagggctggggcgttgatattctggaagaacgttttgatacaggcgcaccaattacccgcactatcaagggtgctgatggcaataatacgtgggaactgatccctgatggtatgggtggcatcctcatggagaagcaccacgttatcaaaatcagactttggtatctgaagaacgatgtacgcggcgaagaatttgcattcggctgcacaccatacatttacggcagtaaatacggcccgatttgtgatggtgaggcgacaaaaaaatcactcactgatgcaactaaaaaagcactatccggcctcggctttagcggcgatatctttatgggcctctatgacaatccagaatatcgccagaaaaacaaagcagagtttgacctcaagaatgccagcgaaaccgccgaagatgcagcgcggttgcgtcaggagttcgacgacaaactaacccgcaacgccaataccctcgcaaacgctgtatcggtgaacgaaattaacaaggtgtttgcccctatcgcccgtgaactcgaagttcaccgcaaggatgcagaatcaaaaggagacacacagcgctcccgccacctcagtagcaggttgcgccgtctcactgatatcaaaaatggacgtatcgccgaacttaataaatctgaggagaaagcataa

SEQ ID NO: 97635 - DNA, 285 bp, Enterobacter aerogenes
atggatattagaaaattgctggaaagaattcacgaagttaaagaccgattagagcgagcaaacagaattatcaaaatttgtggtaacgaatgtcattcctccgggatttttgcggatggaagaaacggcgagtgctatctaaaggtcgattcatcagaaattaaagaactggcagaaagccaaaaggttcatctcgaaagcgaactagagcagttggaagaagcaaaaaaaacggcagaacgcgtgatcgccgggctgctcccagaaactaaacaaaacgcctaa

SEQ ID NO: 97636 - DNA, 246 bp, Enterobacter aerogenes
atgaagaaaaatccagttatcgaaaaagttatggcttccggcctgtctgtattcgagcatgaaaataatagcgactttggttcaggaactatgcatatcactattatcggtggtgtccggcgagtcgagttctatccaacgacaggcacagtctatgccaacgctgagaagggaaagtttcctgcattccgacagaaaaaagccggtattgaagttgcaatccgtctcgctaaatccggcgcctga

SEQ ID NO: 97637 - DNA, 324 bp, Enterobacter aerogenes
atggaagcgcttaccatccccgtgaagctgtacattcactacatcactaacactttctcatccgataaatatcacgtatcaatctgtgacatgtcacggaaccacccggacatttatgtgctgctggaaacgcgtgatatcgccatcgatataaaccagccggaacccttcgaccttatagccctgcaggttgaccagctgcgcagccagaaagaaaaccttgctgccgatgcccaacgtcagatcgcagcggtcgatgacaaaattcagcaactgctttgcatcgatcattctcagattgaagaaagtgatatccccttctga

SEQ ID NO: 97638 - DNA, 465 bp, Enterobacter aerogenes
atgggcaccatgagaaagaaaacgcttgatgcagctgaagctgatgcagcccaaaggctgcgtgacatatggaacgagaaaaaagtaactttacgtctcactcaggaaaaggcggcagacgctctcggctttagcacgcaggctactgttagtcagtatttaaatggcagcattccactaaacacagatgcgacattaaaattttcagctcttctgggcgtaaaacctgaggacattaggccagacctcgctgaactaatgaattatgtcaggaaatcaggatcccacgttcaagattattcagctgctggctggcgacttctgaaaccagaagaggcacaattagtagaactgtacgaaagacttcctctgagcgaaaaagaaaggcatctatctgaattaaaagataaagtcagtggattcgaccgcctttttgaagaacttctagccacaagaaaacaataa

SEQ ID NO: 97639 - DNA, 234 bp, Enterobacter aerogenes
atggatcttaaaacctatctaaagacctctggcgttcgccagcaggatttcgctcaagtggttggcgagacgcagggctatgtcagtcgcgttgcatcaggaaaatgcctacttggtgctgcaactgcattgaaatgggccgctgcaactggctatcaagtaacaccgcatgatctactccccaatatttaccgaaaaccaactgacggacttccggaacagaatgcagcttaa

SEQ ID NO: 97640 - DNA, 447 bp, Enterobacter aerogenes
gtggaatacctcgaagaacttaaacgagagatctttaactgggcagcggaaagcgggcaggagctggttgctatcgagataagccgcatgtggtttcgtcttggtggtaataccggttcgctgaagctgcaccagatcgaagatgcagatggaaacgccgactggcgggcaatcaacaacaaccgccaacaaatttttcgttggttgcgaggcgagaccaaagccgcgagagccaaaactatggcgctggtcaaagcgatggaagcggcgctgccggcagaacgttacgcgcgcttgggtatgtccacccagtatttaatttgtgtggccattcgtgagtttgccgcagcgattattgcgttgttactcgacgccagagacgggccgcagcaagtcgcaagagctttgcaagctatgcgagaaacacagcgcctgaccagcgtttaa

SEQ ID NO: 97641 - DNA, 222 bp, Enterobacter aerogenes
atgagaacacaagaccgcatcacctggcggaatgggtttcgccggaacggggtacaagtcccgatggaagatatcgaatcgattttcgaagagcgtcgcgctactgcgctgacaatctgggaacgctatgaactgcgcaaggcagatctgcaggaagcgggactcacccagaaagaatacgaaatcgcctgccgtcagctggctgactcgctggggatctga

SEQ ID NO: 97642 - DNA, 1407 bp, Enterobacter aerogenes
atgatgcagatgatgtattccactcaggaactggaatgtctagttcttggctgcctgatgaacggcggcgccacgccggacgcctttgatgtgattgccagcacgccgagcgaggctttcagcgtcgcatactacaggcagatctacggtgtgatcaaagcgcaggcattgagcggcggcttaattgacatgatgtacattagcgaagccattggcggacaggggacgctggccaatctcgccgacatttgcaaatttccgacatcgatcgtcaatctcaaaggctacgccaaaaaaatggttaaggcctggcgaagcagaaccatcgcgcaattactgcaggatggtgcggatggtattcgtgatgcaataaaccaggagcagcgcgatcaggttgtcgaaactgccgtggcgcagctgctggatatgacaggcgacactggcgacgttcagccggtacatatcagcgatttgttaccgccttacatggaaaccatgcagaagcgcatggacggcgaagagggcacccgcaaccttaaaaccgggatcgaggaactggacgatgcgaccggcggaatcaacctgcaggatttaattgtcgtcgccgggcgcccgggcatgggaaaaacagaatttgcgctgaagattgtcgatggtgttaccgcttccggcggtggtgcgctgatattcagcatggaaatggccgctgcgcaaatcgtagaacgctctctggcgggttctggcaacatgtcagtgtcacgcctgcgtaatcccctcgatatgcaggacgaggactgggcgcgctttaccgcggccatggagaccatgaacgggcgcgatatctggatcgttgacgctaccgatctgacgattgagcaaatccgcgccgttgccgaaacgcataagcgccggtatccgcatctggcaatgatcgttgtcgattaccttggcctgattaaaaaaccgaaggcagagcgtaacgacctcgcgatcgcccacatatcccgaaacctaaaaactatggctatgcgtctgcatacgccgacgttcgcgctaagccagctttcccgcgccgtggattcccgcccggctacccagcgccgcccggtcatgtcagatctgcgcgattccggttctattgagcaggacgccgacagcatcatgtttctgtatcgcgatgaggtttacaacccggaaagcccggcggctggcgtcgctgaaattatcctgggcaaaagccgcttcagcgccgcaggcgcaattatttatcaggaatttaaaaacggacactttctgtcaatggatcagcatgttggcaaagagaaaacacgtatccaactggaggccgcgaaaccccggaaacaaccccgtaaatactctgagaaattcaataccgatgcattttaa

SEQ ID NO: 97643 - DNA, 669 bp, Enterobacter aerogenes
atgaccacgaatttaaattacccaaaaccagtaaaaccggatgatggctgcaactggctccccgttattctctggcgcatgaacgccggcgcgcgcgcccgtagccgttccgtgttcgttgcggcgccacgtccggcacctgtacccggcatcaccccgcaaaaaccgattaaacgtgaaattatcgcccctacggtttccggccgcaggcgtaaaacccacatcggcaccgtgatttattccagaggtgaaaaaaacgttcgcctgagtgaaggcgctaccgtctggtctgctggctctaatgagcatttcgataaaaaaacgggccagcgagtcggcagtattggccgtcaccgtctggtgctggagagtatccgcccattgcaggccagcgacgaacagcaggacgccgggagcgtcaccgcgcagcagctggtagccgtgatgaaaggcaaaacgctttcttaccagggcatcctggcattaatccagaagcactatccagattgtcaggtgacgattaaagaacttcacgatcgcgtgttcggcatgttcatgtcgaattacgtgggtatcacccgtcacgacgatatgccggtggttcacttcacgcttaacagcgtcgatccccgttattacatcgagtcagcgaagaacaagagggcataa

SEQ ID NO: 97644 - DNA, 171 bp, Enterobacter aerogenes
atgaaattttcaacacctgattttatgcattgcagccgcaggacgctggtgctgttcgtactcagtgcaaacgttgttggctggatagtcattatcgctcttatttgggctggatgtgaggtagctcagtgggcgctggaatatctccgcagtagtggggtgctggcgtga

SEQ ID NO: 97645 - DNA, 591 bp, Enterobacter aerogenes
gtgaataacaaatacaccctgatttatgcagatccgccctggacgtaccgcgataaagccaaagatggcgagcgtggcgccgggcataaataccagaccatgactgtgctcgatatctgccgtctcccggtctgggaactggccgctgaaaactgcctgctggctatgtggtgggtaccgactcagccgctggaggcgttgcgagtagtcgaggcgtggggcttccgcctgatgaccatgaaaggctttacatggaacaaatgctacagccggcagaccgacaaactggcccttggaatgggccatatgaccagggcgaacagtgaggattgccttttcgctgtgcaggggaaattacccgcccggctggatgccgggatcgttcagtcattcacggccccgcgtctggagcattcgcgcaaaccggatatcgtgcgcgaaaagctggtgcagctgctgggcgatgtaccgcgtattgagttattcgcccgccagtcttcgcatggtttcgacgtatggggcaatcagtgtgaatcgccagcggtggcgctgctgccgggcattgcagaatatatcggtgaggttgcttaa

SEQ ID NO: 97646 - DNA, 231 bp, Enterobacter aerogenes
atgaaaaatactattcaggatttaatgaatcaccagttcgccatgctggaaaccgtcactgatcccaatatcaaaggcgacctgcttcaggaagagttatcgagggcaaaggcggtagttgagatcgtcggggtaatggtcggtacttatcgcgtcgccctcgacgctcagaaggctatttatgacggtaccgcaggcaatgtgcctaagattatggggatcgaaaaatga

SEQ ID NO: 97647 - DNA, 618 bp, Enterobacter aerogenes
atgatagagaaatacactctagcccaggagttgtttatcaagcagcatattaaaagctccactgcgcgggaattaactgaaatttttaacgctcaatttggtacaaataagagcgtgggcgctatccgtatctggtgcaaatctcatgggttaggaaagcagtttttaattgagcctcgctataccgatgagcagctgacgttcatttatgctaataagaatctaacgaatgcagaacttacagaaaggttcaacaagcgattcggtaccgataaaaaacctgacaatatcaaggatgtaaagatagctcgcggatggactcgcgaacctaaaggccggaaacgcattcttccccagtacatcactgttaataaagagaaaatcagactcgatgtatacgtatatgaatgcgtacatggaaaattaccgaccggttattcggttatacatctggataatgatcttaataataacaatatcgataatctgcgcgctgcccctaaagaaattcgccgcctgttttctggcgcgggttactctaaaatgccgcaggtgcttgctccggcgctgtatgcacaagttatgctccgccatgcaatcaaacgattatccagctaa

SEQ ID NO: 97648 - DNA, 339 bp, Enterobacter aerogenes
atggctaaatcatccgcagaacgtaaagcctcgcagagggcgcggcaatctgccgccggcaaccgcaaaattgagctggttctcgatgcgcaggaactggacatgctggcgcgtaactgcgccgcccggcgtccggggcgcgaaccgtacgaactggccgagtacatcgctatgctgatccgacaggatgatgcacggcttagtggccacatcaaatcgatcagcaaacgcctgtgtggaaaatgcggtgagtcgctgccgataacctcctgcccgtgtgctggtgattcgcaatgctgggtaacgcgagggtggcacgaaactaaactgtcagcatag

SEQ ID NO: 97649 - DNA, 192 bp, Enterobacter aerogenes
gtggttgataagaaagacgcaggagaccttctccccgacgatggtgatgtactgattacgtgtgaaaatgggaagattaagaagaccagaattgtccatcccgacgagcacgtagcgacacttaacgcgttgtttgaattagctaaattgactggttataccattatcaaaccagacggcaatatgctataa

SEQ ID NO: 97650 - DNA, 165 bp, Enterobacter aerogenes
atgcagaatttaattccgtctctaagagcagcagataacgctaaaaaatgcggttggccaacgcgtccggaaagcattaaattctgttcaggctccttttccattctggcgggcggtgattttgcccttctctatgctcgcgcacgcgcgcgtttagggggctga

SEQ ID NO: 97651 - DNA, 441 bp, Enterobacter aerogenes
atggctcgaccgaaaaaaatcgttgagacgccggggcaggaaaaatctgcgccggaagaaaaaacgctcgttactgaggggcagttaattactgctgaacagaacggcgcgcagcaccagggaaacggcagcggcgaagagaccgtgcagaaaaaggtttcaacactgcttgatggtactcagttggcagaacgtaacgccattctcgccacgctgaacgcgcagggtgctgccatcgttgcccgcttcgaagagtacgccttcaccgacattgtcggccacccgctgaccaactgcctcgatttcctcgatctggtacgcaaagccactgatttaagcactggcggcacagcggagcaggtgacaaacgaggaaggcaaaaagcaacccgtacgcagcgcgccggtattaaccgaacacggctggcacgttccgggctaa

SEQ ID NO: 97652 - DNA, 222 bp, Enterobacter aerogenes
atgtgtggtagcgcacccaaagttgttcagtcagacccgcaggccgaagccgatgcagcagctgacgcagcggccaaagctgcgaacgctgacgcagcagcgcgcaaaaagcgcaaacagggatcatccctgctggccagtggcgcagaaggcgcgacggatacaggttcttccctgctgtccactggcgcacaggccgcaaaaaatacgttaggggcttaa

SEQ ID NO: 97653 - DNA, 234 bp, Enterobacter aerogenes
atgatcaaaaaagacgtaacccctgaagactaccggcgcattttcgaggaaatgccaggcgggccgcaggtgatggaagaactaacgcgccgcttcgggcgtgaggcgtatgtcaaaggtggtaccgaaggcgaccgcgaaacctgttaccgggccggacagcgttccgtgctcgatttcattctgatgcaaatcaacaaagcagacggagtaaacgacgatgtggaagtttaa

SEQ ID NO: 97654 - DNA, 849 bp, Enterobacter aerogenes
atgtggaagtttaaacatttattcatgaacaccgaaacaggcgcagaagcgccagcaggtaacgcaggaggggatgatgctggtaatggcgatggtactcaaaatccgggcggcggtactcctgctggtacttcgctcctcagtaccggcgcgggtgaacaaggcgcggatgactggctacctgaaaaataccgcgttatgggcgatgacggaaaactcaacgttgaaggctcagcccgcaaactggcggatgcttactcgcaccttgaaaagcgcatgggcagcggggacacgccgccgaaaactgttgatgagtatgcgccaaaggtagaggtcgagggttttaagtgggacgaattcaaagccgacccgcgcatgcaatccttcatgaaatcggcgcatgccaaaggcatcaccaacgatcagatgggtttcatcctggaagaatatgcacagctggcccccgaactggttaacggtgctgcgacgctggattcggaagccgccgccacgcagctgcgcgagacgtggaaaactgacgccgagtttaataaaaacatcggtctggctttccgggcgtttaactctctggcggatgacagcgacaaagggcgcatggatgaaatcggcaataacccgctggtgatccgcatgctggcgaaaatcggcgctgaaatgcaggaagatgcaccggcgggcggtgatgtgaatctcgaagagcagcaatcaatccgcgacctgatgaaatccccggcgtatatggatcctaaacacgctgaccatgagaacgtttccgcccgggttcgcgcctattaccagaagcgttacggcgatcaaactgtagcgtga

SEQ ID NO: 97655 - DNA, 357 bp, Enterobacter aerogenes
atgagcgacaaagatatcgaacagcaaattcaggctaaaggcttaaccgcgccgcgcgtcactccacagcacattgatagcgttattgctgaatgtcattactttacggctggcgaggctgcgcgcgctgggtggcctgaccctaatgccgccgatccgattcacccaaatctagacctacttactatctgcgttctggtgctacgtaacggcttcaccgtcaccggcgaaagcgcctgcgccagcccggaaaacttcgaccctgaaatcgggcgcaagattgcacgcgataacgcggtaaataaaatctggatgctggaggggtatttgctcaaacagaaattaagcgaacagtaa

SEQ ID NO: 97656 - DNA, 564 bp, Enterobacter aerogenes
atggcttccagtatctctatttgttctaacgcactgctggcgctcggcgcccatcccattaacagcttcgacgaagcgaccgaacacgcccgcctgtgctccaatatttaccctaccgtacgcaatgacctgctgcgaaaacatccgtggaactgcgcggtaaaacgcgttgtgctctcaccgaccagcaccgcgcccgcatttggtttcggctaccagtttccgctaccgggcgatttaatccggatcctgtccgttggccgtgagtatgaggatatcgggtaccgcgtcgaaggaaaccgcctgctggctaatcagaacgtaatttatctgcgctacctgttccgcaacgaggatgaatcgacgtgggattcgtcgctggtcaatctggccgaagcgttcatggccgcaaagctggcgtacgccgtcaccggctccgcgagtctgcgcgacagtctgacgcaggaagctgcataccttcttcgccaggctaaatctattgacgggcaggaagaaccgccggaaacgttagacggctatcccacttatgaatcgaggttctaa

SEQ ID NO: 97657 - DNA, 1992 bp, Enterobacter aerogenes
atgcgcgcgaacctgataaaaaccaattttacagccggggaaatttccccgcgactgatgggccgtgttgatatcgcccgctatgccaacggtgcaaaaattatcgaaaacgcggtgtgcgtggtgcagggcggtgtcgttcgccgaccgggtacgcgctttgccgctgctgctaaatatggtgaccggacagcacgactgatcccctacgtatttaaccgctcgcaggcgtatatgctcgaattcggcgacggatacctgcgcatttaccagaacggccggcagctggtaaacgaagacaataccccgtatgaaatcgccagcccgtacaccgtcgatatgttgtctgaggtgaattacgtgcagggcgctgacacgatgtttttagtgcaccagagcgtcccgccgcaccgcttacagcgtaaggggcaaactgattgggtattggaagccgcgccgtttatcgtagagccattcgacgaaatccgcgatacgccggagaaatggtgtaagccatcggttaaagaattcgttggctcagaaatcacgctgacgctcagtgatgccgaacccgcagatgatgacgattcccccgcgtttactggcaccggctgggtagcggaggacgttggttcgtacgttcgcattaacagcggtctggtgctgattaagagcatcaccagcgcgcaggtcgcagtcggtaccatccgcaccgatttaagcgcaacgcaggcggcatcccccggagcctggacacgtgaagatactgtctggacggaggaatttggctaccccggcgcggtgacgctgtaccagcagcggctggttctggctggttccccacagtacccgcaaacaatctggtggagcgaaaccggcgtttacctgtcgtttgagctgggaacggacgacgacgacgcgatcagctttacgctgtcttctgaccagttaaacccgattgtgcatctggcgcagatgaatacgcttatcgcgctgacgtacggcggcgagtttacaatcactgccggcagcgacgcggcgatcaccccgaccaatatttcggtaaaaaatcccagcccgtacggttgcaacagcattcggccggttcgcgtcggtaccgaaattatgtttatccagcgcgccgggaaaaaactgtatgccgtggcgtatgaccccgatagctacgtttcgtattccgccaatgatttaacggtgctggccgaacacatcacgtccggcggcgtcctcgatatggcgtatcaacaacagcctgatgcgttcgtgtggctgatccgcgccgatggcgtactggtcacaatggggatcgaccgggcgcaggatgtagtcgcatggtcacgccagatcaccgatggcgtttttgaatcggtggcgagtattccctccgaaagcgacgacgtgatttatgtgctggtgcgccgggaagttaacggccagaccgttcgttatgttgaagtgttcgacagcaccctgaataccgattccgcagtaactggctccagttccgaaggtgccaccacgtggacaggtctttctcatctcaatggaaaaacggttgatgtagtggccgatggttccgtgatgccacaggcaacggtaacagacgggaaaatcactctcagccgcaaagcgaaaaaaatcgaagtcggcctgcattatgaaaccaccatacagacactgacgccggaaatctcaacgaccgaaggcaccacgcagaacgcccgcaagcgtaccagcgaagttacgctgcgcttcatggaaaccaccggcgcggagtgcaacggtcaagtgatcccgttccgtaccttcggcccgaaaatccttaaccagcccgcaccgcttttcaccggtgatcattatttcgggaaacttggctgggagcgcggggaagacactttgattattcagcaacgccagccgctgccgtttcacttgctggcgattattttcacgttctccagcaacgggggctaa

SEQ ID NO: 97658 - DNA, 537 bp, Enterobacter aerogenes
atgagcaacaaagttaagttcagcgccgcgatgctggcactgctggccgccggtgcatctgcgccggtgctgttcgatcagtttatcagcgaaaaagaaggtaacgcgctggtggccgttgttgacccgggcggtgtgtggtcgttgtgccacggagtaaccgttatagatggcaggcgcgttatcaaggggcaaagagcaaccgaagcacagtgcaagaaagttaacgctatcgagcgcgataaagcgttggcgtgggttgaaaagaatgtgcacgttccgctgacgccaccgcagaaggtcggcatagcctcattctgcccatacaacatcgggccgggtaagtgcttcccctcgacgttctaccgcaagctgaatgccggagaccgcaaaggggcatgcgcggagatccgccgttgggtattcgacggcggccgggattgccgactgaccaaaggccaaaagaatggctgttacgggcaggttgaccgccgggagcaggaaagtgctttgacgtgctgggggctgtacgaatga

SEQ ID NO: 97659 - DNA, 360 bp, Enterobacter aerogenes
atgaacggaaaaaccaaactggtaattgttggtggcgtgctggcggtatgcgccggcattttctgggctggttatctgaaggggtggtacgcgcattccgagcacgtaaacagccaggctaaagccagactgccaaaacaggaaaaagcggtagcagctggtgagcagaaggcggcgacggcgaacgccgaagccaaagttatttaccgtaccgtttatcgtgatgtggtgaaatatgtcaatgactcgaatcgtactgtgtgcaagtttgatagtgacgctgtgcagctgcgccaacgagcaatcgatgcggccaactccatccccggatttgatgaaccggccgtgcaatctaagtaa

SEQ ID NO: 97660 - DNA, 303 bp, Enterobacter aerogenes
atgtcatctgtaactacgccgagcgctgcacgatcctccttcagcttcggtcgaatctgggatcagtttggtatgctggtggtcttcgcagtgttgtacatcggctgtgtgatctttgttcccaactttgcctctttcgtcaatatgaaagggctggggctggcgatttccatgtcgggaatggtggcctgcggcatgttgttctgcctggcctccggggattttgatttgtcagtcgcttcggtcattgcctgcgctggtgtgacgacggcggtagtgattaaccttaccgaaagcttatga

SEQ ID NO: 97661 - DNA, 261 bp, Enterobacter aerogenes
atgtcactaataaaaaccacctcatttaaggggttgacggtcatcaatgcaatttacactgttgagcagatcaccatacaaggcggtcagttagatttttttgtctctatgaaggcgaccaaaacatctatgcctattgatggtgagacgcatggatgtgcctataactcaagtggagcaacacctgaggagcaggcatatgcgtacttaaaaaccctcccgttttatgcagatgctaaggatgatggggtcactgagtaa

SEQ ID NO: 97662 - DNA, 2094 bp, Enterobacter aerogenes
atggccacgacacctacacaacttcctgtaccgagtgagactccgcgcgatctgaaatttaacgccggtaaaattgatgagtttgtgacgggggagctgcattattacaccgatagattcgggaaaaagcacattacaatggctggaatgcatgctgagtttgatgctcagctcgccagtcaggaagcgcgcttcgatgctttcattgagcgatctggctaccaggtcatcggtgattatgccgatggtccactgactatcaccgagtacaatcaacttattcgctatggtaacgaactgtggaaacttacggccgctactgatttaccatacaccactgcgggtactactgatgaaacatggaatgcgactgactctttgcatttcgtttctgtcggggatgccgctcttcgccaaaacctgggttcaagcgaatcgggttttggtgcctcgctggtaaacaccgaaaacggtctcagtgttcaggaaatgctatcactcgggcgagttgtttatcccgagatgtttggcgttgggttatctgagccgtcagacgatgagttgtgggcggcgatgttttcttatcttgagagcttggaagacacagctaaatcaactgatttgccgtacttaatcgatatgcgcggcaaggaatatactattattaaaacccatcaggttgatacaaatctcggtgtaattaatggcttcattcattttaatggtggtcgttttattttcggcgattacacaacccccgctgccggcggaaaaacaagacgatatcttatcgattttcgctgggattatatcggtgacagttattttccgtatgcacttgttgaaattgtccgcgcttacaacacccacataaaaaaaccaacgtgctgggctggggacagtgaggaactggagaccagtggagtttttgcgggtaaacctaaacgggcccgccatgcactttggcttggatcacgacgggcctggggatgttctatcaccggtggggatatttacgggggagaaattccactaagggtaggttataccaatgaccatacaggagtgtttattggagcgggtcttacaattcaccacggttggtcgggtaatttacttgggtgtaactttgctggcgccacagtcttagggtgcaacattgaacactcagaaaatggggcatgggacatcgcattaacctcagggacaaacggtgtttcaaatgctatccgcagcgtgcttattgctggtgtatatgcttataacgttggtaatggtacagagggaaataattacgcacccgcatcaattctcgtaggatatgacgttccggggaccgagggatttgatgtcgcagggcaactgataaccagcgatgcgcaagcacgtaacgttacagtaatgaattgcgatttagcctcatctaaacaactccgtgctgtcaaaatgcgggggctttcaggcctaaagtgtattaataactcctatagcataaaatctggcgaagcatttggcttcacttttgaagggactgctgctcgttcaggatgtgttgataaccgcaatcagtctaccggtgcacatgacgaagttgagtacaaatcaacaaataaaccgcaagtaggcgcgatgagcgggatgttttccccccagttaaaaggtacggttacccaaggggttatggtctactcaacccgtggaggagattactgcattgataatggaatgtgcaaactatcattgtggttaaccattggtacgattacaacgcagcctgaaggtgatctttatatcaccctaccagttgctattgctcttgggcggcgttctggttgtggtgttagtcatcaggctttgtcaggtaatgtatctgtcaatatatccggaacagtggacgggagtgacgcatctacagtctctgggacggcatcaataccaaactcatacctaccagttgaagcatcgattattaatggaacaacattatctttaaagctcggtggtgctccgatgcaaggttcggtagtccgtgaaaccacagcatttgagctatctattgattatccggtaagcggaccaacttttacaggttaa

SEQ ID NO: 97663 - DNA, 450 bp, Enterobacter aerogenes
atgagaaagattatggtttgtttcatcgcctcatttctattattgggctgtgggcagccgactgatgaaaaagtcattgccgatgtgaaagaaaaggttgtgaagaaactaagtagttcttatggcaagtgtgatagctataaatttttaagcgattccactgtccctgagtttaaaaatgcctatctccttcactgtgataactttcttaacccaaatgatttattgttctcagatgttaaggtgtataaccatggggaattcactgtagtttgtggtgtagtttcaggaaggactgacttaagcaggcagggaatgaggtttgttgagttctgggatagaaatgatagtgccgagatgcaatctaaatatagcggaagaagaataaacgatatacttggttcacctgttaaaacgtatagagattattatcaaaaattctgcaagtaa

SEQ ID NO: 97664 - DNA, 1350 bp, Enterobacter aerogenes
atgactgacaaattaactctcgccgtcaaccatgcgttgaacgatgcgcggatggcgcgcgcacgtatgggaatgctggcgccaacgatggggctcgataacaaacgtagctcggcgtggtgtgaatacggatttcctgaacaggtaacctacgaaaacctttatgccctgtatcggcgtggtggtattgctcatggtgccgttgagaagttagtgggcaagtgctggcagactaacccggaactcattgagggtgacgacgccgacaagagcaaggacgaaaccccttgggagaagagcgccaaaaaggttttcactaaacgactctggcgcgcttttgcggaagcagaccgccgacgtttggtcggtcgctatgctggaatcctgcttcacatcaacgattccagaaaatgggatcagccggttgttcgcgggaagtcactcaaaaaggtaacgatcgcatgggccggttcgttaactgtcagtcagtgggtcactgacgagaattcggcagactacggtcagccaaagcagtggaaatacgttgagagcctgccaaatggcgggacaaatcagcgctttgtacatcccgatcgcgtcttcatccttggtgactactctaacgatgctattggctttcttgagccaccttataacgcctttgtcagtctggagaaagtggagggcggttctggtgagtcgttcctgaaaaacgccgctcgccagcagaacatcaacttcgataaagagattaattttagcgagttggcctcgatgtatggcgttacggttgacgagcttcaggagcgatataacgatgccgccagagaactaaaccgaggtaatgacactctgctcattacgcaaggcgccagcgtcacttcgctagtttcaccggtatcagacccatcgccaacttatgacgtaaacctgcaaaccgctgccgccggggtggatatccctacgcgtatcttagtgggtaatcagcaggctgagcgttccagtactgaagatcagaagtatatgaatgctcgatgtcagtcacggcgcggagacttgtcattcgaaattgaagacttcagtgacaagttaatcgacctgaagattattgatgcagtcagcgagaagaccgttatctgggatgaccttaacgagcagactggaactgagaagctcgccaacgctaagaccatggctgagattaaccagacgttccagggaagcggagagaatcctgccttcagccgcgaagaaatacgcactgcagcaggttatgaaaacgttgatgaatttccattaggagaagaggatggcaacgaagaagacgaagccaccgattctaccgcgtaa

SEQ ID NO: 97665 - DNA, 480 bp, Enterobacter aerogenes
atggctgcactaaaacctgaagtgaaagccgccatcgttcaaatgcttgcgtgctatgacagcctgtcaattgttgtcgaggctatccaaaaagattacggaataaaggtcacccctcagcaagttgaatcgcatgatccaacgaaggtaagcggcaaggggctggcaaaaaagtgggttgacctcttcaacgccacccgcgaacgattccagaatgaaatctctgacatcccaatcgcaaacaaggcgtaccgccttcgagttctcgaccgcatggccacgcgcgccgagggaatgaaaaacctcgcgctcaccgctgagatcatcgagcaggccgccaaggagtgcggggatgcttataccaacaaacataagtttgaacattccggccctaatggtggcgctatccagacgatcaccatgagcaaagaggaatacaaatccgcacggcaggagatgatggaggatgacgactgctga

SEQ ID NO: 97666 - DNA, 345 bp, Enterobacter aerogenes
atgactgatatcacccgacttttagccagtctcaagcgccgatcagcccacgcaaaagagtttggggatagcattacgtttgtaaagctgaaagacatcgacgcgctggtagaggcgctggagaaggcgcagcagcgcatcggcgaattcgagcgcgaagaggaatcttttcgcccggtcggcgtaatgagtgagaaagcgtattaccgcctggaaaacagagaatcacgctttattgcactctggccacgccccgagatctatttaccgcgcaagcgaccggaagatggcgtcattgtttatgcccgaaccgtggccccctcaatcaacaagagggagggatga

SEQ ID NO: 97667 - DNA, 348 bp, Enterobacter aerogenes
atgagcaagtatcgcaaaggcgcagtgtacctccgcaagatgaagtccagcgacaaatctaacgattttcgtaccagcatgcgcatggcgctattcagtgacaaaaaagtctggaagcgccccgaagaaattaagccagttgttcttgttcagcacggtgtgaagcgtgttgtaggcgtgttcatgaatatggatgacgccaccgtatgccttatcagtggagcatttgaaaagcgggcgcgtaattcacggcacaatccgcgccggggaatgcgttacaccaaaggcgatctgaaaaaggcttttcgtaaatgggcattcaagcacaaacaggagcgtgcagcatga

SEQ ID NO: 97668 - DNA, 606 bp, Enterobacter aerogenes
atgaataacgaaattcaacagattgcacagcagaacgatatgaatatcgagtttgttcactggttcttcaacgaaaagaaagcagcttgcggtgagcaatggtttctggcgttaggtgctatgtgggaaggctggaaagcgcgtgaaggagaagcgaccgcactggcgctgacccttgagaagagtcgtgaagcatcgggctgcccggctggcgtagacctgcaggactgggtgaagcagctggcggcggagaatgtggggctgaagaatgtatttatccagaaggaaatcccatccgaagcagtcgatgcattcatggaaaccgcagtaatggatcatgactggaatgaaacctccgagtggtcatgggttgaaaacgaaacagaggttatccacgccgttctggacgcacttaagccagaaaccaccgccaccgatcgcatcgtagccgggattaaggctgataccgcaaatcagatgtgcgttgcctttgttaaacacaaggaacttgctggcctgtctgatgatgatgtggtgacagttcgtgaagctacagatgcagtactgcattgcgctgaggtgattagcgagggggccgacaaatga

SEQ ID NO: 97669 - DNA, 612 bp, Enterobacter aerogenes
atgactgacatcgccacattcactaatgagcaattaatcgccgtgtgccgtgctgacgtggcggaaatgtcgaaatttttaaaagagggtgaattcagcaatccgtcccgcgcggccctgtatttgcgtattactgaaatcgcattggcagcgctagtgggggagttctcttttgatcgcaatcagattcgccgagaacacgctgaatggtcacaaaccaccttcggtaatgttggtccggttggcccactaaaacacctcagcatagaagcgctcgaagcagccgctgaacctaacgactacagcgaatgggctgatatgcagttcctgctatgggacgcccagcgccgggccggtatcactgacgagcagattacccaagcaatgattgaaaagctggcggtgaataaagcgcgccagtggccagcgccaaaggacggggaacctcggatgcatgttcgaagcgaagaggaatcactctacgccaggcgccgccgtaatcgtgaatctaatgcgcgcgctcgcgaacgtgaaacacctacacaacgcaaaatcagactggcgaaaaacagagcgagaatggctcttcgtcgcaagggaggtgccaaatga

SEQ ID NO: 97670 - DNA, 633 bp, Enterobacter aerogenes
atgcgcgatgattatccgcagcgtctggccgccgctcaggccgcggcgccggggtttgtcgatagctggaaacgggcgcccgtcagccttgagatctgcggctatatgagcgaatggcagagcgtacagcactacacgcgtgaagaggtgcaggccaccttcgactgggcgctacagcaacacgccagcagcctgaatctgaaatctcgcccgattccgccggaataccgcgatattgtcgataaagccttactgcgaatcggctaccgtttccgggtcaataagctcgccttcgagaccccggttaaggctggtaagccgttagcggtcagtgttacctggcgtaatgatggcgtcgccccagcctatctgttctacccggtacaatggcgcgtggtcaacgccgccggcgccacggttacccaggtaaaaacccaggatgacgtgcgccgctggctgccgggggatatgcaaagcactgtcactctgacgctacccgcctcgctgcccgccggcgattacgcgctgcagaccgccatcaccgatgcccagggtaagccgcggcttctgctggccaaccagggtaaaaccgccgacggctggtatcaactgaccaccttttccattaagtaa

SEQ ID NO: 97671 - DNA, 489 bp, Enterobacter aerogenes
atggatcaggaaatcgcttctctgaagctgaatattaatcagctggcgggcatcaccaatgtccaccgccagacggtggccgccaggctgaaaaatgtcgaaccagcaccaggcagcaacagcaaactaaaactgtttttagtgaccgacgttctggcggaattaatgatccccacggttgcaaccagtctggaggatatgccaccgacggacaggctggcgcactggaaggcggagaacgagcggatcaagtttgagcaggatacggggcagcttatcccggcagatgaagtggccagagagttttcagtcatggctaaagccgttgtgatggtgctcgaaacgcttcccgatgtactcgagcgagattgcgcgctttctcctgcagcggttgcccgggtgcagagtgtgattgacgatttgcgcgaccagatggcccaaaaggtcatggaagccgaagcagaggaggatgagccagaggaggactga

SEQ ID NO: 97672 - DNA, 420 bp, Enterobacter aerogenes
atgtttaatcgtaatgatctgaccctttcgcttttctatgcttccagcacgaatgacgaaggcgaaaaagtcgcgacattgaccgttcaggtgaacaatgccgacatggtggccatgcagagcaacaagctgcagtgcatcactgataaggctggtaagaaggcttattccgtcggcgagcaaatggtctccaatggctctgatccgctgctggttgctctggagagctactggcgccagaacactgaggcggtcgtaaccgggttactggtcgatgttggcgacttcattgcaggccacatcagccagtcctcaacgttcctcggcttcaatgggctgaaggtcttcgagaatgaacccctgccagcgcgcatccctgaggatgtgctgcaggccgacggcgacgcatccgcaggctga

SEQ ID NO: 97673 - DNA, 177 bp, Enterobacter aerogenes
atgaataaaaaagccccgcacatgcgaggctactggttaaacatcatggcgttactgggcggcattaaaaaactctattcaaaggctatttggcaaaagaaacatccggatttagaacttgatatatccagtgcattgaaatgtcgggaaaatgtgataacgtcagttctgacctaa

SEQ ID NO: 97674 - DNA, 180 bp, Enterobacter aerogenes
gtgacgattcacagcgatttggaagcttacttattattattacttaacatgtggcctgtattgataattgtttgtattgggatggcattggcgttttatggcgtattcatgcgcaagacggccataactttaatcgtactggcaataattattggtgcgttaggttggatgtatgcctga

SEQ ID NO: 97675 - DNA, 1089 bp, Enterobacter aerogenes
atgaaagaaagtcgcagcaaagtaattcattataaacgagcagtcattccaaactgcgcggcgacactgcaagaaatcattgattcgatcatttccgagaatggctctgctcctaaagtaagtatgcgcagagagcaaataaacccagctgatagtgatagtggttatcggatggtcaaccgaagcaacacatttaaaactgtgctttttggacaactaattctatttgaacaaggtaaaagtcagacacttatgaccatcgctgatgatgttaattactatgatattaacgccataacatcaaagcaaataaaattagaaggagatgagaagataagtgaagaagaaaaacaaaaaattaaacgtgaattcgtagattcaattctatatttcggaattcgtggcaatcatgtaatgattgtgcaatcaagctcattacggattaaagatatcgagactcatctaaattggttgatacattcttttggctctatttttgacactgatagctttcttatccttcaggataaaccgacagaagaaacaataaaaaaaatgcatgaaagcccagtaaaaaaaataaatctaggtagcgtcccaattaaaaacaaagaaccatctgaggttgttaatattactcacacagccaatacacaagatctaagtgaagtagcaaggtcgccgctagagaaagtaaaaaaaataaaattcatgcctaccggtaaaggtggggacataataagagctgcttttggtgaaggttggtttaacgatctaaaacttgaagattcattagatgaatcgaatctgcaagtcaacttagagattacatatttcagaaagaccaacaaagatggtcaaagggttcttgacactttagccacttcattaagaaatatagatgatgatgaaattagcattaaccttcaaggtggtggaactataaaaggtaatgacctaaaactttctggcaaagtaaacgtccaatttaacaatggactaattgatgaaaatgatttatatttgcaaatgcataagtggctggcttcgaaagtccaagctggtgaaataagcgttaaaaaacaataa

SEQ ID NO: 97676 - DNA, 513 bp, Enterobacter aerogenes
atgaatttattcaaatttttattaaaattcatttccgcttttgccttcggttttactatcttttattttgcggtgaaaaagattgatctgggtagtacctctgccccttgggctttgataactttaatgatattccctttcagttactgcgctgcagttttattcaaagtatcggaagccgacgaaaacacgtctctttcagaaagcgagattagacgcttgcgcccacttattgattacaaaaaaaagcaactaagcttccttattattttctatctcttagctgcttttttaggtgctatgggtatgttaatcattgcaaagggaacaagcatacatctttatttcatttcatcttgcggaggagttattgcggcatctctctactctttctttttcgttaaatcaattaatgacgaattacaaaggttcaaaagcatacttctgcatagaaatgacactaatcaaaagaccaaagatttcttagaatcactcaataaaaaggcggattaa

SEQ ID NO: 97677 - DNA, 363 bp, Enterobacter aerogenes
atgcgagatatgcacaaggttttggaattatggggtgcatgggcaaatagtgaatcttgctctgttgactactcatctattgccgctggttttaaagggcttttaccgcagactagtaaatcgagaataatgtgcactgacgacgatggtttaataattgaaggttgtatggctctgttgagaaaaagcagaccgtatgattaccaacttttagtagcacattatctttataacatatccaagcgaaaaatggcaaagcacagaaaaaagagcgagaagcagattcgcgttgaaatgctgcttgctgagggctttattgaagggtgcctctcgatgcttaatatacgtttagatatggactga

SEQ ID NO: 97678 - DNA, 516 bp, Enterobacter aerogenes
ttggaactcccaataagcggttcacgctaccagaaatcaaaaacttctctggagaacatccggggtcgcttacgtgacggttacagcgtcagcgatctgcgtctggttatcgactttaagcatgagcactggcgcgccaatgacgagcagtatcagtacatgcgtcctgaaacgctgtttgggccgaagaaattcgagggttacctgcaaagcggaacccgttggaatcagaaaggcaggcctaagcgtgaagattggggaaaaagtaaaaagcagtccgaacttcctaacagctactgccaggatgctggcattgatatctctgcgcgtgaccttgcctggcgccgctaccacgaccttgaggctgacaacgagccgaagagcgaaattgaggtacaagtccgggccagggccgatcgcgatggtctgaaagcaaagggacatgaccatggtctggctcagtttggatggaacaatatctggtctgtagtggccaagaacggaggagcggcatga

SEQ ID NO: 97679 - DNA, 264 bp, Enterobacter aerogenes
atggaggactgctatctgctgatggaatactgcaacactgttcagcttcttttcgatgccaatcaggaaatcaaaaatgatgggctcggcgatgagacagcagccggtgggcagaaaatgggcgcggcagtaaaggcccgtgacaaatatatctcacagttaatccggctgagcgttgttctaaaacttgacccaaatagccggatggtaaaacgaactccactcgccgggagtaaaactgaaaacgaatttgacgaattttga

SEQ ID NO: 97680 - DNA, 360 bp, Enterobacter aerogenes
gtgctggccatgtcacagaaagaaaacagcaacagagagaacgcgatgaccgccacgaatcttaaaattgaatacgttgatgggcagttggttgccctggagaaaaacggaacgtcattcctcggtgccggagtaacagcgctttacttcagccatacgctcgaggaaaagcccttgctgaaggttgaaatgggcggaggtccggtagaagagatgcctgcgccaccgccccagcaggtgcaagccgaaccaacggttccagttagtgcagaaccgccgaaggaaggagagctccttccaccagcccaacaaccgcaaccgcgtggccgccgccgccgtaaccgtcaacggagccaataa

SEQ ID NO: 97681 - DNA, 204 bp, Enterobacter aerogenes
atgaagaaaagctggtttctccatgaacaactttcagagtctcaggctctggaactggcggaacgctaccggaaaaagaattgtccggttgagaaaagcctgtcgagcgactttatctcatgggaactccgtgtgctgttgccggaatccagcaagccaccgcgcattaacagaatctacacacaaaaaatgtggagggactga

SEQ ID NO: 97682 - DNA, 393 bp, Enterobacter aerogenes
atggcgcaaacaaaattaatatctgatgcggaacatgctggcgatcatgttgatggcgctggtctttcttcattacacaacctgacaccacgacagcaggaagtttttgatctgctggtggcatatatcaatcagcatggctacccgccgaccgttcaggaactggccgggcttctcggcgttagctcaccgaatgctgtcgctttgcaccttcgtgcgttacataaaaaaaacttcataaaactatctcgcggtgtttcccgtgggatttctgtcgtcggaagaaaggaaccattacttgccgtgcagctgctgcaggaaatgatcgctgacgcacctggagcgcgtgatcgggcgctggagttcctgcgagtgtacgaggcccgcccatga

SEQ ID NO: 97683 - DNA, 258 bp, Enterobacter aerogenes
gtggctaaaaaacaacaaatgccgaacaccggctatgtagtaatcagatgcgatgacggggtaattgttgcccgtctcacctcttttcccgtatgtgagcgcgctttaatgtaccgtcgcggtgatactgtttcgtttatgcctctgcagcccgatgagatcgtggggactctctcgctgttttcgcagatgattgaaagagcaaagaccagagggggttacaagattcctccgggctctgttacaatcccgtcatag

SEQ ID NO: 97684 - DNA, 234 bp, Enterobacter aerogenes
atgaaagtggaaatcacaattgatcgtcgcaaaaagttacctgagggagcagttccggcattagagaaagagttactgcggagactgggccagaactttaacaactacagtttgatcattcgtcgaacgggtacggatggtttgagtgtgtttggtgggattgatggggataaaaagcaggtggagcaaatccttcaggatacctgggaaagtgctgacgactggttctattga

SEQ ID NO: 97685 - DNA, 183 bp, Enterobacter aerogenes
atgatgactgacagcgttctaactgaggaagaattaaatactctcatcgcaaaagcacaggcccattcagaagtgatgaatgaattaggctcgaaacaggaagctgaagagtttgcccagatactaagcgcattatatgaattgaagcggcacagggtaatagccgcgcaggagttgaagtaa

SEQ ID NO: 97686 - DNA, 186 bp, Enterobacter aerogenes
atgaaaatcgatgtaactcccgcacaacttgaggcgattaagcggcttagcgacgattgcgactcaatgattggttgcggaaatgatgatgccgataaggcttgggcgcgaaacgtgaaactgattgaccgaatgttgtctaacaacgggtttagccgtaatttcaaagaagaagggctatcgtga

SEQ ID NO: 97687 - DNA, 354 bp, Enterobacter aerogenes
atgactgatattatccggttgttagccagcctcaagcgccgctcagcccatgcaaaagagttcggccacgacgttctgttcgtaaagttagaagatattgatgctctgctagaagcgttggagacaaaagaagatcagcgcgcaaactggttccagatggctcagaaattaggggaagacttggatgcggcagagaagctcattgctgagctggaatcaaagctagctaatactgtgcaactgccgaaaaccaacggctactggactgagacagaaaaggcgtatgaagaggctattacgctcgcgaagcggcagattcgccttgcaggattcagctgtgagggagatgagtag

SEQ ID NO: 97688 - DNA, 123 bp, Enterobacter aerogenes
atggaaaaggaatacgaagcatattttgaaagcctgtcagaaggcgacgaagtattgagttttgcagagttcaaagaggcgctttcagttaagcgaattgatacgactgcaccagagttctaa

SEQ ID NO: 97689 - DNA, 195 bp, Enterobacter aerogenes
atgaatacgctgtttgcccttgtcatcagcgtgtgcgccctgactggcgagtgctctgatgtcctgataggcgtgtatccatctgagaccagttgtaacagcgatgctgaggcccagcacgtaaaaggcacatgccagccatataaaaaggcattgaagacggctgacgaccaacagcctgcagtaagtttctga

SEQ ID NO: 97690 - DNA, 2115 bp, Enterobacter aerogenes
atgaacaactacgcgtatctcattaaagcaaaggcaaaagccaccgaagcgaaaaacctcttctgctggttttctgctaaatcagattcccgcgccgaacgtcgtatcctggacattctggaagacgctgagattaatgttggccgcggcgccaaccaccagctgcctatccacaccaactggtttatcgttgatgacctaccggaagaaggtgtactggatgacacctggtgtgaccgctacgaacttggcgaggatggactgagctggcaaaaaattgctgctccagtccctgctgagccagaagtaagcaatgaaccggtagctaacccccctgtcagcaagaatgatgaagaggactattcggccaatgaagatgccctgttcaacctggctgaaatgcctttccgcacgcagctgcttgcccagtacatggccgacgatcgccatgtttatcacattagcattccgcaccgtgaccgcctttctgtgatggaaatggatacggagaatcacgctgtacagaatctgattctggctgctgaaaatgttccggaaattaagaaatacgatatgcctggtctgtggaaattcaccagtgccttcaaaatcgttttcccagaaggaaagcgctatgagcttggtaagcaggttcagtttaccaaattgtggtttgaaacggcacacattgaccgtggggtcctaaccaaagaatgggctgctggtaattacatatcatcaataagtcgtacaccttcaggcgccaatgctggcggcggcaataagaccgaccgtaaccctgagcttagccatgattttgatagcctggacatagaaattgccttagcaactctgccgatggattttaacatctatgatattccgggcggcgtttaccgttgggcgaaagaaatcgttcagaaaaaagaaagtccattcaaagaatggtcctcatcacttcgtgccacacctgggatcctcgattactcgcgcgcagcaattttcgctctgatccgcgaagcgtcttctggattaactccattcccagataggcttcgtggttatatcagcgcgagccttacagaaagcgagcattcaaagccctcagaagaaacactaaaagcagcacgtcataccccaaacaaaagctgggaaagcgaaattagccgccagcttgccgcagaccgcggggagtttgttgaagggatatgtgacccaacagatccgaagtgggtaacagaacatctgacagaaactaagcaaccaggagttgccaacctcggcggcggcgtgttctccattgatggcctcatgtcatcagaaaccacagcccaggaaaaagagaccaccagcgatgtgcagatggaagagaatttcgggaatgaaaccgaagttgttaatgaaatttctgaaagcgaaacagctgctgagacaggtacaagtaatgctgacattggtagcgaaacaactaccgtaaatattgaatccggtcatcataatgatgttgaagaattaccagcagatgacgttcacgtcatggttgatcttgaggttatgggtaaaaaacaaaatgcccccatcgttgctatcggagcggtcgtgtttaatccggctacaggctcaatcggagaaagtttctataaagtcataagcctcgagtcgtctgtaaattggggtgcggaaatggatgcaccaaccgttatatggtggcttaagcagtcctccgaagcgcgctcagcgatcgtgaatgatgacgccatcccgctacttgatgccctactccagttccgtgaatttattttcgaaaatatccctggaggtcgcaaaactgcccaggtctggggtaatggcgcatctttcgataattgtattctgcgttcttcatttgattacatcgctgaagaatacccgtgggaatattggaatgatcgcgatgttcgaacaattgtagagctcggtaaagcaattggaatcgacccgaagaaaaccatccaatttgagggagaacggcacaacgcccttgccgatgctatacaccaggcccggtatgtttctgcaatctggcagcgtctcattgagggtaatagagtgctgcaaaaactgactcaaaactga

SEQ ID NO: 97691 - DNA, 615 bp, Enterobacter aerogenes
atgtcaaacacaaaagaaaccctcagggcgatctcaccttacaactttacatctcaaagtggaggtaaagaagcaattactcgcatccttcaggcttatggattcagtactagacaggctttgtgcgatcatctaggagtatctcaaagtacaatggcaaaccgttggatgcgcgatacttttccgcacgactggcttattgcatgtcacctagatactggcgcatctatgctttggcttactacagggcaaggcagtcccaccacaaaaacaatcaatgacagtggattgcttttgcaattcaaagaaatctcaaacgggatttactcatcatctgaacaggtccgttatgacgcctgccttatccccgcagattcaacagctcctttcttggtgaagtttgaaaaggctttctatcttgtggatgagttcaagggagaaatcaatgatggaatctggttgattaaattagatggttttctgagcatcaggcaagtttatcgccttccaggcgggcgcttacgtgtagagaatggcccagcatcctttgaatgcaccccatcggatattgaagttaacggtagagtgatcagcaaaacagcatttacagaatga

SEQ ID NO: 97692 - DNA, 237 bp, Enterobacter aerogenes
atgaatcgtaatttttcaatgcgccccagcatcaaccttgtggtatctgagccattcatcacactggatgagttctgccgccgcactggttacaagcctagctatgtccgccagatgatccgcgaaaaccgcctacccatcaggaaaaaagccggagttaacagccttatcgaaatcaacatgttcgcgttgacgatggaagcggcccaaggctgcgaagtcacaatgcaagcctga

SEQ ID NO: 97693 - DNA, 510 bp, Enterobacter aerogenes
atgtttgattataaagtttccaaacatcctcactttgatgaagcctgccgcgttttcgcactacgccacaatatggtgaagctggcagatcgcgcaggaataaaggtccagacgctgcgcaacaagcttaatcctgagcagccccatcagctcacgccgccggaaatctggctgctgacggatatcactgaggactccacgctggttgatgggttcctggctcaaattcattgcctgccatgcgtacctacgaacgaagtggcaaaagaaaaacttccgcattacgtaatgagcgcgacagctgaaattggccgtgtggctgcaggtgctgtgtccggtgaagtcgggactacagctgggcgccgtgatgtgatcagcagcatcaattctgtcactcgccttatggcgttggcagcgatatccatgcaggcgcgtctacaggctaaccccgcaatggctagcaccattgatacggttacaggtatcagtgcgactttcggacttatgtga

SEQ ID NO: 97694 - DNA, 201 bp, Enterobacter aerogenes
atgctgaagaacgaaccttctttcgcctcgatcctggtaaaacaaagcccggcaatgcactacggccacggctggattgcaggagataacggcaagcgctggcacccgtgccgctctcaggaagaactgctggcagggctgaccactaccaaaaaggtgaatccatggctattgaaggcacttctgcgactgttccactaa

SEQ ID NO: 97695 - DNA, 315 bp, Enterobacter aerogenes
atgactacgcgcgttcaccaggtaaaaatcgctccggtttatttcaatgccgttgttacaggcgaaaaacgtgcagagcttaggaaggatgaccggggctataaagtcggtgaccttctttctttgtgcgaatgggaccacgacggcaaatataccggcagagaatgcgccgcagttattacccatattctgccagtaaatgacgttcttcctatgccgggaaactggattccgggtagttgggtgatcctttcaattcgcccgttcacaaccgtagaggcgctggttcacttattcacagggagtgtcaaatga

SEQ ID NO: 97696 - DNA, 234 bp, Enterobacter aerogenes
atgcgcattgaaataatgatcgataaagagcagaatattagccagactacactggacgcccttgaatccgagctttaccgaaatttgcgccccctctatccaaaaacggcaatccgcatacgtaagggaagcgctaacggcctggagctgagcggcttaaaactggacaatgataaaatgcgggtaatggagattttacagcaggtctgggaggacgacagctggctacattag

SEQ ID NO: 97697 - DNA, 741 bp, Enterobacter aerogenes
atgcctctccataaattttctggagcatttttcaaagatatgcaggttgaatggccttgcccagaatgtggtcagaagactctagagatcgtccaagaaactttcttcgttaatgacacgcatggcaccaataaacacagtcatgaagattggttcgagcctgaaatgcatcgagcaatttttagctgtacagctcgctgctcaaggagacaatgtggtgaaattgtggcctgttctggtgatagtggatgggagcggagaggatgggacgatccggaagatgatgaagaatattaccagtggtttcaccctaaaacctttttcccttcattacatccttttgaactaccggctaagtgccccgaggagataacagatcctctattggcttctttttctatatttcttatgcaaccaagcgctgccgccaaccttatcagaatctcagtggaaaggatgctgacagcaatgggagtgccagagcataaaaacacaggctggcgcatcggactcaaagagcgacttaaaaaattaccagaaatctatgcagcatattcagggcaacttatggcaataaaatttctaggtgatgctggaagccatgattacgataaggtcaaattgaaagatattgaagatgcgtttgaaataatggatcacgtggtaaacgatttattttcggggcgaaaggaatcgattgaaattctgactaagagattaagtgagaaattcaagcaataa

SEQ ID NO: 97698 - DNA, 807 bp, Enterobacter aerogenes
atgagtgacaacgttcgtatgtccaatgcacccgtatattatgtgttagcgcagataaagtttacgcctgtaaaggcgatgaaaaagtatgtggatgacatacaggatgcgttacgtttgcaaggctatcctctcttcgagagccgagagtctacgcagctgaagtttgaatttaatactcctactgaaccggctcaacccgcatttgaaatggtccagcaatggtatatgtcggacttgaaacgtacctcagggtttgttttagggaacgatttcatcacatttcatacaacagaatacgatacacaccaaccgtttatcaaagagttaatgaagggtttggcggttgtgttggaacatcctaagccagctttggttactcgtttgggccttagatacttggatgctgtattgccggaagatggtgaaactattgaacaatacctctgcgaaggcttgcatggtatcgatttagagttaaatcaaattcagtctgtcaacgaattagtcttccaaaccaaagttggaccagtaattgaaaatggtttcctagttacacgtttgcacaaaatgcatggtcaactaggattcccacccgacatggttccaattggtgtagatatgattcagcgctttagaactgaacatgttctttggcatggtattatcgatactgatcattatgtggaaggtaacctgccacctgctattgatttgattgagaaacaattcacttctcttcatagtgtggtaaaaggtacgtttaataaaatgatatctcagtatgctattgacaagtgggcataa

SEQ ID NO: 97699 - DNA, 645 bp, Enterobacter aerogenes
atgcgtcaatccatgactggtagtaactatgagacacccggctttgcaccttttgctggtgcggcgtttatagttgcatcatctttattcttaagtagtacaggatcgaatttttctgttaaagatgttaaccagtggcgtggctatgtacaacctaaggttcagttcgggttgtcaagatctgaaactgacggtgatgttgaaaatgatattgttgacgtcagaacgatatctgaccatttgaacaacgtcagaaacacgcttgctccctctatgtcggaacttgcaaaagatttaggtattactaggcaggcactctacaaatggttatcaggtgaaagtcagcctgatgatatggaaaaggctagctatatcattgagttgagccgattgtcagatcgttttaatgaagcaggcatcttaaatgcgaaactgatggctaagatgaaagcttttgacggtttctctatcattgatttgataaagagaggcgataattggcaacaatcagtaaatactttgattgaagaagctcgtaatcttaaaggcgctggtgttaaagcaaatctgacaggtagtaaagcttcacctacagatggttggatgtcatcagtttctatcccaggctcaggagtaagggagtaa

SEQ ID NO: 97700 - DNA, 840 bp, Enterobacter aerogenes
atgattgactctggtacaacttggcgccaaggccaaattcttagacatgaagatgcggtttccctcggattaattgccgaaggggatgtaggcgttaaagttgtcgtaatcagtcatgactgtgatctacagagtgcttctgaacccaaaatcgagcttatagctggccctttattaaaaggggccagcaactttacccgagccaaacatccaagaattttgcatttacattttgaaaatgcttcggatgctaacttaaatgctatcgaattgaagcatgatcataagcttcgtatagataaagaaagattcacatgttcagaatgtgatccttcttattccatatcgccagaagaaaaacagggtttaaaacaatggcttgcagctcgatatgggcgacctgcattcccagatgtctttgaaagtaggctacgagcttttgataccaaaaaatttagatttgagaaagagctggcgaagataatcagtcagcattctaattttttgataggtgtcttcttcgatttgggtgaagatcgatttgtcgatctggaagagggcattccttacgaattaaatatccacttagtttatgacgcgattgacggtggccctgaggcaaggctagaggctgagcaggctgtagagcatgtacacactctgtttactacttatcatggtgacccatctgaaagcgaactaatcgctttaatgtcatgcaatcctgtgcccgataccgaattcaccctgtatgctttacgaagaatggatcagtggcgcgtagaatatataagcttaatgggcgatgagattggggattatcttaacccttcaatttga

SEQ ID NO: 97701 - DNA, 1050 bp, Enterobacter aerogenes
atggctaaccgcaaaaaccgtagcaaggcaccgcgcggcaagaccgccgccgatacagccaacatggtcagtaatgcacatgcggaggcatttacgtttggcgatccgattcctgtaatggaccgccgggagttatttgattacctggagtgcgtgcgggtggaccgctggtacgaaccaccgatcagcatggatggcctggcgcgaacttaccgcgccgccgtgcatcactccagcgccattcaggtaaaacgcaatattcttaccagtaccttcatccctcaccgctggctgtctaaacaagccttttcccggttcgcccaggactttctggtatttggtaatgcgtatcttgaaaaacgattaaatcggttaggccagatcatggagttgcgcgcctcgcttgccaaatacacccgccgtggcatcgacccggacacctactggtttgcgcagtatggctacaactcacagccatatcagttcgatgagggaagcgtgtttcatctgatggaacctgacgttaaccaggagctttacggaatgccggaatacctctccgccattccttccgccctgctgaatgaatcggccacgctgtttcgccgtaagtattacctcaacggtagccatgctggtttcatcatgtacatgagcgaccccgccgccgatcagaaagacgtggacaacatacgcgaagcacttaaaaaatcgaaagggccgggcaacttccgcaacctgtttatgtacagcccgaacggcaagaaagacggcattcagatcatcccactgtcagaagtcgccgcgaaagatgagtttcttaacatcaaaaacgtgagccgtgatgacatgctggccgctcaccgcgtgccgccgcagctgatggggattattccaacgaatacgggcggttttggtgatgtagaaaaggcaagtaatgttttcgttcgtaacgaattgataccacttcaagagcgcatgaaagagataaacgaatggattggtgaagaaacaattaaattccaacggtatgatttagaagggaattaa

SEQ ID NO: 97702 - DNA, 594 bp, Enterobacter aerogenes
atgctggctttcgaaccgcttttactgcgtccgtttgcataccacccggtctggatcggctatgacccggcaaaaggaacgcagaatggtgacagcgccggttgcgttgtaattgcgcctcccgtcgtccccggcggtaaattccgcatccttgagcgtcaccagtggcgcgggatggactttcgcgcccaggcctcagcgattgaggaaatcaccagacgctacaacgtgacctacatcggcattgactctaccggcgttggcgatggcgtttacaaaacggttaagcagttcttccctgccgcgcgtgagtttgtctacaacccgaccgttaaaaatgtcctggtgcttaaagcctacgacatcatcagcgggcgccgtctggagtttgacgcgggaatgctggatatcgcgcagtcctttatgtccattcgccgttcaaccaccgccagcggcaaccggccaacctacgaagcagcccgcacagaggaagccagccacgcggatttagcctgggcaaccatgcacgcactttataacgaaccactggcaggagcttccgccagtaccagcaacatcgtggagattttttaa

SEQ ID NO: 97703 - DNA, 1419 bp, Enterobacter aerogenes
atgtttagtaacagactcgccagccatcttgaacgcggcgtcgtcggctttccgacgaccctcgccagctcggttgggctgattatggcaagcccggtgatcctgacggtcaccagcggattcggcatgggcggcgacaccttcgcgctggcggtactgctggcttttattatgatgcaggcgcaggtcactaccttcgctgaagccgcgacgttaatccccaccaccggttcggtgtacgactatatctcctgcggtatgggccgcttcttcgccattaccggcgcgctgtgcgcctatcttatcgtccatatcttcgccggcaccgcggagaccattctcgccggcattatggcgctggtgaacttcgaatcggtcaacgcgcagatggccgcccatcaaaacacctggatggtcggcgtcggtatggtggtcattttcggcctgctgaacgccattggcgtggaaattttcggcaaggtcgaagtggtgctcacctttggcatgtggacgacgctgaccattttcggcctgttcggctatatcggcatggcgatgtttatgttcgtcggctgcgaactggtgacgccgatggcgccggaaatcaaaaaagcccaccgcaccattccgcgggcgatggcgctgggtttactgggcgtcgccagctgcatgtttatctacggcgcggcgattaaccgccaggtggaaaacgtggtggtcgatgcggcgaataacatccatctgctggacacgccgatggcgatcccggccttcgccgagcgggtgatgggccacgccggccagtactggctcggggtcggcctgctgctggcgggctgcgccacaattaataccttgatggccgcagtgccacgtattatttacggtatggcgctggacggcgcgctgccgcgttttcttacctggctgcatccgcgcttcaaaacaccggtgatcgcgattgccatcggcgtggccatcccctgcctgcacgcctggtacctgaacggcgatctggaccgcatcgtgccgctgatcctcgccgcggtctgcgcctggggcgtagcctatctgctggtcaccctgtcggtggtgatgctgcgcattcgccgcccggacctgccgcgcgcctaccgctcgccgtggttcccgctaccgcagattatctccagcgtcggaattatcatcgcgatcgtgaatattaccccaccgggaatggacagccgcgaggtgctggtgccgttcgggattatgctcggcctgaccgctgcctatgccctgttctggacgctgtgcgtacagcgcgttaatccgttcaagccgctggaggtggaagaggtggtcgagcgcgctatcggcaattacgagaaacagacccgcggggagatgacgcctgatgtcctccgtcccctggtttga

SEQ ID NO: 97704 - DNA, 849 bp, Enterobacter aerogenes
atgatggatgcgccgggccagcactttaccgtggctcgctgcggggatagcgtcgctggcgcggtgtggctggtggaggagggggggcttgaacctgaacttagccgtgccgtctgggccggatatcgccgcccgcgcggcaatcttgtggcccagtcattggccgcgcatggcggcagcccactggcggcgacgctgaccggcaggcgcgtcagccgtattgccgtacatccagcgcgtcagcgcgaagggctggggcagcgtttaatcgcccatgccgtcaagcagacgcacggctgtgactatctctccgtcagctttggttatacccctgaactatggcgcttctggcagcgctgcggttttctgctggtgcggatggggacgcatcgcgaggcgagcagcggctgctatacggcgatggcgctttatccgctcagtgcagcggggcagcagctggcctggcgcgaacatcaacggctggcgcgggatgaacgctggctaagtcagtggcgtgatgagcgtgctccggtgacggcggaggaaacagctatgcttactgaggaggactggctggagattgccggttttgcctttgcgcatcgcccactgttgacggcggttgggagtctgaaccggcttctgcaggcgacgccgctgccgttagtggcgctccgtgcgcgattagcgcagcacgatgaggcagcgctgtgcgcggaccttggtttatccgggcgtaaggcgctgttggggcgactgcgggaagaggcggcggcggcgctgtcaggcctcgatcccgctcgtgcgcaacggctggacgagtgggtcaggaagctgcaatttttttaa

SEQ ID NO: 97705 - DNA, 804 bp, Enterobacter aerogenes
atgtttgtttttttagtgatacctattttagtcagcggttttctattagtccacatccaccccatatataaatataaacttcatcgctatgaagggcagttcttatacctgaaaagtgcccaatatggtctttattcaatgatccttggggtagtgttttttatttatgcctctggctctctgagcataccatatacaacaataagctttgatgtcataaaatttatccatacccacctaaattttataaactctatcaatcaagataaaaaattacttgatgagttatccattattttttcaataactattttcactttatttttccctatagtatggactctactttcctttattcgtttatttataaaataccgaaccttcgatataaagccatacataatgtcaagaattttaaatgacagtcctttagataaattcttactaaatgcatcaataagcaaaaataaagatgaagctgtcgtgatgttaaccatgcaagatagaaaagtttatgtcggaaatgttattacaaccggcgagccaagtgagactgaagggccggatcaggaaatcgagttcattccatggataagtggttttcgtcataaagatacgctaaccgtcactttcacaacagattataaaatactcaaagaacgaattacattaattttaaaacaggaagagatattatcagcgacctccttctctttcaagcattatgaagaatttgaaaagcgaaaagctgaatttaaaaagaacaaattaaaagatattataaaaattctgttagatttataa

SEQ ID NO: 97706 - DNA, 906 bp, Enterobacter aerogenes
atggaaacaccatacacctttttgaaattcgttacacaagatagaattgatattttaaaagatggatatattagatttactccccctaaggacttgaatgaccccttcgaagttaaccctgtagtaattcctcatgatccttacaatcttcaactgatagaatccgggtatgattatcaaaatcatgaattcacagcaagtgatcatgatttttcatggaaaagattcaataaaatcggacactataaaaatgaatattcaaagttctctaataaatatggaattctttctctttctagttctaaagatatgtgttcaatgccatcagtagcaatttttagtgaagaagatccaagacgtaacttattaatgtggtcccattacacagacgaacacagaggttttattattgaattccatcgtaactttattgatgacactgaaatatcaaaaataacgtactctcatgaaaggccaatggtcacacaagaagagatagaatcaggagtcatttttcctttttttgttaaaggtgagaaatggtgttatgaaaaagagtggagaatcataaaacccttggaacaagctgataaaatagtacatttggacaatggtaataccatacatctatttaaaataaaaaagtctcaaattcgctctataactacaggctgtaatatggacacgaataaaatagaagaactaaaaaaaattgtattcactgatccagaattaaaaaactgtatattttatgtttcaaaaatagacaatgaggggttcgctttggattttagatcatattcagccaatggttggactaatgatgatgtatttggattcccaatgatatccagacatcccttattgataaaccctgagaatgtaaaaaagcaagtgcaagaataa

SEQ ID NO: 97707 - DNA, 1470 bp, Enterobacter aerogenes
atggacccaaaacctcctgaatggaccaccttttttatgggccaaaatcctggcatagaacctgatttcttcggtatgaatagtagcacaggagcagtattagttattgaggctaacaattccagatatcttattccctttggaaccggtcatcacttaatcaatgatggcagcattgtcaaaggatttgggcttaaaacaactcttaatagtatagaacataaaaaaattcgcagtttagataaaggcagtcacaacgaaacgaacctgttaactcgcagtcagagcagtaaagaagtcgatatatataacctaaaaatagattctgagatggatattctcacaactctcacaggcacttcgacagaagatattttaggaagtaaaattactggcaaagatgcttttgtgatcatgccggatattgaattgaaggctattccagcactgttgaccaaaatagactctatttacttattacctcttcctgaagaattcgaatgggttaacaatatcaaggaggctgatgaacaagaagttgagatattggattcgcttttgattgatcggataaaggaaaaagacttcaatgatttatggcttggagagcctgaaatagtagactgggaaaatcaaataggctattgctttgataagagacaaagattcattcatgaaaccttatcaatataccatgtttgtgattattttgatggtaagaaaactgaagtaactgttgatgaactcaaaaaaaattacctgcatgttttgaatgccgattttgaatcgataaaaaaatggtctttatataggtgcctctatgccgagataaaagaaggtgatcagaactatattcttcgagactctatatggtatgttgcagataggaattttgtatcgactattgatgatgaaatgaaaaaaataattcattatgaggagtcggataaattccctgtatattcatataaacgagaggaggattataataaaaaactgtgccaagatgataattcctttacacacatggatcagaaattcattcatcatggtggtggtaaaagtaagattgaattttgtgatcttatcagaggtcaatcagattttatccatgtaaaatattatactggttcgcaaagtatgagccatcttttttcacaaggatttataggttctgaactttttataagtgactctgaatttcgaggcaaacttaatgagaaactacctgctcatataaaattagccgatcatataaatagaccagatgctaaaaaatataaactagttttcgccatagcttctaataaaaatcttcccgaagatttacctttgttttctaaagtaaacttgaaaaatttccacaagagtattaccaattttgggtatgaggtcaggatctgcaaaattgctgtggacccagatatttataaaaagaagctatgtaaaccacaaaagaacaagctttaa

SEQ ID NO: 97708 - DNA, 897 bp, Enterobacter aerogenes
atgctgcctgaatcaaatgaattcccaataatccaaattgaaattgccaaaataaaatttcttaacccgcgaactagaaataaggtagtgcatgaagaaattaaggaaagtataaaaaaaagaggattaagcaagcctataagcgtaagagcgattgatgaagacgacttcaaatatgctttaatttgtggccaagggagaatagaggctctcgttgcattaggtgaaaccattattccagcaattataagagatgtatcagaagaagatgcttatgttatgagtttggttgaaaacattgcaaggaggagaccacgttccaatgagttattacagataataaaagatatgaaaaacagaggactttcagactccgaaataagtgaaattactgggtattcatcgaactgggtgagcagtataaatatgcttcttgataagggagagcataaacttctctctgcagtcgaacgggggaatttacctctgtatctcgcagtgcaatttgcaagatgtgaaactgaagaagcacaagatattcttaccgaagcatatgataaaaaattaataaaaagccgggacattataaagataaaacacattctaaatcagcgaacaatagggaataaaggtgcaaaagcagccgggttttattatcacaaaccatcaaaaagaatgtctgctgaagagttaattgagctttatgaaaatagtatcgctgaacataaatctgtttataacaactctaaatttattaaaactaatttgctgatagtaaatgagatctttaacatcataatgatgaataaaagctttcaaaatatacttgaacaagagaatctatcagaactgccatctcaaatcctcaatccaataaacaaagaggcatcaaaatga

SEQ ID NO: 97709 - DNA, 348 bp, Enterobacter aerogenes
gtggcaaccaccgaagagttggcggaattgcagacgcgggtcgataaccgcgaactgatgattaccgctgcgctgccgggcagcggcgactggggcagccaacgcgacgcgctggccgccgagcaagccgcgatagccgaagaaacgtcgctacaggcgctgctggcgcgcgagaaagttgaagccgcgcgccgggcgatgctgctgtatccgcagcaattgtgctggaactggtgggatgatgtcactgttgaactgcgcttctggctgccagcgggaagttttgccaccagcgtggtaagggaacttatcaatacaacgggtgactatgcgaatattgctgagtaa

SEQ ID NO: 97710 - DNA, 1440 bp, Enterobacter aerogenes
ttgaacgtcacttcagcagtacgccaggccgtagcgcgcacgtcctggtttaaaaagcgcaagagctatcgtgtgctctactggcgtgaaatcagtccccttgccataccgatcctgctggaaaacgcctgcgtattattgatgggcgtgctgagtactttccttgtaagctggctcggcaaagaagcaatggccggggtggggttagccgacagctttaatatggtcatcatgtcgttctttgccgcgattgatcttggcaccacggtggtagtggccttcagcctcggcaagcgcgacagaaaacgggcgagggcggctgcgcggcaatcgctggcgatcatgaccttgttctcaatcgtgctggcggcggtcattcacgcctttggtcagcagattatcgatatcgttgccggcgacgccacggttcaggttaaagcgctggccctaacctatctcgaactgaccgtgctgagctatccagcggctgccattgccttaattggtagtggcgcgcttcgcggcgcggggaccaccaaaataccgctgttgattaacggcgggatgaatattctcaatattattatcagcagtatcctgatttacggcattttctcctggccggggctcggctttgtcggcgccgggttggggctgactattgcccgctatattggcgcgttggcaaccatttgggtattgatgacaggttttaacccggcgctgcgtatttcgctgaagagttactttaagccgtttaactttgccattatctgggaggtgatgggtattggtatcccggcgagcatcgaatcggtactgtttaacggcggcaagctgctgacgcagatgtttgttgccggtatggggaccaacgtcatcgccgggaactttattgccttctcggtggcttcgttaattaacctgccgggtaacgcgctgggatcggcttctaccattattaccggtaaacggctggggaaagggcaggttggtcaggcggaacgtcaggcctggttcgtgttctggctgtcgactattattctgacgcttattgcctggggcaccgcgccgttcgctggcctgatcgcttcgttctacaccagcgaagaagacgtaaaagtggtggttaaagagttattgtggctcaatgccctgtttatgccaatttggtcgctctcctggaccttgccctgcgcctttaaaggcgcgcgcgacgtgcgttacaccatgtgggtgtcgatgctgggtatgtggggctgccgggtggtagctggctatacgctggggatcatgctgggcatgggcgtcatcggcgtctggctgggtatggtgctcgactgggcggtgcgtggcttgttgttctatcgccggatgatcaccgggcgttggttgtggaagtacccgcgattaaaggctcggctggaagaaaagtcatga

SEQ ID NO: 97711 - DNA, 831 bp, Enterobacter aerogenes
atggacggctggcggctggacgtggtgcatatgctgggcgaggatggcggcgcgcgtaataacctgcgtcatattgccggcattacccaggcggcgaagcgggagcagccggaggcttttgtattcggcgaacattttggcgatgcgcgtcagtggctgcaggctgatgccgaagacgcggcgatgaactatcgcggttttaccttcccgctgtggggcttcctcgccaataccgatatttcctacgatccgcagcacatcgatgcgcaaacctgtatggcgtggatggacaactatcgcgccgggctgtcgcatcagcagcaattgcggatgtttaaccaactggacagccacgataccgcgcgttttaaatccttgctgggtaaggatgtggcgcgactgccgctggcggtggtctggctgttctgctggccgggcgttccgtgtatttactatggtgacgaagtcggcgtcgatggcaacaacgatcccttctgccgtaaaccctttccatgggatccggcgttgcaggatgaaaacttgttggcgttatataagcgtatgaccaccttgcgtaaggggcatcaggcgctgcgctatggcggctgccaggtcatctatgcggaagataacgtggtggtctttgttcgcgtttacaaacagcagcgggtgctggtggcgataaaccgcggtcatgcctgcgaggtggtaatcgacgcatcgcctttgctggaggggaaaacgtggcagcgaaaagaaggcgcgggcgagatgcacgatgatgtgctgagtttgcccgcgatttccgcaagcgtctggtgtagccgttaa

SEQ ID NO: 97712 - DNA, 1719 bp, Enterobacter aerogenes
atgagcggcggcggcatcacctggtacctggagcaggcgcgtgagcgctctaacgcccgtatgatcgtcatcgacccacgctataccgataccgcggccgggcgcgaagatgagtggatcccgattcgtcccggtaccgatgccgcgctggtcgccggtatcgcctgggtattgattaacgaaaatctggtcgatcagccgttcctcgataaatactgcatcggctacgatgagaaaaccttgccggccgatgccccggccaacggccactataaagcctatattctcggccagggggacgacgctaccgccaagacaccgcagtgggcctcgcgtattaccggtattcccgccgatcgcatcattaagctggcgcgcgaaattggtatgaccaaacccgcctatatctgccagggctggggcccgcagcgccaggcgaacggcgaactctccgcgcgcgctatcgccatgctgccgattttaaccggcaacgtcggcattaacgggggtaacagcggcgcccgcgaatcgacctataccatcaccattgagcgcctgccggtgctggagaatccggtaaaaaccgccatctcctgctttagctggaccgacgctatcgctcgcgggccggagatgaccgccacccgcgacggcgtgcgcggcaaagagaagctggcggtccctattaaattcctgtggaactatgctggcaacaccatcattaaccagcattccgacatcaataaaacccacgatatcctgcaggacgagagcaaatgcgagatggtcgtggttatcgaaaactttatgacctcgtcggcaaaatatgccgatattctgctgccggacctgatgaccgtagaacaggaagatatcatccctaacgactatgccggcaatatgggctatctgattttcatccagcccgccaccacggcgaagttcgaacgcaaacctatctactggatcttaagtgaagtggcaaaacgccttggcgacgatgtgcatcagcgcttcaccgaaggacgaactcaggagcagtggttacagtatctgtacggcaaaatggtcgccaaagatccggcgctgccgggttatgacgagctcaagaaaatgggcatttacaagcgtaaagacccgaacggccatttcgtcgcctatcgcgatttccgtcgcgaccctgaagcgaatccgctaaaaaccccctccggcaaaattgagatttactccagccgcctcgccgatattgccgcccgctggcaactggaaaaagacgaagtcattaacccgctgccggtctatgcctccacctttgaaggctgggacgatccgttgcgcagccaattcccgctgcaaatgtttggcttccattataaggcgcgtacccactccagctacggcaacgtcgatgtcttacaagcggcctgccgccaggaagtgtggcttaaccccatcgatgccgaaaaacgtgggattaaaaacggcgacatggtgcgcgtctttaatcagcgcggcgaactgcgtattccggcaaaagttacgccgcgtattatgcctggggtaacggcgatgggtcagggagcatggcacgatgccaatatggctggcgatcgcgtcgaccacggcgcctgcatgaataccctcaccacccaccggccttcaccgctggcgaagggaaacccgcagcataccaacctggtcgaaatcgagaaggtttaa

SEQ ID NO: 97713 - DNA, 6465 bp, Enterobacter aerogenes; identical to SEQ ID NO: 71852

SEQ ID NO: 97714 - DNA, 387 bp, Enterobacter aerogenes
atgctgaaagacagtggcgaacagcggaatacagacaaactccgccacgaatacagccgggtgatagaaacccttttcgcgcgttatgacgtgttgttgacacctgtcagcccggtgctggcgtttgcgcacatgcagcagccggtgcgtaagcgcaagcttatcgtcaatggcgaaccgcaagattacaacgaacatttgttctggaacatgttagcaacggtttttggtttgcctgccaccgtttacccattggcgaaaacgatggatgagcttccgtgcggcatacagatcatttccgggcattttcacgatgatgtgacgattaactttgctgagttctgcgaaagcatcagtggcggattcacggtaccggaagggtactag

SEQ ID NO: 97715 - DNA, 600 bp, Enterobacter aerogenes
atgaatgaagttatgacgaggattgaattgagtggtgtgttaggcaaaaaatttggaaaagtacattatcgcttaataaaaaccacacatgaagcctgcagagccttggctgcaactattcccggttttgagaaattcatgattaatagtaaatcacgagggttaacttattccattttaaagggcgggaaaaatataggggtaaatgatcttggatatcctgtttctggacaaattattaaaattatcccaattgtaattggcagtaaaaaggcaggattattgcaaactatctttggagcagttttagttgcagttggcggaataatgacatatctctcaggcggtgctgcctcacctttggctgctggattaatgacaactggtgttgggatgatggctggtggcgttatccagatgctttctccacaacctgcaggattagccagtaaacaatccgacgataacaaagcctcttacgcattcggcagcgtgaccaatacagcctcacagggttatccagttccccttctctacggaaaacgacgaattggcggagccattatctctgctgggatctacgtggaagatcagcagtaa

SEQ ID NO: 97716 - DNA, 8577 bp, Enterobacter aerogenes
atggcgaacatcattaaagggcgcaaaggcggcagctctaaacagcgcacacccacagaacagccggatgatttacagtccattgcgaaagcgaaaattcttgttgctttaggtgagggagagtttgccggtagcctgacgggtaaagatatttatctcgatggtaccccgatcgagaatgccgacggctcacaaaactttagcggcgtggcctgggagtttcgtccgggcactcaggcgcaaaactatattcaaggcattccaggtaccgagaatgaaattagcgtgggcacggacatttcaagccagacggcctggacccacacgtttacgaatacccagctgtccgctatccggctgcgtttgaaatggtcggctctttttactcaggaagatgatggcgatctcgtcggcaacaccgtgaaatacgccatcgatttacagaccgatggcggtagctggcagacagtggttgatacggcggtgaccgggaaaaccacttcagggtatgagcgaagccaccgtatcgatttgccgcgggccggcgcaacatggaccgttcgtctgcgcaaattaactcctgatgctaacagcgcaaagattggcgacaatatggcgctgctgagttataccgaagttatcgacgcgaagctgcgttatccaaacacggctttgctatatatcgagtttgattcgagtcagtttaacggctccattccacagatttcatgtgagccccgtggtcgggttattcgtgtccctgatacctatgatcctgaaacccgctcttataccggcacctggacgggctcgtttaaatgggcatggactgacaaccccgcatggattttttacgatctggtggttagcgaccgctttggtcttggcaatcggctgactgctgccaatatcgataaatggatgctgtaccaggttgcgcaatactgcgaccagcttgttcctgatggtaagggcggtgatggcctggagccgcgttatatctgtaacgtatacattcaggatcgcaatgctgcctatacggtgctgcgcgattttgccgccatattccgtggaatgacatgctggaacggtcaacagattatcgcgctggcggatatgccgcgcgatatcgatttcacctatacccgcgccaacgtcattgatggcaaattccgttattccagcagtaccagtaaaacccgctataccaatgctcttgtatcgtggtcagatccggccaacgccttttctgatgcaatggagccgtcatttgtaaaagagcttgtcgcgcgctacggatttaatcagctcgagctaacggcgatcggttgcactcgacaatcagaggctcacaggaaagggttgtgggggatcctaaccaataacaaagatcgcatggtgacgtttgatgtcggcctggatggtaaaattcctcagcctggttacgttatcggcgtagccgatgaaatgctggccgggaaagtcaacggcggccgcatcagtaaagtagacgggcgggttatcatcctggacagggatattgatgctaatgccggagatcgcctgcaggttaacctgccttccggtacttcccagagccggactattcagtcaataaatggccgccggcaggtgactgttaccacggcattcagcgagactcccgaggccgaatcagtatgggctattgagtctgatgatcttttcctgcagcagtatcgtgtagttggcgttaaggataacaacaacgggacttacacgattacaggtacgtcgcatgatccggacaaatacgcgcgcatcgatacgggcgccataattgatcagcgtccggtaagtgttgttcctccgggtaatcaggcgccgccggatggcatcctcctgacgtccttctccgtggtgaatcaggggatcagcgtcgaaaccctgcaggccaattgggacgcggtacaaaacgctatcgcctatgaggctcagtggcgccgcaatgacggcaactggattaacgtgccgcgcagctcgaccacgtcatttgaggtcagcggcatttatgccggccgttatctggttcgcgtccgtgcgatcaatgcggcggaaatttccagtggctgggcgtattcggaagagaaaacgctgaccgggaaagtcggtgagccgctgccgccgctggcgctgacgaccgtttcactgaccgcgggtatcgagattcgctgggaattccctgaaggtgcagaggacacccagcgaaccgaactgcagtacagcccggaccagagcgggaacggtgcgatgccgctaaccgatttagcgtatccgggcaaacagtatcagcagatgggcctgcagattgccacgcagttctggtaccgcgcgcgcctggttgaccgcctgggcaatgcctcgccgtggaccggctgggtgcatggaatgtccagcgataacgtttctgattattaccagcagctcgacgatgcgcttaaaggctcggatacatacgaggaactgaacaaaggtatccaggacaacagcgctgccgccgacgccgcgcagcaggctgcggacgccgctcaggtaaccgctgaccaggcggcgaaggatgtcgccgcgcagggcaaagaactggctgccaatatcgccaaaaccaacgacacgaccaacaaactggcgcaggaggtgaaggaccgcgctgccggtgatgccgccacggcgcagaaagcggccagcgataccgctgccgcagtggcgaaagccgaaacggatgatgccgccctggcgaagcaggccgccgataacctgttgagtgccaaacgcgaagttgaagcggcgattgagacgacgaacgtcaccatgcaggacggttttgatagcctggctcagcaggtcgcgtcgatttcagctggtacaggcgaacagttcgacagcctcaaaatctggtatttcgacaaggacaacgaggggtggagttctgacgacggcggcactaaaccgctcccgacaaccgacgacgggtggctccttcctgcggattccatttcgaccatgcgcagcccgtcgggcgctggcacgctgattgacggcagcgcctataagtacatccgcctgcgcatcaagaaagtcggcaacccggcctggggcggtcggctttactggattggtgctgatgaaaccggctggaccgagggacgccgcctggtgctgccagcaccggattttgacccggccactggcatcagcactatcgcgatcccggatatcccgtggcaggcctccggcaccatccgtcgcctgcgtctcgacttctcacagggtggagcggctgacgcagataactattatgccgttgactggctggccgttgggcgcccgacccctggtgcatcgcaggcgcagattcaggacctgaaaacggcaatgactgctgccgattccgctgaggcgctggcgcgtaaccaactggcggtgcagctgcgcggcaatgaggaaggcacagacccgaataaactggtttctggcctgattttcgaagagcggaaaatccgcgtgacggcggagaaggccatcggctcccgcgttgatacgttgcgcgtcgattatgataaatccacggcagcggcgacccagcgcatggatacgctggcgagcgacctgcagtcgacagcctcgaaaacggatcaggttgccgcggaccttgtttcagcgaacggcgtcatttctggccatacgctggccatccagaaaatcgagggtgacgtccagaccatcgacggcaaagttcaggccaacgccagccagattgccggggtggaatcgaaggtcgataacatccgaatcggcggcgtaaacctgatacccaactccggggaactgaccggcaaatcgccatcagcaaccgaacgttaccggggtaacgcggttcgcatcctgacgcgtgccgccggagcgactgatttcgtcgtcctcgactacacgctggccgcgccggttgacggtaccgagtatgttctttcgttctacgcgaaagcgaaagcggacaagacgccggttcgttgtttcctgaatacgccggatgccactatccgcgctgaaaccagccagggcgttattgtggaccgcccagccgggtataacggcgatgtgaccgtgacgctctccacgtcctggagccgctattgggttaaatacaaacgcaagcctggcttgtccgggacggcgtatctcgttgtggcccgactcgacggcgcagctgcagcgcgcgaagcgtggatcagctctccgatgtttgaatccggcaacattgtgagcgactggagccaggcaccggcagacagcgccagctcggatgccgtccagcaactgacgacccgcgtcacgactgccgagaatacgctggccaccacggcgcagcagacgacggcgctcaagtcacagattacgaccggcaacctcctgctgaatggcgacctcattaataaagcggataactggcagctgtccggcaccggcgcgggtgctccggtctatgacgctgtgatgaaaggcctcaccacgaccgagccggcgatgcggatcgccaacggaacaaaaatcccggtcgaagccggtcaggtactgacgctcaccttcggattcaaaacggacgacgcgacgatcagcatcgggacccagaattttacgatgggcctgattgagaattgggggaatccgaccacctggcttgctcaggacaacaactggtttgcaggcatcaccactggctaccagacccgcacgctgacgttcacgatcccgaatgacttcaaagggaaatggtgttatctgcgcatggcctgcggaggatggacgccgtcgaccgctcgcgtttacctgcagggcttcatgctgaccgcctcaaacggtatcgccggtaaagccgatgcatcagcggtgcaggacctgcagtcgcaggtcacgaagaacggtaaagacatcgccaccaacgccagcgcgatcaccagcctggatgggcgtattgatgccaccaatgccgaggtggcgaagaaagctaccaccaccgcgctggatagcctgaaggccaccgtcacgcagcagggcaaggatattaccgcgcaggcggagcggacgacggcgttaaccaataccgttaaccagaataagcagaatgctgattctgctattgcagcgaacggccaggcgatttctggtttatcgcaaactgtttcgcagcagggcgaccgaattaccagtcagggccagcagattacgcaggtcagcaataaagtcgacacggtgaatactgacctcggcaagcggattgaccagaaggccgataacaagacagtacaggacctcagcgccaccgtgacccaacagggcaaggatattacggcggcgaaccaggccatcaccagcctgaaagggcgtgtttcaacggttgaggaagggttggccaaagcggccaccgctgatgccgtgagtaagctggatacgcgcgttaccagtgctgaggggaaaattgaatcgcagggaacggcgatcaccgggattaacgttgcgctgaactcgcagacggcagccggcggcgactacatcctgaacccgacatttgatcccgcatacccgtcgatgggctttacccgtcgcgatacggtggacaacaacgacgacgacagcatcccatacgatgccgatatcccggcaggcgcaccgcgccgctacgtagcgcgactggcctcacgcgatcaccagctcaatacgccatcgtggccggtaaaagcggggcaggtattcgagatttcggtatgggtagcggcaaaggcgggttccgtcgccgcgtttaacatgtatatcggctcggctacggggccgaatacgggggccgtggcctatgctgcgttaccgggtagcgttgcgcccacccagacctggacggagaaaaaataccgctggacggtcccggctaacttcccgcgcggatatatgcgcccgttcctgcaggtgaaccagaatgcgccgtttggctccgtctggtatgcaactgatttccactgccgggagattaccgctgcgcagggcgcacagactgccgccgacgctgccgctggtgccgtgacccagctggatgcgaaagtgacgcagcagggcaacaccatcaccagccagggccaggctatcacagccattacaggtcgtgtgtccaaccttgagtccgggcagagcgcgaacagcagtgcaattcagtccctgacgcaacgaaccacggcagcggaagggaaaattgaaacgaacagccaggcgattacctccgtcaccggcacggtgaatgcgatgctcaatcgcggcgagaacctggcaaacgattttaattttatgagcggatcggcgctttggggtgtccaggggaatacgcgtaacaaggtggagtttggcgactttggcgatggtaaacccggcgtccagatgatgcagatcgacagctcgttgtataccggcctctttgctaaccagaaagcgccgctgccacacaataccccacgccgctaccaggtcatcgttaaggcgaagggcgtatccggcgcgatgaatttcatggttcgccggtttaactaccaggggaatgtggccgggacctatgaaaaccgccagttctccgccacggatacctgggcgacgtacaccgctgagtttagcgcgccatcgtcgtcgacagtggatggttctgtttttgctctctactgttacccgaacgcggcggttattcagattgactacatcgccatctatgacatcaccgatgcggtggccatcgatgcgaatacgtctgcggtcacgcaactgcagcagacggtcacgcagcagggcaaggatattgctgcgaatgccagcgccacgacagccgtttctgcaagcctgaaggcagcaatggcggacgcggataataaaatcgcgggtaaccttgtgccaaacgccggttttgagcgcgacttcgacaactggaccgctccggcacccgcgacgattatgcaggcacaaaacccgcatagcggaagcaagatcgttaagtacgccgcagccacttcagcaaccttactgctgagcaatatctctattgctgccgttaagggaaaaacttataagtttggcgcgtggctgcgtgcgaaggcaggctcatccatgccgtctggtgcacaggcaaataacaaggtccgtttcgcttatgccgataactcagggattttcgaggcgccgtttaacccggctacaattccgaccgtctggacggagtacagcaacacgtacaccgccacaaaagacggcgcaatgacgatcagcgtcaacgcgtttttgaatgcaggcgaaatttatctcgacgatgtgtacgtcatcgatatcactgaccgtgtcgatcttgatgccaatgcaggcgcaataactaacctgcagtctaccgtcacacaacaaggtaaggatattaccgcccaagcgaagcgtctcgatgacctgaaggcgaacgttgacggctacgacgcgcgcatcactaatcaggacgagacaattgcccagaacggcctcgcaatggctaatggtttccgacagctgcaatcaagcatcggtgataacagcgcggcaatcataacgacgagtaaaaccgttaccgacctggaaaaatcaaccacggagcagatgaccacactgaagtctcaggtcggggatatgtctgcgactgttcagcagacggcatccaccgtggcggatttaaacgggaaattgggagcgcagtggggcgtgaaggtcaacacgtcttccggcggtaagaactacgtagcgggtcttcagctggggattgacggcagcggccagtcacagttcctggtgcaggctgaccagttcggcatttatgtgcctaacggcgataaaagcaatctggccttcggtgtcgacgggaacggcgcttatatgcagcaggcgatggcccgtaacctggtcatcgacttcgcgcagatctccgacaacatccgttcgacaaactaccagccaggcgtagctggcgcagggtggagtatctcgaagaacggcggggcggagttcaacaacattaccgctcgtggccgcatcttcgcgactgatggtgaatttaacggcgtagttcgggcgcgcgacgggtccttccggggcaccattgacgccactgacgggacattcagaggaactgtgcaggcgcgccagtttatcggtgatatttgttcagctggcgcatttaaggaaggcgttcgccctgatcttactcactatgattctggtgatggcggttctaaaacgtacattgtattcatgacggttgccgcagatgttaacgcagtgggcagaattaaagtctacattaaggggcaaaaggtcgctgaatacgcagtgacatcagcggccagtaactcatctacacgatacatcccagtgatcggagtcctgagcggagttaccgatcgaaatgtacgctgtgaagtggtcattgacggcagcggaatttttaactacatgggcggctattgcatgatgacgcgctctactggttcatggtcttaa

SEQ ID NO: 97717 - DNA, 318 bp, Enterobacter aerogenes
atgagcattgaacaagaaattattgattatatatatactcatcatagccataagagatactgtttttttggcgaacgtccagaagtcacgttagatactgaattaacaaagggggggcttaatatcatctgggaagatgcagaagatactttagattactatttcaaacaatggaatgtaaaaatgaatggcttcgaaattatctattactttgaacctgagtttttaggttccatgcctccagagaagccgcttaaaccgctaacagtacaaatgttggttgagtccgcaaaagcaggtgaatggttgtacgattaa

SEQ ID NO: 97718 - DNA, 1140 bp, Enterobacter aerogenes; identical to SEQ ID NO: 88921

SEQ ID NO: 97719 - DNA, 510 bp, Enterobacter aerogenes
atgaaaaaaatcgcattccttatttctgggttgctctgctcaggcttcagccatgccagcgcactctatttttatgaaatcggcaccgaagacgtcggcctggcaggcgcaggtcaggccgcccgcgcgcaggacgcctccaccatcgtcaccaacccagccggcatgacccggcttcctgaccatatgtttaccggcggcgcgcaggtcatgggcggcgatatcccgtatcagatgaataacgaacacggcggtaatagccctggtaacgtgatgaatctgtttcctaacgccagcggcttttacgcacagaaaattaacgatgatttatatgccgggattggcttgtacggcaactacggtttaggcatcgattttggcaactgggccggcgatcgtcttatcaagaaaagcaccatggtggcgatgacgctgagcccgtcgctggcgtggaaacttaacgatcgtctctctgtcggcgcatccgccaacctgaactatggttattaa

SEQ ID NO: 97720 - DNA, 618 bp, Enterobacter aerogenes
atgcaaaaagctcacaaacatttgaccaaaatagttacaatttctctgtcattagcgtttgcagtgcttgttgttcatggtgtccttacatcacctccgaaccatgacacagaagctccagatgttaaagcaacggtaactcaagtacctctaaaaccagcagaaccggaaatggtcaacgttattaatcggatacatactcctgaagaggtttacaggcgtttccaagacaacgaattcagggctaccaatcacttcagaacttgccgattaatggtcacaggtagggtaaagaacattggaacagccacctttaccaaagatccattggtcactatagctatccctggctcagacgaagggatgaagtttatctttgagaacacctcaagtaactggaatgaagttgcggcattggaaattgatgacattttgaccatatcgggaatggatacccggaaaggccagtttggaggcttgtttctttcaaatgcagaaataatgaacactttgcattctagaaacagtagagagatgatggttgaacgtaatggtttctacgaccgtattttatgtgagaagagagcaatccaagcagatataagtgactataattaa

SEQ ID NO: 97721 - DNA, 540 bp, Enterobacter aerogenes
atgaaagataaagaaatttttatttctgtagatattgaatcatcggggccaattcctggagagtatagccttctatcaattggtgcctgcttgctttccgacccaaaggaatcgttttatacagaattaaggcccgacagccaaaagcatgatccagaagctgtagccattacgggtcttgatctagcatctcttaccctgtctggcttaccaccgctcgaagcgatggagcaatttaattcatggatcaattccgtgtccaaaccaaagcaacgaaccatttttgttggttttaatgccccatttgattggtcgttcatcaactattatttccataaatatctaggttttaacccatttggatttaccgcaattgatataaaagcatactatatgggacttaataagtgctcttgggaagacacgaaatcatccaaaatagttgaaaaactacgtccccatcttcgaaacaatcacaacgcattagaagatgctaaatttcaggcagaactattttcattaatgcttgttactgattga

SEQ ID NO: 97722 - DNA, 1104 bp, Enterobacter aerogenes
atgcatatgagcagttactggaagcatcaattttctaagatattggattatctgacacgccaaaaaaagccagctgttgtattgatgactgttgggggaaccatcctcggagggcagaaagtactcaactttgttgttaccggcaagtttagttggggttcactcacagtaggtacaaacgacgggaatttcatcagtgattacatcgtacccattgttgcgattatacttattgtcatgggtggtatactgatggtcttaaatgagtacttagcatttaaacagaactcacataagcgtattatcctggtggcagggaatggtctacgaacgacatctgaaacagggttggataagaaggttacttccatactgaaaggtaccatctatccagttgatattgatataactcagcaattcagagatgggtatgtctttgagcccgaactgactttcataagaaaaatattgccctctaaggataatctggcccaactccttgccaagggcagcgctgaaagtatacaggttggctacggtggttttttacccgtaccttttaccttttttataggtaatgtgcttgatgataaaagtaatgtgagtgtgtttgattgggatcgtgagaacgaacgctgggagcatatctcagagaagcacatcgacgacggcgagagtttcattagtgaaacaattcgtaccggagaattggacgaaatcgtacttgttgtttcatgttcatacagggtaaaaatgctacaagttggtgagtgttttaaaggacttggcattgaacatttgacactggaaaccattgcatttgataatcattggtcattggtaaaacaacgccgtctttcaattcagtttgcagagaagattaaatcgctttcagatatggggatcaggacgattcacttgatactggcagcacagagcagtgtagtattgaatttggggcgacgatatgatagtagaaacatgtcagagcttattgtttatcagtatgagcaaaccaataagaacccttatccatggggaatttatgcactttctcatgggcatgaaaatggtggtttcattacacgtagcgaagaacagtag

SEQ ID NO: 97723 - DNA, 486 bp, Enterobacter aerogenes
atgaatgtctttttgcctaatcggcgccttacgcttgctgaacagtatcacgggcttcgcgcccgtttccctaactcacgttgctacttaactggaaataataaaaaactggtctgggagggaaaactttcgccaggaccgtacagtcggtcgtatcttgtccggattgaatacgctcctccagaaactcccgattgctatgttatttccccaaatcttaaagaactggccaagagcaagaggatcccccacacatacgcgactgactcggaatcaaataaaacacaactatgtctttttttgccaaaacagaggcatccagaaaagtatgctgaatggcgtcctcagctccagttatccgacaccatcctcccgtgggcatcactatggctgttttattttgaacagtggctattttccggaaaatgggaaggtggcggggcgcatccgaatgaagatgatgcaggtatctactatgaagattaa

SEQ ID NO: 97724 - DNA, 1281 bp, Enterobacter aerogenes
atgagcaattcagtatcagttctagctttgagtacagagcaaaagcagtatgtaggtgatttcctggattgcatagtaggaagcctagacttatcagaaacacagtacagcttaatcaagagggcctatgaatcggtgggggcttatcttgctgggggagacgatcctatcctcgttggagcggagatttattctcaagggagtgttagattaaacactactgttaagcctaaaggaagcgaacagtatgacgtagatctgctttgttatctgccaaacgcaagtgttgcatccggttgggctgaagttcttgaagccgtgcgtgcacgacttgcaagtcatggtacctatagcgaaatgcttacccctttgccaagagggcaccgcattatgtacgctggcgaataccatctggacatcacacctggaattgacttgggttataactcttcagagcacaaccatcctctcttggttcctgattcgcgtctccaggattggaaggaatcaaaccctgcaggttatgcgacatggtttgataacattacagagaaattaccgatatttgtaaggcttgaggttgcgtctgaaagcttcatcaaatcagcggcagtcaggccattacccgatcatacccgtaagaaacttctgaaccgaatcgtgcaaattttcaaacggcatcgggatgtatgggctgctgaaggtgggaaagagcggattgatttaaaacccatctccgccatcattactacgctcgcggggcatgcctatagcaaaatttgtgatgaaggcaggagctattccactgactttgatgtactgctggatgtccttgagctgatgcctgactacatcagatacagttacggtctgtattttgtgcctaatccgagcatgccagaagagaactttgctgaaaaatggaacgttgaagagtccagaaaaggagaaaaactcagaaaaaattttgagttatggcataaaacgatcactgagaacattatagaaattgcatcatctgttggagaagatcaacttcttgataatcttagtaaatacttcggagaaagacctgtcaaagcagttcgtgaagctatggttggaggtgttaacgcggcacgtgatagcaatgatttgcgtgttttagcccttacaggagcgcttagcgcgggtgcagcaaatgtgcctgcaatggcacggacagtcccagagaatacattttacggtgggaatgctctttcttctgcccctgtgaaaaagaatacattttttggggactaa

SEQ ID NO: 97725 - DNA, 780 bp, Enterobacter aerogenes
atggatattaatgagttccctccgggagtaatcgaacatcttggttggtatgtatatcgactgattgatcctcgagatggaagtactttttacgtgggtaaggggaaaggtaatcgcgtttttgctcatatgcgcggtgaagtggctgccgctgatgatgatgaactactcagtaacaaactcaagcaacttcgtgagattagattagctggtctggaggtcatccatgttatccatcggcatggtattgccgatgaaaagactgcttacgaggttgaggctgctctaatcgatgcttatcctggtttaaccaacatcatgaatggtgctggcagtaacgagtatggtgctgcacatatcaaagaattaatcgcaacctaccagcctgagactgtcgagtttaagcacaaagctctgatgatatctgttaacagaagttcaaaagatgttgatctctatgatgcagtgcgcttcagttggcgtgtaagcctcgaacgcgcaagcaaagctgaagttatcctagctacagtaaaaggaattgtcaggggggtatatatagctgatgagtggttaaaatcaacccgtgataactttcctgaaatgcgccaatgggatgaagatgatgagtttgaagctactcaaagttcacgctttggttttcggggacgtgcggcatctcctgaagttatacagctttatcttggtaagaagatccctgatgacctcagaaagaaagggtcaatgtctcctgtgaagtattctccgaattttgattcctga

SEQ ID NO: 97726 - DNA, 552 bp, Enterobacter aerogenes
atgtcaactatcggatatgttcgtgtaagtacagatgagcagacgacagagaatcaacaacagcagatagccgaacgctaccatattgacaaatggtttatcgatgaagccaccagtggcacgacaaaagccatagggcgtgatggatggtcatcactgatgaattatgttcgtgaaggagatacagttgtatgtgtcgctgtagatcgtattggacgaaacacaatcgatctattacaaacagtcgaagcattaaaagaaaaaggagtcagtgttgtcagcatgcgtgaaggcttcgatctaagcactcctgctggggaagccatgcttaccatcatggcagcattggcaaaaatggaactgtctgtattagatgagcgcaggaaggcaggaattaaacgcgctaaatctcatgggatccattgcggtaggcctgccaaggcgacgactgaagacatactgttactgattgcacaaggtaagagccgtagagagattgaaaaggaacttgggattagcaaggcaacatacttccgtctcaaaaaattttag

SEQ ID NO: 97727 - DNA, 888 bp, Enterobacter aerogenes
atgagtgagccaatggtcctccgtttccagaggatggcacttgataacgaaacatctacgtcagatttactcaggatggctaaagctattgcagtaaagcttcaattgacagatgtaattgaatggatcgattttgagcttgatgggtatcctgcgggagtgaccgtacctgactatcgcatcacgaggggaaggatcttagggcataacccgataaatggactcattccgatgttggtaagtaatcaacaggatgaggatatgttgagtactgtacatattagagcgccaatcactgaactcgctttggcgtatgataaccccggctctacaatggtttttcctttgtcaactgagttttcaaatcaactacagagtaatcagcctgattttttgcgatttccaattgtaagacggatcacacaaagtaaaatgttgaatgtagtggaacatattcgtaatcgccttctcagctggtcgctggaattagaacagcaaggtatacttggtgagaatctacaattttcacagcaagacaaggttagagcacctatgacaactaataattttcactttaatggcaatatcaacaatgcgggtgtgattggcgcagaaaaccacggctttaatcagcataatgtgcaacagattactactggcaattttgactctttgaagtcatatctagagtctctgggctttacggcagaagatgtattggatctaaaattagttttggatagcgaacctacaccaagagaaactggaaaattcctgcctaaagtttatgattggctaggcaaagctggagaacgagtatttaatgctagccttgataaggtagctcctttagctattgaagcaattactaaatatcttggaaattga

SEQ ID NO: 97728 - DNA, 1392 bp, Enterobacter aerogenes
atgaaccttaaaccacgcaactttgatgaagtcattgaaaatgtattagttgataaaggtgtttgcacctctgatatattgaataaatattcaaaaaaagagaaatcttattactttaatcagtttctgatcggagccaccaacaggagaaagcatcccaaagatgagtacgctttcttactttattcctctgagagacgaaaacatataccgagagcttcgagatttgatgacatgataaaagatattcctttaatcaaaaaaagttgtaattactgggcagataattggcctaacggctatagagtaactagtgctggatataacattttttcggcatgttgcaaggctgttcctagtaaatgcggcctctataacgaaggaaaaccatacaacccacctcggaatggcatccgctcccaattaaaaaatagcaataaatgtagtatagaagtcaaggtccctaaagaaattcttcttaatgagttatctctcaggcgatacctgaagagcctccaacagagtgacaaccatagaaatatgattagtcaaattgaatacctgttaacgcttgcgaaagcgagtaaaagtggtttattaccgataacatacgtgcaaagtaatgggggacgtttatatgcagaaggctctgtaaatcttcaaaattgtaagagagagattcgtaaagcttcattggctggcatgtttgatgtggatatcgagaattgtcactacaacttactggaacagatgtgcgctcggatcggtataaaaacgccgcgtattagccattatgtccgtaacaaaaaacaggtccgtaaagaagtagccactacgttacaatgcacagaagaacaagcgaaggtagttttgattgcccttatttatggcgccaacctagggcctcgtggggtactaaaaaagctggacattgataccagtgatgaggctatcaaagatacctggattagcaaactagctgaggaagtcaccaatgtgagacgttatgtgattgaggattatacagcgcggactagaggctgttacaaaatcaaaaacgacgctgggatgattgttaagaccataacagaaaacggagaatcggttaagaaatcaaaattattagctcatcttctccacggtgcagaatcactgatacttcagcacatgattagctttcttggtgataatgttgtcttgcttcagcatgatggtgtcacatgccccaatcctgtagatacagatgaactcagtgactatatcgcagagaaaacaggctatcgtgttcaatttgatattgagcaactgaaactagacctcaatgtcgatgccactgatcgatttcaacaacaagacctggaagacatttttgaagatgaaatggctgcgtga

SEQ ID NO: 97729 - DNA, 1764 bp, Enterobacter aerogenes
atgcctcaactttacagctatatccgttggtcctcggaacggcagcaaaaagggacgaccagacaacgccaggtcatcggtgcgaaggagtttgctatagctaatgggttagaacttgttgaaattgaagatcctggtgttagtgcctttcgtggtaagaacaccacccacggtaaactgggggatttcattgatgctgtgaggcagggagctataccaccggattcgtggctatatgttgaaaacttagatcgactcactagacaagaagttaccacagctcagaagctgtttattgaattgctggatttggggttaacgttggttacagggatggataaacgggtttatacccttgagtctgtgaacaaaaatccaactgatttgatgatttcgcttttactgtttagtcgagcaaatgaagagagtaaaaccaagcaagctcgcacgataggtaatgttgaatcgttgatcgaacgtcatcgccaaggattgccggtgaacattaaatcatgtggtaaacacccattttggatagatgattctggttcacagtatgaatccgttaagcgtcatgcaatttattgggagatagcacgagaagcgattgaattgtttttatcaggatatggtatttacaaagtgaagcgctttcttgatgaaaagtatcctaacggcttgaatggtaaagaatggggctatcaagtactcaaaaagatgcgtgagagtagagccctcattggagaaaggcaaattaacataggctcacatacatatacattacgtgattactatccctgtctatgtaaaaacgaggttgaattcctgcatttacaagagttaaagggacaaaacagctacaaatcgaagaaaaaccccttaaaggaacaaatcaagttattatccggtctggcaatccttagatgtagtaagtgtggtgggactatgtctagtttcatgaataaaggtaaaccaagatatatctgtcttaatggtcgacatttacaaaaaggttgtgttggttggtcgcttactgctcccttagttgatcattgtgtcattattgccttacttatgggctatatggatgcaaaccgtaaggaaaggcaagatacatcagatatttccgcattgattgaagcgaaaaatacgagcgttggagaattgaatgtaagtattacgaaccttgttgcggttattgaagctggtgtgaatgtatctgagctagcaagtaggttaaaggttctatcaacagagcgtgagacatttctgaaagaaattgagcgattaaaggaacgaaaagcattaattgatagcaaaggatcgtttgaagtatcaatgatggatttcattaatctgatacattggaatgtattctcagactatgcacatgaatcacgtgataagattcgctcgacaatcaataaaattattgaacatgtaattattgataaaactgatggctgtataacaatcaagattaaatgtcgtggttcagatgaacaattgattttttgtggtattgggcgcaaacctcactggaagtttgatattgcgttatatgttgaacaagacactgatggagatacaaccttcgaagaaaaatctattttgccaatggcaaaccagttgatggaagaggctacaaagcagtttgcattgataagagaaggctacattagctactttgacaaaatatgtaaaattttagctgcaattggttatccaaatattgatggttcagccttctggcctaatagatag

SEQ ID NO: 97730 - DNA, 1257 bp, Enterobacter aerogenes
atgccaaaactaacagacatgcagatccgtgcatggattaagaacggggaacgattcgaggggcgagcagacggcgacggcctatatctgaggtaccgtaaagaggataaaactcctttttggcgctatcggtataagctggcggggaagtcccgcacgatgatgatcggctcttattctgatttctcacttgctaaagccagagaggtagctaaagagctatccgcacgggtagctcttgggtatgacgtagccgcagaaaagcaggagcgcaaagccgaggcaatagcgaagatagaagcagagaagaacgccattcacgtttcagagcttgccgcggaatattatgcccgccagatagaaaccacctacaaacaccctgagcttttccgcagtagtctgcaaaagaatatcgtcgcgctcattggccgaatgaaggttgaggacgttcgaccacgccatgttgatgccgtcctgcaggatgttttagagcgtggctctcccacggtggctaatgatgttcttagaatgctcaagcggctctttgattatgccgtggtgcgcggaatgattgaggttaatccagcgatatcctttggttcaaaagatgccggagggaaggagctggggcgtaaaagagcgttaagccgtgatgaactaattatgttcttcaaagcgctacgtcgtggcagaggtatcagccgagagaatgagctcacatttaaaatcattctggcgctgggtgttcgaaagatggaactatgcgccgccgaatggtctgagttcgaccttgataacgaagtgtggcatttacccggttcgcgggcgaagaacggcgatgatattgatatcccacttccgcagccggtgatcgaatggattaaagagatacgactttttgccggcgatagtcgctggttaattccggccagacgagccagaacaacggcgcacgttagccgggccacgttgaatatggttatgccgtccgtactgaaagaaatggtagacgttgagccgttcagtatccatgacctgaggcgaaccatgcgcacccagatggccgcgataggcattgaccccgtgatagccgagcgttgccttaatcacaaaataccgggcatagagggtatttataaccggcaccagtattttgatgagcggaaagcagcgttggcacaatgggctgatttgctcgtgtctctggagcacggaaaagaatacaatgttctttatataaggggaggtaagtcgtga

SEQ ID NO: 97731 - DNA, 942 bp, Enterobacter aerogenes
gtgaataaaactatttggcagcaagagaaattgccaccactagagttttgtaatattaaacgagcctctgaaatattgaagtgcaccgttgatgatttaatgcatttgggtgctattggtgcgattgagctttgtataatgtttgataacattccttcatctttgcttgtaaggggattctcggcagaatgggagggagacaaaaaaaagattctcagtgcatttaactccatagagggtaaaacaaaagactatcttttttttgataaaacggactttttttctaaattcaaaatagaaaaagaaaacattactacattcagtttcaatgcaggccgcagtgagatggccgtcttattgttagggatggcccatggtttgtgggcgttgacttatcaagatataaatatattgaaagtaaagcaaaagcacgttattaagactctatatcctgaaagacatttgtcttttcaagataataatgaattatattgcgtgttatatggaaaagatctttttcattccgaatggaataatagggtggcttacggatttgaaagtgtaaatgttaatgtaaatgacttgattatatctcgcaggacaattgataaaatttacgaaactatgattaaaggttcgcaattacctagttttgttaatggtgggttgagcgggtcatatttaaacaacgctcatgcaagaggtgaaattaaactaacgggattatttgaagatgtttttcaagagaatataaacttagaagatagtttactggttactggcttgatgctaaacgctatgaaaaaagctgatacaccttccaaaagatggactcaggatgctctaaagaatgagattcttgataaagataaaagaatgagtgcgagattattggattcgtatttttcacttgcaaataaatcatttaaatcagatagttag

SEQ ID NO: 97732 - DNA, 579 bp, Enterobacter aerogenes
atgaatattaataaacgctttgacgggcggggcttcgtgcaacctgaaaccagtataattcctactatgagcagccttcagatggttgaatatattaatgctgatcgtcaatcaaaagctgaagttgcaggcctaccgtttccatgcaagaagtatcgtaaacttcgccacgataacttcatgaataaagttcctaaggttctgggagagcttcaatctcctaaatttttaggagattaccttgatgataagggccgaactcaaccctgctacaactttcctaaacgtgaagcatgtttgatggccatgagctacagctatgaactgcaggccgaggtctatgactacatggaggagttggatcaccagagagggggttatttgggccactcgattggtgagttacagggcattgtcgcagctgcacgtcagcaatccgatgaggattccagcgatgccggccgtcgcctcaggaagaggaaggacgacttggttttgctcaaaaaagcggaatgtctggttaatagcctcagtcagttatccctgccgtttatcgaggggcaggacagtgctaagtga

SEQ ID NO: 97733 - DNA, 315 bp, Enterobacter aerogenes
atggcaacaaacaccagcaatgataagtcccggcaaatatcgattcgcataccacatgatgttttggatgagatagaggcggtaaaattaagcggcgaatcaactgccggctttttagtaacgtcagcacgtagcgaaatcgcccgcaggcagactgaaggcaacgaggaagctttactgctatcttcccttgatgcgctggcgcgtgttgaagaaatcggcatgagagccggtgaggaaatccagcagatcatcagcgttgcgcgtaacgaattacagcagcggcagcgcaagaagcccaaagaggcaaagtaa

SEQ ID NO: 97734 - DNA, 219 bp, Enterobacter aerogenes
atgtcaaatcgtaccacaccccttacggggcgggcatctatcagcccgactttattcacctggcgctttctggcgctcaatcgccacgacaaaaaggccaaaccttgccgcctgtccgttgatgctgcaactgagcgcgaagcccggagtatccttgctccgcacttcattctttcgttggccgctcgtctgccagttcatgaggtgcaaaatgcataa

SEQ ID NO: 97735 - DNA, 234 bp, Enterobacter aerogenes
atgcataaatccccgtgcgcaaaagcaatgcttcatctgatgcatgccatggcggatatcaatgccatcgcaagaaccgcgcataagttactttatgatgcagagtattccggcagtgtaattcctcattcactggccgcgataaacatgattgccgaaacagctgctgaagaagctatcgcaatactggaagccaatatcaaaaatgccacgggggataatgagcatgaataa

SEQ ID NO: 97736 - DNA, 213 bp, Enterobacter aerogenes
atgaataacatgcaggaactcaaatcaacccagagcatccgccagtacgccgcactgacagcctcactgcttgaatgtgcagtgttgcttacatcctcaagcgaccagaaaacagagcgtttcgtaccggatcttttgcgtgtggcttttgagcgggctgattctcttgccgacgcgctggaggaaatggaggtaacttatgtcaaaaaatga

SEQ ID NO: 97737 - DNA, 189 bp, Enterobacter aerogenes
atgtcaaaaaatgagccagcccgttatcagagttttaccgggcgcattctgctgactttagaaaatggccgggtagtaagtgagcgaaccatttccgccagtgagcatctggccaacctgaacgcctttattgagcttgcccgactggcagggttcaccattattccgcctgattccgtaaggggttaa

SEQ ID NO: 97738 - DNA, 345 bp, Enterobacter aerogenes
atgaaaagaaataaaaccggatgcaattccggcggctctgctcatcctgaaatccgtatcggcgaccgctggaaagacagccatgggtcaattattaccatcgtagaacatcagttaaatcgggtgatcttttaccgtgaaggttatcactccccgtgtatgtgtactcaggacaggctgcagcgtgagtttactctggtggaaaaatcccgactcactgacaaaaccgatatggcgcgggtaatggaggctcagggcgtcggaaaaatcagcatcatcaacgagatcattagtcgcgctgatacgttgcacattgattcacagaaggaagggactgcgctatga

SEQ ID NO: 97739 - DNA, 642 bp, Enterobacter aerogenes
atgaacgatgtattagctatttacggaatatcttcgctggaaaacataatttatgcagaagctacgccagaaggtatcaacatgccggtgcttaacagtgaggatacgaatcaatccttcctgatggtggactatcccacggctattcgtttgcttgatgaggggcgttatgacgacgaattcccgacagggctgcaatttgtcgccggggtgctggacggtgatcttaagcgctactacatcctgtcgaatgctcagaaagcgattatctatcgctggctggtggtattcctgttcatctctgagcagcaggataataacgggctagcgggtattaccggtgatggcgaaagcttaggccgggcggtggtttattccggtgtgcatggtgatctctacgtcaccccattaacagagcgtatttttctggccaataacgtcgaaagtgtagcgattcagaatcatggggttgaaacgggccttgatatagctgtccgcatgtatgaagggatgatggaggtatcacctgaaggatgtatgcaactgtcatcagttgggcgtgaagaactggcaagactttacgacagctttatcaaaacgctgaagactgaaggcctgccggccacaccagtgatgcattaa

SEQ ID NO: 97740 - DNA, 2139 bp, Enterobacter aerogenes
gtgaaaaatgcaccaaacgttaaaagcctgccaaaggataaatttgttgaggctgttatttttgccggggccgatgcttactctcacgcgaaaggctgggaagaaggtatggggcagaagatagccggggattccacgccgccggtttacctcgggccgaagcaactgtcagagctggcgaacctgcgcattatcgacaaggggcgacgctgcgcgcgcgtctatctggccggagatattgagtcaatcctgattaacgctattgctgaaaagctggcactggctggggtgcaggatgcgaaattgtataagggtatccctgaccgggcgccggaggactggcgcgattatttaaccagattgcgggaggatgctgaacgcggcgaaacgctggtgggtgagtaccgtggggtaggcgggaaacgcgcacctgcggatgagcttgctccgtgtgttgagtctcgcgcgggcggtctgtattgggtcacaccgaaaatcgacaggcagtctggcgaggtgatccgtccgggccagtggttgtgcggagaagtcgaagtgctgggaactggtgagggcgacggtattgattttgtgatattgcgctggaaacccaccggaaaccggccggaacgcacggaagcgatcccggcgggtgatatcggcaaccgcgaaggctgggcacgtctgagcaaccggggattgcgtgttaccgccaagccgcaactgcgggccattctcgcagaccatctcacggacagtgataccggtgaactgtggaacgttgccacgctgtcaggatggcagcacggcgtatacatcatgcctgacggtgaaatcattggtggcagtgataaacgcgtggtctttcatggacgaagtgcgacggcatccggttacaccgtatcgggtaccgcgcaaagctggcgcgaatctgtggccgcgctggtggaaggcaatgactccatgatgctgggcgttgctgctgctctggctgcaccactggtggggctggtgggcgcggatggtttcggggtgcatttctttcagcaatccagcgcaggtaaaacaacaacagcgaatattgccagtagtctttatggcaaccccgatatgctgcggctcacctggtacggtacggcgctgggtattgctaacgaagcacaggctcaccatgacgggttattggcgctggatgaggttggccagggggcagaccctaaatcagtagccacatccgcttatacgctctttaacggttcgggaaaattacagggggcgagagaaggcggaaaccgggagttaaagcgctggcgaactgttgcagtgagtaccggtgaaatggatatcgaaaccttcctgctcagtaatggcatgaagcccaaagcggggcaactggtacgcttgctaaatgtgccgctggagaaatccaccgcatttcacggtttgtcttctggtaaggctcacgctgatgcattacgcgatgcctggacaattaaccatggtgccgccggccgtgaatgggtgcgatggcttgctgaccaccagcaggaggctcaggaggccgcagtcacagcacgtgaacgctggcgtgggttaatcccggaaagctatggtgaacaggttcaccgtgttgcggaacgctttgcagtgatggaagcggcgctattactgtctggccatattactggctgggatccgcagcgctgccgggatgctattcagcataacttcaatgcatgggtgaaagagttcggtactggaaacaaagaacatcagcagattattgagcaggcggaagagtttcttaacgcttatggcatgagccggttcgccccactgaattatgacccgcgagatttaccgatcacagagctgatggggtatcgggacaacggagaacgcttcgacgaccctatgctgttttatgtactgcccgcgccgtttaaaaaacacgttgctggtggccacaataaagacgccactgcccaaattctccatgaagccggaatgctcaaaaagcccgccagtggtaaaaactggcagataagaacgccacggcttaaacatctcaacaacgccagaccgtggacgtacgttttactttttgccccggaatcagaggaaacaaaaacggagtaa

SEQ ID NO: 97741 - DNA, 165 bp, Enterobacter aerogenes
atgtatcagattatatttatcgtaataatttcaggtgctttcctgtgttactcctatgccttcgataaaaaaggattcagcctagagcctcaggctcgtgccgcggcgtggtttggctttgttgtttttggtctcgttttgcttgggcgattagttggaaattaa

SEQ ID NO: 97742 - DNA, 2475 bp, Enterobacter aerogenes
atgcgtcaggaatgtattcaggcagtacaacaggcagcgcagcgcactctgagcgctcgtgaaattcagaatattgaagaccgtatctacagaaacatgcgatcactggcgcgtaacgaccctgcgtcatggcggatgctgtccgaggccgaacgtctgcgccgggccgggcaacttgccgccgacgagttaaagcaagaggctgcgttaaagaaacgtcgtgttgcgttaactatcaccgcccgccagcgccttgattcatttattaataattacaaagggaaagacggaaagctggaggcactgaatcgcacgatagcttttcacgctgatggcaaagcaaatttcctgtctgttgaatcccgcgggaaggctacgcgagattatgcgctcagccagttgcaggaagcctttgaagctgttgaccctcgatttttcggcctgttcgaagatgaaaaaggcgttcgtgatctggtttatgaaattcgggggaaaagtacggggaatgctaaagcccgggcaggtgcaaaagcctggaaggatgttactgaattgctccgtcgtcggtttaacgatgcgggtggcgacatcgggcatctggatgactggggcatgcctcagcatcattcaatggaaaaagttggcaaggtttctaaggataagtgggtcagcgatatcattgggaaacttgaccgaaagtattacaccaaaagcgacgggcagctgatgtccgatgcggagctgacggcgtttctgggtgaggcatacgagactatcgctaccggtggtttaaataaactcagcgagacaggtttgcgtatttccggggcgagagccaaccggggaaatgcttcccggcagatccatttcaaagatggtgaggcgtaccttgaataccagcgtcagtatggcgaccgttcgttgtgggaaattatggtgcatcatctggaaagcatcagcaaagatattgcgctggtggaaacttacgggccgaacccggatcacgtattccgttctattctcgacgaagtaagggcggaaactgctgtcgcgaacccgcgacgcgccggccgggttaagcgcctggctaacagcaccgaaaatctttacaacttcatttccggcaagacgcaacctatagcgaatccgcatatcgccagatggtctgacaatatccgtaactggctggtggccagccgtcttggctccgccctgctcgcatccttctctgatctcggcactatgtatctgtcagcaaaggtcactaatctgccaatgaaccagctattccgtaaccagctggaggcgatggacccgacgaatcgtacagaactggcgcgtgctcgccgggccggactggcgatggaatcattacttggcagtgtaaaccgatgggcgatggataacatggggccgtctgtttcgcgctggtcggcaacggcggtaatgcgcgccagtggcctgactgcatggtctgatgcgcacaagcgtgcgtatggcgtcacgatgatgggcagtatcggggatgtggtgaggcgaacgccagatcttcgcagtctcgatgacaatgattttcgtattctgaaaagcaaaggcgtgaccgaacaagacttcgctatctggaagctggccgatcaggaagactgggggaacggtaacaccaccatgctgacgccagaaagtatcatgcgcattcctgatgcagcattacagcatattggcccccctgagcgtgtcagatttgaggctatgcgccgtctgctcggtgcagtgtcggaagaagttgatatggccgtgattactcccggtgcgcgtgagcagatggttaccggttcaggtattcagcgaggtacatggaaaggtgagctaacccgcagcgtgttcctgtttaagtctttcccgatctcggtggtgatgcgccattggtcacgtgcaatgggtatgccttccgctggtggtcgggccgcatacattgcaacttttattgccagcactactatcctcggcgcgttgtcacagcagttgaacgatatggcatctgggcgtaacccgcgggatatggttggagagggggcggggaaattctggcttggtgcattgcttaaaggtggcgggcttgggctgtatggtgattttctattatccgatcatacccgctatggtggcggcgctctggcgtcaatgcttggcccggtcgctggtctggttgatgatgtggttaaactggggcagggaataccgctcaacgccgtagagggcaaaccagaacaaacggggggtgatttggtgaaacttggtaaagggctaatccccggcgctaacttgtggtatgcaaaagcggctcttgatcatatgatttttaaccagttgcaggaatatttttcccctggttatcttcgtaagatggaacaacgttcccgcaaagagtttaaccaaacatactggtggcgaccacaggatccattacctaattag

SEQ ID NO: 97743 - DNA, 1809 bp, Enterobacter aerogenes
atgagttattttggattaaatcagtcgaatcaaaaccaactgtcagaaacagcggcatccagccccattggtttaaaaagtgatgtcggttttttcgataatgctgtgggtgccggtgtatcaggtttgtattcgggccttgtggccaaaccggatcagttactttgggcggggatggataaagttgtttcccctctgtcccggtttattaatgaaaatacacccgtacgggattcttctgaagaatacattgccgagcagagaaggctggcaacacagcaggttaagcgtctgactcccgatgccggtacaaccggaaccgcgggtcagattctgtttggtctatttgatatgggtggtcaggctgtcgccggtaccgcaatcgggggcccggtgggcggtgcggcggctgttacctcgcttcagggcttttctgagtttgagcgtctgaggtcggaaggcgtggatttatcaacggctcaggatgtcgcgttgattcacggtataacgaccggcgccggtacgctgatccccatgagtctcggtctgcgtgcgggtggcgcgctggcggaaggtgttggcgcgcagatatccaggacgggcgagaatgcgttactcaatgccggtgctgccgcagcgcgtgctgcacctgacgtagcgtatgctgcgggtactaaccttgcgtttggtatggcgctacgcggaatgacggcagaaacgctgcgcaacgccggttacgatgatatggccggtcagtacgatgtttttgatcgccaggcgatggcgattgatgcagtgctcggtgttgcgttcggcggtcttggccgctttgttaactcccgcggcgagaatgttcgtgcgccggagtttgccccgtctgatgtcgatgcggcgctggcggctaatgcagcccaccatgcagaaattgatgttgctcccggaataccggtcaatgttctgtcacgggatgcgcatgctcaggcattacagcaggcaatgcgcaatgtcagcgaaggtaatcccgtcgatgtggccagcattgtcgacccggcagcattcagcgagatacccgggcgccgcagcctgattgcgcagtctctggatgaggtgcttttcaatgcggagggaggaaccgcagcccgtgcggcagatacgcgccggcttgaagagctggccgcgcagttgctacctcgcggcgaacgtcaggtttaccagtctgaagtggctaacagccagcgactcatcgataacctgactgagcagcgcaatcaggtcctatccgaggaacccgcggggaacggcaaagcgctggcacgtgcgagagccgacaagcagggccgcctgcgagaccttgaccagcgaattacagaggcgcaggggcgtcttgagttttcgcgtaatacgctggcaccccatgagcccggcggacaattctatgaggcgcgcgctgaactttcccgcagacggcaggcagaaagcgaactgaatgcgcaggcgctctcatattacaaaacggccgaagtgcgtagcgctgatgaagctgcgccacccgataccgctactcatgtccgtaatagcgaccaacagcgcacacagagcgaaagcgaaatgggcgacattgatgtgaaagctgctgaggaatcgctgaccaccgcccccgacatgatgatcaccacgctggatgatgaaggtaaccctcagtctcgctctgctcgtgaattgcttgacgaggcgaatcgtgaaaatgaacaggctatacaggattccagcctttttgatgtcgcagtcgcatgtttcttaaggggataa

SEQ ID NO: 97744 - DNA, 2553 bp, Enterobacter aerogenes
atgagaatccctacaggtaactttggaaacgtcctacctcaggcgcagcccacccgagtcgatgttggtaatgccggtgccgttggggacgctgtaacccagttaggtagggacgggcttggtgtcgttgaagatatccagcagcggcaggagcaggataaccagaacgcattgcaggcactgagtaccgcaggcggagcgcaggttaataagctgctgtatgacccggaaaccggcatgacagcgacccggaaagggattaatgccgttggtgcgaccaacgacaccctgaaagaatgggacgcctggcgtgataagcaactctcgttacttccaccagcagcccgcaaacgcggtgaaatcctcctgacggcccaacgggtacagatggaacgtaccagctttgtatacgagcagggggagcgagagcgggcgttacaggaaacgtacaacgcatcgaataacgccagcgcccagagagaaagcctgtattacggcgacaaaatcagtacccagcttgaggccggttcccgcaatcagggcattgatgagtacggtaaagcgcagggatggcccgaagaaaaaatagcgttcgagaaaacgctgtggcagcagaaagcagcctctggcgcatttgatctgttcgtcagccagcagaaacaatccatgatggggccgggaggcgctctcccgactacaggtacaccagaccttagccaactggcatcggccaatatgtacgttgaaagccggggacagcagttccgcgccgatggctcgcctctggtttccggtgccggtgctgtcggcatcgcgcaggtgatggagaaaacgggcccggaagccgcaaaatacgccggggtggaatggagccgcgagcgctggcttaacgaccctcagtataatctgcagatcggcaacgcgtatttcgagcatctgggaagcaaatacggcaacaacccggttctcacggttgcggcctataatgccgggccgggaatggttgatgactggattaatggcaccaataagacaggtaagaacgaaagcctgacgaaaattggcgatccgcgaaaaggcgagatatccgatgccgggtttacatccgctattccgctgaaagaaacccgcgaacatgtacagaaagttttgggtgcagccgccagcattccaccgggcgcgacaattagttccatatcccggatgccgttctggaataaaatgtcatcgcaggatcagagcagcgccattgataagatgtcagcgctgtacgacatgcgggcatccgccggccgcgtcgcactgcaaagcaaaatgcaggatgatcttgcgcttctggaagcgggcaaaaacgtttccccgataacgccggaagcgtgggcctccaccctgcccgtacaggcgacaccggcagagcgcatgcagctggagcaaacctaccgccattatcagcaggcaatgagccttcagccagtctatcagtccatcgtacagggaacgccccagcaggggctggccgcagtgcaggcattgaagccacaagaatccgcccctgattttaagtaccagcaggagctgtacgccactgcacaggctaagctggctcaggtactgaaagcccgcgaagcggatcccggcggctggcttgtgcaaaatgacgaaacgacccaaaaagcattctcagcctattcagctaaccctgagctactgggtgattatgtgaaaaatgtcataatccaaaaacaacgctttggcattaaaagcgatgcagttttacccaaagcgcaggcggaggctttatctcaggctctgttgcagtcaacaccggaaaaccagtcaagactactggacaccattcataaaggtaccggcggtggcgcgccttacatggccacgctcaagcaaatagcgataaatgctccctctgcggcggtcgctggcgtcctgatggataagccttcgtcgttaattgctcaggaaaactggatcaatcctgatatcacgatttcaccttcgcaggcgtcaaaaactattctcgcgggttctgctgcacgaaaagggactaaagatgcaaaagggatgacgatgcctaaagaaaacgacatgcgccttgagttctccagtgctgtgcagaatgcattcgccggtgatgctcagggagccgcaatggcatatgaggtggcaaaggattactacgcgggaataatggcccagaagggagattactccggtgttctggatgatgatgtctggaagcaggccgttaatgtgtcaactggcggtgttcatgactataacggcatggggtatgttctgctgccgtggggtatgtcgccagagcagtttgataaacaggtcgatcaggcgtggcaaacacaggtcactggtgcgggaatcaaagcaccgccggggcagtatggcctgcaaagttacggtgacagccagtatctggttaagctcggtgcagggtatctgcttaaatctgatggctctccggtaatactggatctgactcagcagcgtcagcgctttatcgagggcataccgcaatga

SEQ ID NO: 97745 - DNA, 300 bp, Enterobacter aerogenes
atgcctgttgtcgtgtcttatcgttatgactggttccgtataatcgaggacatttcgcgcgagggtctgacactcagtgatattgcgaaagaactggatgtatcaaaaacagcagtaattggctggaagcaaggggctgaaccccgttactttgctggtgatgctcttatctctttgtggtgccacattaaacaaagacgcaaggaagaccttccgactcaaattctgtcgcgtaagttcattcacaactacacatcccggcggtacgcaaacactcaaaagcatgcggacaccgcatag

SEQ ID NO: 97746 - DNA, 498 bp, Enterobacter aerogenes
atgaatgaaatcaaatcagaagtttactcatgggctgctgagaccagccaggagcatgttgctattgagatctgtaaggcgtggtttgccagtggagaatgttcagagtacataaaactctatccaatgaatgatgcttacggccaggctgactggcgggccataaataacaaccggcaaaaactattccggtggtttgatgggcagtctgccagagccgtcacaagaacaaggttacttcgaaacgctattttgacggcattacccgctgaacgaagggccaaagtttccggggataatactacttacctgctgatcatcctgaccaaagaagtttccagaattatcactgcggctttattgcaagagcgtgacatgtcacaacagattaaatctctgcgtaaagtgctcgacagccttgaaagcagcataagaggcgttgacaaaacgcgcgcgcgcgcgagtacaaagagggctgaaacacgtcaactcccgtag

SEQ ID NO: 97747 - DNA, 276 bp, Enterobacter aerogenes
gtggataaacgcgatccatgtatgacgctaattactgatgaggaaatgctagaaatcacaggtgcgcaattcccttccaagcagtgccagatactaaaagatcacggtatagcttttgtgcgaagactggacggccgcccaagaacaacatggttcaatttcaaccatccactgcatagccgtcatcactctctcgaagaagagatattggaggatgaggagccagactttgatgcaatctacagagggaaaggaaaaaccaacccgaaacgctag

SEQ ID NO: 97748 - DNA, 954 bp, Enterobacter aerogenes; identical to SEQ ID NO: 78846

SEQ ID NO: 97749 - DNA, 1539 bp, Enterobacter aerogenes; identical to SEQ ID NO: 78845

SEQ ID NO: 97750 - DNA, 561 bp, Enterobacter aerogenes; identical to SEQ ID NO: 78844

SEQ ID NO: 97751 - DNA, 1017 bp, Enterobacter aerogenes; identical to SEQ ID NO: 78843

SEQ ID NO: 97752 - DNA, 1218 bp, Enterobacter aerogenes; identical to SEQ ID NO: 78842

SEQ ID NO: 97753 - DNA, 546 bp, Enterobacter aerogenes; identical to SEQ ID NO: 78841

SEQ ID NO: 97754 - DNA, 648 bp, Enterobacter aerogenes; identical to SEQ ID NO: 78840

SEQ ID NO: 97755 - DNA, 279 bp, Enterobacter aerogenes; identical to SEQ ID NO: 78839

SEQ ID NO: 97756 - DNA, 684 bp, Enterobacter aerogenes; identical to SEQ ID NO: 78838

SEQ ID NO: 97757 - DNA, 954 bp, Enterobacter aerogenes; identical to SEQ ID NO: 78837

SEQ ID NO: 97758 - DNA, 993 bp, Enterobacter aerogenes; identical to SEQ ID NO: 78836

SEQ ID NO: 97759 - DNA, 624 bp, Enterobacter aerogenes; identical to SEQ ID NO: 78835

SEQ ID NO: 97760 - DNA, 309 bp, Enterobacter aerogenes; identical to SEQ ID NO: 78834

SEQ ID NO: 97761 - DNA, 366 bp, Enterobacter aerogenes; identical to SEQ ID NO: 78833

SEQ ID NO: 97762 - DNA, 417 bp, Enterobacter aerogenes; identical to SEQ ID NO: 78832

SEQ ID NO: 97763 - DNA, 246 bp, Enterobacter aerogenes; identical to SEQ ID NO: 78831

SEQ ID NO: 97764 - DNA, 891 bp, Enterobacter aerogenes; identical to SEQ ID NO: 78830

SEQ ID NO: 97765 - DNA, 216 bp, Enterobacter aerogenes; identical to SEQ ID NO: 78829

SEQ ID NO: 97766 - DNA, 582 bp, Enterobacter aerogenes; identical to SEQ ID NO: 78828

SEQ ID NO: 97767 - DNA, 3027 bp, Enterobacter aerogenes; identical to SEQ ID NO: 78827

SEQ ID NO: 97768 - DNA, 1008 bp, Enterobacter aerogenes; identical to SEQ ID NO: 78826

SEQ ID NO: 97769 - DNA, 771 bp, Enterobacter aerogenes; identical to SEQ ID NO: 78825

SEQ ID NO: 97770 - DNA, 351 bp, Enterobacter aerogenes; identical to SEQ ID NO: 78824

SEQ ID NO: 97771 - DNA, 1752 bp, Enterobacter aerogenes; identical to SEQ ID NO: 78822

SEQ ID NO: 97772 - DNA, 498 bp, Enterobacter aerogenes; identical to SEQ ID NO: 78819

SEQ ID NO: 97773 - DNA, 1224 bp, Enterobacter aerogenes; identical to SEQ ID NO: 78818

SEQ ID NO: 97774 - DNA, 516 bp, Enterobacter aerogenes; identical to SEQ ID NO: 78817

SEQ ID NO: 97775 - DNA, 336 bp, Enterobacter aerogenes; identical to SEQ ID NO: 78816

SEQ ID NO: 97776 - DNA, 510 bp, Enterobacter aerogenes; identical to SEQ ID NO: 78815

SEQ ID NO: 97777 - DNA, 354 bp, Enterobacter aerogenes; identical to SEQ ID NO: 78814

SEQ ID NO: 97778 - DNA, 321 bp, Enterobacter aerogenes; identical to SEQ ID NO: 78813

SEQ ID NO: 97779 - DNA, 204 bp, Enterobacter aerogenes; identical to SEQ ID NO: 78812

SEQ ID NO: 97780 - DNA, 291 bp, Enterobacter aerogenes; identical to SEQ ID NO: 78811

SEQ ID NO: 97781 - DNA, 1101 bp, Enterobacter aerogenes; identical to SEQ ID NO: 78810

SEQ ID NO: 97782 - DNA, 408 bp, Enterobacter aerogenes; identical to SEQ ID NO: 78808

SEQ ID NO: 97783 - DNA, 234 bp, Enterobacter aerogenes; identical to SEQ ID NO: 78806

SEQ ID NO: 97784 - DNA, 432 bp, Enterobacter aerogenes; identical to SEQ ID NO: 78805

SEQ ID NO: 97785 - DNA, 1476 bp, Enterobacter aerogenes
atgcatagcaaaccttccagacgccctttctcactcgctctgcggctgaccttttttatcagcctgtccacgatactggcttttatcgccttcacctggtttatgctgcattctgttgaaaatcattttgccgagcaggatgtcagcgatcttcaacaaatcagcaccacactgaaccgtatactgcagtccccggtggatccggatgataaaaaaataagcaaaataaaggaatcaattgccagctaccgcaacgttgcccttttgctcctcaatcccaggggtgaagtgctctttagctcagctcagggggcggcactacgcccggcagtgaattcagcagattttagcgagcacagccgcgcacgggatgtctttctctggacggtggaggatcctgcgggaccgatggataccgggtccgaaatgaagatggaaacatacaggattatcgcctcctctggtcaggcgatatttcagggcaaacagcagaactatgtcatgctgactggcctatccattaatttccatctccattacctcgatgcgctgaaaaagaacctgattgcgattgccgtcgtgataagcctgttgattgttctgatcattcgaatcgctgtccgtcaggggcacctgccccttcgtaatgtcagcaatgccattaaaaacatcacctccgagaatcttgatgcgcgactggaaccgacacgcgttcccattgagctggagcaactggttatctcgttcaatcatatgattggaaagattgaggatgtctttacccgccaggccaatttctctgccgatatcgcgcatgagatcagaacgcccatcaccaatctggtgacgcagactgaaatcgcactgagtcaggatcgaacacagagggaacttgaggatgtcctctattccagtcttgaagagtataaccggatgaccaaaatggtcagcgatatgctgttcctggcacaggcagataataatcagctgatacctgacagggtcatgtttgacctcagagcggaagtcatgaaagtcttcgagtttttcgaagcctgggccgaagaacgcaatatcacgctcaaatttaacgggatgccctgcctggttgagggagatccacaaatgttcagaagggcgatcaataatctgttatccaatgccctgcgttataccccggagggacaggcaatcaccgtctcaataagagagcaggagagcttttttgaccttgtgattgaaaatccggggaaaccaatccctgaagagcatttatcaaggctgtttgaccgtttttatcgggtagatccgtccagacaacgaaaaggagaaggcagcggcatcggccttgcgattgtgaagtccatcgtggaagcacatcacggaagagtgcaggtggaatcggacgtacgttcaactcgttttatcctatccgtgcccagactggagaaaatgattccggaaacccagtactga

SEQ ID NO: 97786 - DNA, 681 bp, Enterobacter aerogenes
atgaaaatattgatcgtcgaagacgaaattaaaacaggtgaatatctcagcaaagggcttacagaggcagggttcgtagtggatcacgctgataatggtcttaccggatatcatctcgccatgacagccgagtatgatttagtcattctggatatcatgctacctgatgtgaacggctgggatatcatccgcatgctgcgcactgccggaaagggtatgccggtcttactgctgacagccctcggcacgatcgaacatagggtcaaaggactggaactgggtgcggacgattatctggttaaaccctttgcgtttgccgaactgctcgcccgggtgagaacccttctgaggcggggaaacacgatgatcacggaaagccagtttaaggtggctgacctctcgattgatctcgtatccagaaaagtcagtcgcgccggaaaccgcattgtgctcaccagtaaagagtttagcctgctggaattcttcattcgccatcagggagaggttcttccccgctccctgattgcctctcaggtctgggacatgaattttgacagcgacactaatgcgatcgatgtcgcagtaaagcgactccgcgctaaaatagacaacgattacgagacaaagctgatccagacagtccggggcgtgggctacatgctggaggtcccggatgcatag

SEQ ID NO: 97787 - DNA, 1386 bp, Enterobacter aerogenes
atgttcaaattaaaattactcagcatcagtaccatattcatcctggctggttgtgtttctctggcacctgaatatcagcgtccgccagctccggttccccagcagttttcattgtctaaaaacagtctgacgcctgcggtaaacagctatcaggatacgggctggcgaaacttttttgtcgatccccaggtcagcaggctgatcggtgaagccctgaataataaccgtgatttgagaatggctgccctgaaggttgaagaggcccgggcccagttcaacgtcacggatgcagatcgttatccccaactgaatgcctcatccgggatcacatacaacggtggtctgaaaggtgacaagccgaccacacaggagtacgacgcgggtctggagctcagctatgagctcgatttttttggcaaacttaagaacatgagtgaggctgatcgccagaactactttgccagcgaagaagcccgtcgtgccgtacacatcctgctggtctccaacgtttcacagagctatttcagccagcaactggcgtacgaacaactccgtattgcgcgggaaacgctgaaaaattatgaacagtcttatgcattcgttgagcaacaactggtgaccgggagtacgaacgttctggcgcttgaacaagccagggggcaaatcgaaagtacccgcgccgaaatagccaaacgagaaggcgatctggctcaggcaaacaatgccctgcaactggtgctgggaacgtaccgcgcagttccgtcagaaaaagggattaaaggtggggagatcgcaccagtaaaattgccaccaaatctgtcgtcacaaatattgctgcagcgtccggatattatggaagcggaataccagttgaaagcggctgatgccaatattggcgcagcgcgagcggcttttttcccgtccattaccctgaccagtggtctctcctcaagcagtacggagctgtccagcctctttacgtcaggaagtggaatgtggaattttattcctaaaattgaaattcctatatttaatgctggcaggaacaaagccaatctgaagctggctgaaattcgccagcaacagtccgtggttaattacgaacaaaaaattcagtcagcctttaaggatgtttccgacacgcttgcgctgcgcgacagccttagccagcaacttgagtcacagcagcgttatcttgattcacttcagataactctacagcgtgccagaggattgtatgcaagtggtgctgtcagttacatcgaagtgctggatgcagaacgttccctcttcgcgacgcagcaaaccattctcgatcttacctattcccgacaggttaacgaaattaatctgtttaccgcgctgggtggcggttgggtagagtaa

SEQ ID NO: 97788 - DNA, 3147 bp, Enterobacter aerogenes
atgattgaatggattatccggcgctctgtcgccaaccgtttcctggtcatgatgggggccctgtttctcagcatctggggtacatggacgattattaacacgccggtcgatgccttgcctgacctgtcagatgtgcaggtcattatcaaaaccagctatcccggccaggccccgcagattgtagaaaaccaggtcacctatccacttaccaccaccatgctgtccgtacctggcgcaaaaaccgtgcgtggtttttcacagttcggggattcgtatgtgtatgtcatttttgaagacggcaccgatctgtactgggcccgttcccgcgtgctggaatatctgaatcaggttcagggaaaactgcctgccggtgtgagttctgaaatcggtcctgatgccacgggtgtgggctggatttttgaatatgcccttgtcgatcgcaacggaaaacacgacctttcagaactgcgctctctgcaggactggttcctgaaatttgagctgaaaaccatcccgaacgtggctgaggtcgcttcggttggcggcgtggtgaaacagtaccagattcaggtcaatccggtaaaactgtcccagtacggtatcagcctgcccgaagtgaaacaggcacttgaatcgtctaaccaggaggccggtggctcatccgttgaaatggccgaagcggagtatatggtccgtgccagcggttatcttcagagcattgatgattttaataacatcgtcctgaaaacaggtgagaacggcgtgccggtttatctgcgggatgttgcccgcgtgcagaccgggcccgaaatgaggcgtggtattgccgagctgaacggccagggagaagtcgctggcggcgtggtgatcctgcggtcgggtaaaaatgcgcgcgacgttatcacggcagtgagggataaactggagacgctgaaggccagcctgccggaaggcgttgaaatcgtgaccacctacgatcgcagccagttaatcgaccgggcgattgataacctcagttccaaacttctggaagagtttatcgtggtggccatcgtctgtgctctgttcctgtggcacgtacgttctgccctggtggcgattatctctctgccgcttggcctgtgtatcgcctttatcgtcatgcacttccagggactgaacgccaatatcatgtcgctgggagggatagcgattgccgtcggtgcgatggtggatgccgccattgtgatgattgaaaatgcgcacaaacggcttgaggagtgggatcatcagcatccgggtgagcagattgacaacgccacccgctggaaggtgattaccgacgcctccgtggaagtgggacccgcgttgttcattagcctgctgatcatcaccctgtcctttattcctatctttaccctggaagggcaggaaggtcgtctgtttggcccgctggcattcacgaaaacgtactccatggcgggagcggccgcactggccatcatcgtcattcctattctgatgggattctggatccgggggaaaattcctgccgagacaagtaaccccctgaaccgggtgctgatcaaagcgtatcatcctttgctgctgcgggtcctccactggccaaaaacaaccctgctggttgcggccttgtccattttcacggttatctggccactgagtcaggtgggcggtgaatttctgccgaagattaacgagggcgatctgctgtatatgccgtcgaccttgcctggcgtctctccggcagaagctgcagcgctcctgcagacaacagacaagttaatcaaaagcgttcctgaagtggcttctgtatttggcaagaccggtaaagcagagaccgcaacggattccgcgccgctcgaaatggtggaaaccacgatccagctcaaacctgaggatcagtggcgtcccggcatgacaattgacaagattattgatgaactcgacaggacagtccgtttaccgggtctggcaaacctctgggtgccgcctatccgtaaccgtattgatatgctctcaaccgggatcaaaagcccgataggtatcaaagtgtccgggactgttctgtccgatatcgacgcgacggcgcagagtatcgaggcggtagccaaaaccgtgcctggcgtggtgtctgtcctggctgagcgacttgagggcgggcgctacatcgatatcgatatcaaccgggagaaagcctcccgctacgggatgacggtaggtgatgtccagctgttcgtctcttcagcaatcggaggtgctatggtgggtgagacggttgaaggggtggcccggtaccctattaacattcgctacccgcaggattaccggaacagtccgcaggcgctgaaacagatgccgatcctgaccccgatgaagcagcagatcacgctgggcgatgtcgcggatattaacgtcgtttctggaccaaccatgctgaaaaccgaaaatgcccggccagccagctggatttatgttgatgcccgcggcagggacatggtgtcggtggttaacgacattaagacggccatcagcgagaaagtgaaactgagaccgggaaccagtgtggcattctccggacagtttgaactgcttgagcatgccaacaagaaactgaagctgatggtgccgatgacggtgatgatcattttcatcctgttgtatctggcattccgccgggttgacgaagccctgctgatcctgatgagcctgccgttcgccctggttggcggaatatggttcctgtactggcagggcttccatatgtcagtggcgaccggaaccgggtttatcgccctggccggggtggcagcagagtttggcgtggtcatgctgatgtatctgcgtcatgccattgaagcgcacccggaattgtcccgtaaagagacgttcacaccggaaggtcttgatgaagccctctatcatggtgccgtactgcgtgtccggccgaaagccatgaccgtggcggtgatcattgcgggtctgctgccaatactctggggaaccggcgcaggttcagaagtcatgagccgtattgctgcgccaatgattggtgggatgatcacggctccgctgctgtccctgttcattattcctgccgcctacaaattaatctggctgcgcagacataaaaaaagcgtgtcataa

SEQ ID NO: 97789 - DNA, 441 bp, Enterobacter aerogenes
atgaaaaaagtggttctaatggccctggctctcggcctgtcactgcctgcaatggcgagtgaaaaagtcattgatatgtacaaatctgaaaactgtggctgttgttccctgtggggcaaagcgatggaaaaagacgggttcgaagtgcgaactcacgtcatgaatgatcaggcgctgtcagccctgaaagaaaagcatgctgttcctgctggactacgaagttgtcataccgcggttgtaggtaatttgatcattgaaggccatgtgcctgcggcaacgatacataaggccatgcagtctggttcgggtatatacggtctcgccacccccggtatgccagcaggaagtccgggaatggagatgggggcccgaaaagaggcttacgatgttatcgcattctcaccggagggcagtaaaaaagtcttccagcgaatcgaatag

SEQ ID NO: 97790 - DNA, 2442 bp, Enterobacter aerogenes
gtgaaaaatgacaatgcagtggaacataacaaccagactgcttctgagcagacatcatccccggacgagagtcacgcattgcataaggtgagagatcccgtgtgcgggatggtcatcctgcctgacaaggcgcacagcagcattcgataccaggaccatcagctttatttctgctccgccagctgtgagagcaaatttaaagcccatcccgatcattattttaccgaagatgccagtgaacatcaccatcaccacgaccaccatgaagtcagccctgataagataaaacagtctcaccgccaggcggagaaagagatttctgaaggtgtgtggacatgtccgatgcatccggagatacgccgtagtggtcccggaagctgtcctgtctgtggaatggcactggagccgctcgtagctacggcatccacggggacgagtgatgaacttcgcgacatgacaagacgcttctggctggggttgttgctggcgtttccggttctgatactcgaaatgggttctcatctgtttcccgctttgaggaatacagtaccgccacagtacaacacatggctgcagttacttctggcctctcctgtcgttttgtggtgtggctggccattcttcgcccgggccggaatgtcgttacgtaaccgctccctgaatatgtttacccttgttgcaatggggaccggcgtagcctgggtttacagcgtcattgcaaccgtcttcccctcctggtttcctgcatcgttcagaaacatggatggcctggtggccatttattttgaagccgcagctgttattacggtgcttgttctgctgggacaggtccttgaattgcgggcaagggaacaaacctcaggtgccattactgcgcttcttaaccttgcccccaaaaccgccaggcggctggatcaagacggtcatgaaacggatattaatgcggaagatgtcctgcctggcgataagctccgcatcagacctggagagagtattccggtcgacggtatcgtggtcgaaggcaaaacaaccgttgatgaatcgatggtgaccggggaatctatgcctgttaccaaaacggagggtgaccctgtcatcggggggaccattaatcagacaggtagtcttatcatccgtgcagagaaagtcggtgatgaaacgatgctctcacgaattgttcagatggtcgctgatgcacagcgttcgcgggcccccatccagagaatggctgacagcgtttcaggctggtttgttcctctggtgatacttatcgcggttgttgctttcatgatctggtctgtctgggggcccgagcccaggatggcgcacggtctcattgcggctgtgtcggtcctgattattgcctgtccctgcgcgctggggctggccacgccgatgtcgataatggtgggggtgggcaaaggagcccaggccggggtgttaatcaagaatgccgaagcccttgagcgtcttgaaaaagtggacacgctggttgtcgacaaaacaggcacgctcacggaaggttcgccgacggtgacagggattatcagtctcaatccgggtggggaaacatctcttttgcgtgtaacggccgcagtggaaaaaggctcgcagcatccgctgggtatggcagtagttaaagcagcacaggaaaaggggatcgcaatacccgcagtcactcatttcaatgcgccgtcgggtaaaggtgtctcaggcgatgtcgaaggtcaacgggttgttattggtaatgaactggctatgcaggaaaacagtatcgttattgataatcaaaaggccgttgcggatacgttgcggatggaaggcgctaccgttatctatgtggccacagacgggcaccttgcaggcctgatagctatctcggatcccgtgaaagcaaccacgccggatgcgcttaaagctttgcgtcaggcggggatccgcatcgttatgctcaccggggataaccagcttaccgctgaagcagtcgcacggaaactgggaatagatgaggttgaagccgggattctgccggatggcaaaaaagcagtgataacccgactgaaagcgtctggccatgtggttgcgatggccggagacggtgtgaatgatgccccggcgctggcagcggctgacgtgggtatagccatgggaacgggtacagatgtggcaattgaaagtgccggagtcacccttctcaaaggcgacttgatgatactgaacagggcccgtcatctgtcagaaatcaccatgaaaaatatccgacagaatctgttttttgcatttatctacaacgcacttggcgtgcctgtggctgcaggtctgctttatcctgtgtatggaatactgctgtcgccagttattgcggcggcggccatggctctttcctccgtcagcgtcattgtgaatgcgttgcgtctgaaaagtgtcaggctcgggaaataa

SEQ ID NO: 97791 - DNA, 198 bp, Enterobacter aerogenes
atgaaaagtaccacctatgcgcttattgctgtcgccgcgatcgcggcatttgccctcctgcgcgaacactggtcacatgtggcaggttactggccatatctgttattgctggtctgcccgctaatgcatcttttccacggccacggagggcatggagatcatcaacatcaaggaagtgaaaacgataaaaaaaattaa

SEQ ID NO: 97792 - DNA, 738 bp, Enterobacter aerogenes
atgtattctaccgatgtcgtaaaagaaaatgcctacctttcagccacccgctcggggctggaatcgaacgagatcgctactcttcagcgctccttgccttcccggtttaatctgcggcatttgaaaaaaaatgaatcattaaaactcgtactgcaaaagaaagcgggaaaatcacgtgtcgtggcctataaatttacgtccggttcatttaattacacggcgtatcgtatatcagataaaaagttctataacctttccgatacttccgggaaaggcagtctcgattatccgttaccggccacagcaagactcagttcgcctttcaatcctgcaagacttaacccggtatcgggaaaagtgagtccccataatggcattgattattccatgcccatgaacacgaaaatagtcagcgtcatcgacggaaaaatcacccgggccgaatacaacagtaccatgggatattttgttgaagtaacgggaaaagccggtgttaaaactcgctatctccacctcaataaaatactcgttactaaaggggccagggttacccggggagacgctattgcgttatccggtaacagcggacgttcatccggtcctcatctgcattacgagctggtcatcaataacaatcctgttaactcactggcgttccgggcagcggcacccgctgataacaaacttgaacagcatgcctttgcgcatgccagagactacgaacgatacctggactga

SEQ ID NO: 97793 - DNA, 450 bp, Enterobacter aerogenes
atgaatatattaatcacgaccactgcgtttacagctttattttgtggggcagcttttgctcagtccagtgatattgcccatgaagcacatcgatttgttaataatgcctcagccgtcagtcatgtgaattcctcgacgcatgaaaacttaccggacagggttaataaaaacaacacgccctcattctctgaaatgaatgaacatgaaagggccattgttgctcattcatttatgaacaacagcgcgtcctatgcgcatcagaaaatgattgaggaacataaaaaaatgctgtccggcagtgatgcaaattcaaagacctcgtcttcttcttttaacgaactgaatgccggagaaaaagccgctctcgtgcatgagcaggtcaataatgccggtgcggaagcacatcagacgcaggcaagaaagcttcgcgggctgtattcgaccaggtaa

SEQ ID NO: 97794 - DNA, 1818 bp, Enterobacter aerogenes
atgctgttgaaaacgtctcgacgaactttcctgaaggggttaaccctctctggcgtagccggaagtcttggcgtatggagtttcaatgcgcgttccagtctgagcctgccagttgccgcatccctgcagggtactcagtttgacctgaccattggtgaaacggccgtcaatatcacgggcagtgagcgtcaggccaaaacaatcaatggaggcctgccggggcccgttcttcgctggaaagaaggtgacaccattaccctgaaggtcaaaaaccgtcttaatgaacagacgtccattcactggcacggcattattcttccggccaatatggatggtgttccggggctgagttttatgggcatagagcctgatgatacctacgtttacacctttaaggttaagcagaacgggacttactggtaccacagccattccggtctgcaggaacaggagggggtatacggtgccattatcatcgatgccagggagccagaaccgtttgcttacgatcgtgagcatgtggtcatgttgtctgactggaccgatgaaaatcctcacagcctgctgaaaaaattaaaaaaacagtcggattactacaatttcaataaaccaaccgttggctcttttttccgcgacgtgaataccagggggctgtcagccaccattgccgatcggaaaatgtgggctgaaatgaaaatgaatccgactgacctcgcggatgtcagtggctacacctacacctatctcatgaacgggcaggccccgctgaaaaactggaccggactgttccgtcccggtgaaaagatacgcttacggtttatcaacggctcggcaatgacctatttcgatatccgtatccccgggctgaaaatgacggtcgtggctgcagatggccagtatgtaaacccggttaccgttgacgaattcaggattgccgttgccgaaacctatgatgtcattgtggagcctcagggtgaggcctataccatcttcgcacaatccatggacaggaccggttacgctcgagggacactggccacgagagaggggttaagtgctgccgttccccccctcgatccccgtcctctgttgaccatggaagatatgggtatggggggaatgggacatgatatggcaggaatggaccacagccagatgggaggcatggataacagcggagagatgatgtctatggacggtgctgaccttccggatagcgggacatcctccgcgcccatggatcacagcagcatggccggtatggatcattcccggatggccggaatgccgggtatgcaaagtcatcctgcgtcagaaacggataacccactggttgatatgcaggcgatgagcgtctctccgaaattaaatgatccgggtattggtcttcgaaataacggaagaaaggttctcacgtacgcggatttgaaaagccgctttgaggatcctgacggacgtgaacctggccgtaccatagaactgcatttaaccggccacatggaaaagtttgcctggtcatttaacggaatcaagttttcagatgccgcaccggtgctgctgaaatacggtgagcggctcaggatcacgctgatcaacgataccatgatgactcaccccattcacctgcatggtatgtggagcgatctggaagatgaaaacggtaatttcatggttcgtaaacacacaatagatgttccccctggtacaaaacgcagttacagagtgacagcagatgcgcttggccgctgggcgtatcactgccatttgctctatcacatggaaatgggaatgtttcgtgaagtccgggtggaggaatga

SEQ ID NO: 97795 - DNA, 897 bp, Enterobacter aerogenes; identical to SEQ ID NO: 19852

SEQ ID NO: 97796 - DNA, 381 bp, Enterobacter aerogenes; identical to SEQ ID NO: 19851

SEQ ID NO: 97797 - DNA, 930 bp, Enterobacter aerogenes; identical to SEQ ID NO: 19850

SEQ ID NO: 97798 - DNA, 681 bp, Enterobacter aerogenes; identical to SEQ ID NO: 19849

SEQ ID NO: 97799 - DNA, 1401 bp, Enterobacter aerogenes
gtgaggttcaaaatttccctgaccacacgcctgagcctgattttttctgcggtgatgcttacggtatggtggttatcaagttttatcctgattagcacccttaatggctatttcgataatcaggaccgcgattttctgacaggtaaacttcagctcaccgaagagtttcttaaaacagagacgttcaggaacaaaacggatattaagtcattatcagaaaaaataaacgatgcgatggtggggcacaatggcttattcatttctataaaaaacatggaaaatgaaaaaattgttgaactctatgccaaaaattctgttgttccagcggtcctgcttaataagtcgggtgatattctcgactatatgatccagacggaagaaaataacaccgtgtaccgcagtatctcgcggcgggttgccgtgacgccggaacagggtaaaagcaaacatgtcatcattacggttgccacggatactgggtatcacaccctgtttatggacaaactcagtacctggctgttctggttcaatatcggtctggtctttatttctgtttttctgggctggctgaccacacgtattggtctgaaaccgttacgggaaatgaccagtctggcttcctccatgaccgtacacagccttgatcagcgtcttaatcccgatctggccccaccggaaatctctgagaccatgcaggaattcaataacatgttcgatcgcctggaggggtcatttcggaaactgtcagatttctcgtctgacatcgcgcatgagctgcgcacaccagtcagtaatctgatgatgcagacgcagtttgcactggctaaggaaagggatgtttcgcattaccgcgaaattttattcgctaacctggaagaactgaaaaggttgtcacgaatgaccagtgacatgctttttctggcacgttcagagcatggtctgctgcagctggataaacatgatgtagatctggcagccgaactgaatgaattacgtgagttattcgagcccctggcagacgaaacaggaaagacaatcacggttgaaggagagggcgttgttgccggagacagcgatatgctgcgacgagctttcagtaacctgctttccaatgcaatcaagtattctcccgataacacctgtacagcgatacaccttgagcgtgacagtgactgtgtgaacgtgatgattacgaatacgatgtctggcccggttcccgctaatctggaacgcctgtttgaccggttctatcgcgcagactcatctagggtccacaacacggaaggcgcggggctgggattatcaattacaaggtcgatcattcatgctcacggcggcgagctgtcagcagaacagcaggggcgggaaattgtgttcagtgtgcgtctgttaacggattaa

SEQ ID NO: 97800 - DNA, 435 bp, Enterobacter aerogenes; identical to SEQ ID NO: 78804

SEQ ID NO: 97801 - DNA, 255 bp, Enterobacter aerogenes; identical to SEQ ID NO: 78803

SEQ ID NO: 97802 - DNA, 513 bp, Enterobacter aerogenes; identical to SEQ ID NO: 78802

SEQ ID NO: 97803 - DNA, 1134 bp, Enterobacter aerogenes; identical to SEQ ID NO: 78801

SEQ ID NO: 97804 - DNA, 774 bp, Enterobacter aerogenes; identical to SEQ ID NO: 78800

SEQ ID NO: 97805 - DNA, 501 bp, Enterobacter aerogenes; identical to SEQ ID NO: 78799

SEQ ID NO: 97806 - DNA, 639 bp, Enterobacter aerogenes; identical to SEQ ID NO: 78798

SEQ ID NO: 97807 - DNA, 282 bp, Enterobacter aerogenes; identical to SEQ ID NO: 78797

SEQ ID NO: 97808 - DNA, 1545 bp, Enterobacter aerogenes; identical to SEQ ID NO: 78796

SEQ ID NO: 97809 - DNA, 339 bp, Enterobacter aerogenes; identical to SEQ ID NO: 78795

SEQ ID NO: 97810 - DNA, 1395 bp, Enterobacter aerogenes; identical to SEQ ID NO: 78794

SEQ ID NO: 97811 - DNA, 972 bp, Enterobacter aerogenes; identical to SEQ ID NO: 78793

SEQ ID NO: 97812 - DNA, 408 bp, Enterobacter aerogenes; identical to SEQ ID NO: 78792

SEQ ID NO: 97813 - DNA, 408 bp, Enterobacter aerogenes; identical to SEQ ID NO: 78791

SEQ ID NO: 97814 - DNA, 2817 bp, Enterobacter aerogenes
atggctttccctttatttagccgacgtcgagcgtctcaggatgctcatcagtacggtaacggtccgttttccgtcagtgggtatgaaccgcttacccgggaagggcaactgactcattcagatgaagcgcgtctgtattccacggcaccttccattatcgatcatgttccctggggtgagtatttgccagagcatgaatgtattctgcttgacgatggcgtatccgttggggccgtgtatgagattatccctgtgggcactgaagggcgcccggaaacacgtctggacgagatctgcaatatcgctgagaacgccctacaggacagtctccctgaactggatgatcaccaatgggtggtacagtttttctgccaggatgactctgatctctctacttatatggatactatcagaggctatgtcaggccaagagctcagggaactgcattcacgaaagcctggctggctgaacaggagcgccacctagaaaatgtggcggtggaacaggggctttttgtagacgaggctgtcacaggggccgcctggagagggcaaattcgcagaacgcgcatggtggtttaccgttgggttgagacaccttatcgtgaccccatgccaccggaggtgctgctgaaacaggtctgcgatcgcctgactgcagcactgagcggtgccggtatccggtgcgaaaagcagaacggcgagcaaatccatagttggctgttgcgctggttcaacccggcgccggcgtgggtcgataagaaaacattgtatcgttgcgcaaaacactccgatcatgcaccgggcgatttgcctcttctgaatgatttcagcgaaagcctctggtttacccgcccgcgaagtgatgccgaaagcggtgtgtggtggtttgatgatgtggcacataaagctgttccggttgcccgcctgcgtactgcaccttctaccggtcatctgacgggggaggtaaaacgtggtgataatgtgaatgccattatggatctgcttccggaagggacagttctggccatgaccctggtggttcagcctcaggacaagcttgaagaaagttttgcgagccttagccgcaattcaatgggggagaatgttgattccctgcgtgctcgcgaagacgctgctacagcgcgtaatttcctgggaaacaaacacaagctttaccgtgcggccatcacactgcttatcaaggctcaggacaaggaaacactcgataaacggtatcttgatctcagcagtaaattactgaactgtgggatggaaccgataaatccagaacacgatattggtcctctcagcagttatatgcgtgcgttacctatgtgctttaaccctcaaatggataaacacaactggtacacgcgccttatgtttgtacagcattttgcatgtctcgcccctatttatggtcgcgacaccggtactggtcacccgggggttacgttctggaatcgtggtggtggccccctgtccgtagatccacttaataaaaatgaccgtacccagaatgcgcacctgctgcttttcgggccgacaggtgccggtaaatctgccactgcgctcgataaactggctcagatggtggcaatctaccgcccccgtatatttttgctggaagcgggtaacagcttcggtctgtttggagattactgtaattcgctggggctctcagtgcaccgtgtcagtatcaagcctggtaaggttatttcacttgctccgtttggcgattcacatctgctcatgcaggcgaaacctgagacgttagtgaccagcgaagaggccctccctgacattgatgaagatgatgaggacaaggacgaagaacgtgacattctgggtgaaatggagattgcagcgcggttgatgatcaccggtggtgaagcagcagaagaggagcgaatgacacgcgccgaccgcggtatgattcgtgaggcgatactcattgcggctcgtaaagcgtttgacgaaaaccgccagatgctaccggaagatttaatgttctcgcttgagaacattgcccgcgatgtcagcatgggagaagacggccgcgagaaacgcacgccagcgcgacgtgcgcgagctgaagagatggcagaagcattacgcatgtttaccgaaggttttgaaggggagttgtttaaccgtccgggcgcgcaatggccagaggcagacgtgactattgttgatttaggtacgctggcgcgtgaaggctatgaagctcagatggccgttgctgtcatctcgctgcttaatacgattaacaacatcgcagaaagggaacagttcagcgatcgggatatcattgtgccaatcgacgaagcgcatattgtaactgctaacccgctgttgggcccgtatgcaaccaaaattgtcaaaatgtggcgtaagctcggatcatggctgtggttgttcacacagaacctggaggatttccctgacactgcgaaaaaaatgctcaatatggcggagtggtggatctgcctcgttatgccacctgatgaagttgaacaaatagcgcgatttaagacgctcacagaagagcagaaggcgatgctgttgtccgcgacaaaacttccgagaaaatacacagagggagttattttgtcccgtaaggtacaggcgttgtttcgtgcggtcccccccagtttgtacctggcgctgggaatgactgaaaaagaggaaaaagccgaaagacgggccattatgaatgaattaaattgctcggagcttgaggccgcatttcacgttgcgcgccgcctcgatgagaaacgtggcattggcactattcaggggacaatatga

SEQ ID NO: 97815 - DNA, 417 bp, Enterobacter aerogenes; identical to SEQ ID NO: 78789

SEQ ID NO: 97816 - DNA, 264 bp, Enterobacter aerogenes; identical to SEQ ID NO: 78788

SEQ ID NO: 97817 - DNA, 1527 bp, Enterobacter aerogenes; identical to SEQ ID NO: 78787

SEQ ID NO: 97818 - DNA, 900 bp, Enterobacter aerogenes; identical to SEQ ID NO: 78786

SEQ ID NO: 97819 - DNA, 660 bp, Enterobacter aerogenes; identical to SEQ ID NO: 78785

SEQ ID NO: 97820 - DNA, 381 bp, Enterobacter aerogenes; identical to SEQ ID NO: 78784

SEQ ID NO: 97821 - DNA, 366 bp, Enterobacter aerogenes; identical to SEQ ID NO: 78783

SEQ ID NO: 97822 - DNA, 246 bp, Enterobacter aerogenes; identical to SEQ ID NO: 78782

SEQ ID NO: 97823 - DNA, 318 bp, Enterobacter aerogenes; identical to SEQ ID NO: 78781

SEQ ID NO: 97824 - DNA, 690 bp, Enterobacter aerogenes; identical to SEQ ID NO: 78780

SEQ ID NO: 97825 - DNA, 2112 bp, Enterobacter aerogenes; identical to SEQ ID NO: 78779

SEQ ID NO: 97826 - DNA, 228 bp, Enterobacter aerogenes; identical to SEQ ID NO: 78778

SEQ ID NO: 97827 - DNA, 549 bp, Enterobacter aerogenes; identical to SEQ ID NO: 78777

SEQ ID NO: 97828 - DNA, 531 bp, Enterobacter aerogenes; identical to SEQ ID NO: 78776

SEQ ID NO: 97829 - DNA, 624 bp, Enterobacter aerogenes; identical to SEQ ID NO: 78775

SEQ ID NO: 97830 - DNA, 726 bp, Enterobacter aerogenes; identical to SEQ ID NO: 78774

SEQ ID NO: 97831 - DNA, 867 bp, Enterobacter aerogenes; identical to SEQ ID NO: 78773

SEQ ID NO: 97832 - DNA, 1122 bp, Enterobacter aerogenes; identical to SEQ ID NO: 78772

SEQ ID NO: 97833 - DNA, 1371 bp, Enterobacter aerogenes
atgcctgtgttcacatataaaacgactgaccggggctgggctatcctcagcactggtgcttcattgattattctcctggtggtcagcgtctggggctttacccttatcagtgactggatgcaaaaacggacctggctgaataccgcgtcacaggtatctcgcttcacacaagctgtgaagagctacactggccgttattacgatactttgctttcaagtgccaccaccacgaccccggttacggttacacccgctatgctgaaaaacaccggatttctggagcaggggttcagcgagacgacagtagacggacaggcttacctggctgctgttgttcgtaatgccactaatacagatcagctgcaggcactggtttacactcaaaacggcgcggcactgccttttctcgcactgcgccagatatcaatggatatcacctctggtatgggcggctatatatggacatcaggaactgctaccggcgctatgggcagctggactattcctctttcacagtttgggataagtacaactcagggacatattgcggctttactgaccacagatgaactgggcgctgctcgcggtgaaaatgatcgcctttatcgtttttcggtaaccggcaagccagacctcaacacgatgcataccagtattgatatgggaggtaacaatcttaataacgcaggcacgattaatgccgtaacgggtaatttcagtggcgatgtggcggccactggaaatataactgcgaatggaactgttacaggacagaatgttactgccggttcaaacgtcaccgcaggaaatacaataacggctaacaacgacatacgttcaaataatggctggttcataactcgagggagtaagggatggctaaatgaaacgtatggcggcggtttttatatgtcagataatgactgggttagagtcataaataataagaatatttatacaagcggtcaggttcgtggtggaagtgtgcgggctgatggaagactttctacaggagaagttttgcagctcgacggagtcaatactgctggcgcagtttgttcaccaaacggccttgtaagccgcgacgccactggagccatactttcctgtcaatccggtgtgtggagatcgggccaagtcaagttcaccacacaggcctataacatcggacaaaatgttattgatcagtatatcggaatacatgcgtactgctcctggacatatcttttcagcgccccgttgggaggaactcaaaaggtctatagcgacgggaacaatggctggagagtcaccaataccccttataatggataccaaactggctcttcggtttcggttacttgtcttaaccttccgggggcgggaatttga

SEQ ID NO: 97834 - DNA, 669 bp, Enterobacter aerogenes; identical to SEQ ID NO: 78769

SEQ ID NO: 97835 - DNA, 480 bp, Enterobacter aerogenes; identical to SEQ ID NO: 78768

SEQ ID NO: 97836 - DNA, 597 bp, Enterobacter aerogenes; identical to SEQ ID NO: 78767

SEQ ID NO: 97837 - DNA, 1116 bp, Enterobacter aerogenes; identical to SEQ ID NO: 78766

SEQ ID NO: 97838 - DNA, 1575 bp, Enterobacter aerogenes; identical to SEQ ID NO: 78765

SEQ ID NO: 97839 - DNA, 498 bp, Enterobacter aerogenes; identical to SEQ ID NO: 78764

SEQ ID NO: 97840 - DNA, 1281 bp, Enterobacter aerogenes; identical to SEQ ID NO: 78763

SEQ ID NO: 97841 - DNA, 1674 bp, Enterobacter aerogenes; identical to SEQ ID NO: 78762

SEQ ID NO: 97842 - DNA, 228 bp, Enterobacter aerogenes
atgctgccgttaccagacagtcgcatcaaaagcattattcagaacggtcgcctgtggatctgggtacctgaaacagacggtgtttatgccgcgttgcgcgcccgctcagtgacttctgcgcttgccctgaccgtaagcggcggtcatctgcggatggcggatggcactgatatgaacctgtctctgccgtccggtgtgacggaaggcagcattgtttatcttaactaa

SEQ ID NO: 97843 - DNA, 1350 bp, Enterobacter aerogenes; identical to SEQ ID NO: 78760

SEQ ID NO: 97844 - DNA, 249 bp, Enterobacter aerogenes; identical to SEQ ID NO: 78759

SEQ ID NO: 97845 - DNA, 243 bp, Enterobacter aerogenes; identical to SEQ ID NO: 78758

SEQ ID NO: 97846 - DNA, 549 bp, Enterobacter aerogenes; identical to SEQ ID NO: 78757

SEQ ID NO: 97847 - DNA, 204 bp, Enterobacter aerogenes; identical to SEQ ID NO: 78756

SEQ ID NO: 97848 - DNA, 492 bp, Enterobacter aerogenes; identical to SEQ ID NO: 78755

SEQ ID NO: 97849 - DNA, 1884 bp, Enterobacter aerogenes; identical to SEQ ID NO: 78754

SEQ ID NO: 97850 - DNA, 723 bp, Enterobacter aerogenes; identical to SEQ ID NO: 78753

SEQ ID NO: 97851 - DNA, 1233 bp, Enterobacter aerogenes; identical to SEQ ID NO: 78752

SEQ ID NO: 97852 - DNA, 231 bp, Enterobacter aerogenes; identical to SEQ ID NO: 78751

SEQ ID NO: 97853 - DNA, 597 bp, Enterobacter aerogenes; identical to SEQ ID NO: 78750

SEQ ID NO: 97854 - DNA, 780 bp, Enterobacter aerogenes; identical to SEQ ID NO: 78749

SEQ ID NO: 97855 - DNA, 255 bp, Enterobacter aerogenes; identical to SEQ ID NO: 78748

SEQ ID NO: 97856 - DNA, 1716 bp, Enterobacter aerogenes; identical to SEQ ID NO: 78747

SEQ ID NO: 97857 - DNA, 1368 bp, Enterobacter aerogenes; identical to SEQ ID NO: 78746

SEQ ID NO: 97858 - DNA, 915 bp, Enterobacter aerogenes; identical to SEQ ID NO: 78745

SEQ ID NO: 97859 - DNA, 456 bp, Enterobacter aerogenes
atgagtgaaaatgaaacatttgatgcaacacgaaagctactcctgaatattcgctctgttcgtgtttttgcgcgagaaaccagctttgaacaactgctggaaatgcaggaaaagcttaatgccgtgatcgaagaacgccgtgaagaagcagagcgtgaggcagcagaacgcgcagaacgcgaaagaaagcgccaggagctgctccagctgatcgccggagaaggtttttcaccggaagaactgcttggcctgtccgaagatgcgccaaaaacacggaaaaagacgttgccaaaagcgccgcctaaatatcagtttgacgaaaacggcgaaacgaaatactggtctggccgtggccggacaccaaaaccaatcgacgaagcattaaaagctggccgttctcttgatgagtttctcatcaaaaaagacgcttccagctctgttggtgacgaacagtaa

SEQ ID NO: 97860 - DNA, 1035 bp, Enterobacter aerogenes
atgaaggatgcagagaacagacatattgtttacgaaataatagatgaatacttccaccactggcttaatgaagttgatggtttaactgaaatcgcggtaaatcggcctgatgaactttttgttaaagtgagtgggaaatggcagcagcatgaattaaaaatggattttaaagattgtatgtcatttgcaggagctatttctgattatcatgatggtgggtcggttacaccagaatatcccttacgttctgttacgctccccggaggggagcgtgtacaaatagtcattcccccggcaacggaacgggaaacggtgtctattacaattcgtaagccgtccagtgtgtttatcgaccatgatacctttgttaaacaggggttttactcaaggctaaatcaaggtgttgaattcagggataaagaagatgaattatctttaatgtttaaagataattgttttgaacgatttgtccctgaatgtctggttaagggtaaaacgatggtcttttgtgcaggaacgggggcgggtaaaacaacctttgcaaatgcctgtcttcagtacataccccatcatttacgatgtatttcaatcgaagatacagatgaagcaaagttcaggtttcacaaaaatcatgtgaaattgtattacccgtcagaaggggaaagtagcactgtcagctccgcttctcttttacgttctggttttcgtatgaacccggacagaatcctcatgactgaggttcgcggtgcggaagcctgggattttctcaaaggctcaagttcaggccatgcagggaaccttacaaccgtccatgagagcacccctgaagatgctgtgcttgggctggttcagcggtgttatatgaaccctgaatgtcagaatttaccctacaacattatattgcggagggtgttaagcaacgtcgatgtgattatgagtattaagtacattgatgaagaggatcgccgatttgcatcgggtatttactatcgtgatattcattttcaggaatactttgaaaagctgaaggagtga

SEQ ID NO: 97861 - DNA, 228 bp, Enterobacter aerogenes
atgactgctacccggaaaaaaaccgcaacgagacgcaagccccaacgtaatacactctacctgccctcagcttctcgtgaggaactggataaaattgctcttgagattggctatcgcagggggcggcgtatttcaagctctggtgttgtccagtacctcattaaaaaatattccagccaggctattgaggagctgataaacgaagacgatgacgacttcgatgactaa

SEQ ID NO: 97862 - DNA, 510 bp, Enterobacter aerogenes
atggaatggtatgttttgcaattcaccactacgagatttgcagcagtttttgctcatctcgaacgcctgaacttttcttacttctgccctatggagacagaaagatatcgtcgcccggataagataatttcatatcgagaaagacgtttgccgcttttccccggttatctttttatccaggcagattttgaagaggttcattccactacaataactgctatcccttacgtacaacgctttatctcatttggcggtgagcctttacctgtaccagaagatgtgatggcggagcttttgtgcagacaatcgcatacaacagctcaggcaaatattttaaggaaattaattccacacgaatttgctgaaattctcctcatggataatccacagcaaagaagtatggctttcatccactacatcacagagagaagcttaacccacaaaatgaaacggaagaaaaatgactgctacccggaaaaaaaccgcaacgagacgcaagccccaacgtaa

SEQ ID NO: 97863 - DNA, 243 bp, Enterobacter aerogenes
atgagttttaaaccaacacctgaagaggtgaaacaagcacgtatcaaagctggttttacgcagcaggaagccgctgaaaggtttggttttacgttatcagcctggcaagccaaagaaacatccggtaaaacgtctcgcggtttagccgctggtacgtatgaattacttttgctcctggctgatgaacatccagattaccagctcgttaagcgagaaaaaaatcaggataaagtgactaaatga

SEQ ID NO: 97864 - DNA, 897 bp, Enterobacter aerogenes
atgccgataagaaagatttccgagaagacaaaaattcgacatcgaaatgaaatcaataaaactcttgctcagttacctctttcagcaaagagggttttgtgtctggcattggtgtctgtagatacaaaaaaaccgcttgaacctggtatgatttttaaaattaccgctgatacctatgcgtctattacgaaagtaaaaccttcagttgcatatcgtcaactaaaggaaggtgctgatttacttaatactagtaagctttccctttcaagtgatgatattttggcattatctaatgaattaggtctacctgatgcaatgcgcaagaatttagaacgattggatatggggattactgattattgcgcatatagcccgaatgaggggtatgttgttcttaagtttacacatacaatacacccttacatttcaaatttaattggtggtgaaaataagtttactactcaattgcttacttcagcgatgagattaagtggtcaatactcatgggctttatatcagttgataaggaaaaattattccaaattcaaatcaaagaattatttcacaataccgcttaacgaattaaaagatgagttgattgcatatactatagaagatgacgaactggtttataaatatcctgagtttcctatcttcaaaagagaagtgatcaacaaagcaataaaagagatcaaagaaaaaacagagatagaattcctttcctgtttaatagaaagtaaagaaggtcgtaaagttagtgttttacgctttgagtttcttatctctgaagataattttactggtattgatagtgaaacagatgaatttatgaatggtgatgatgccgctttcttagcagagtttgataaagcggttccctctaaaaagagtaagtga

SEQ ID NO: 97865 - DNA, 444 bp, Enterobacter aerogenes
atggctaaaatctatgagtttccgctgggagccgaacgaagtaagctgaaaaatgaaatcatccaggaacgtaaaaaacgattgcgagaaaagaacggtaacccggttatccggcacgctaaatggttctggttttatctgcgtcttgcaacggctggcgcactgcatttagtctcagttattactctggcagtcctgggggctttcagtacagctattttctggattggtggcctgatgtgtgttgttacatggtttcaccttgagcatcagttctggacgccgcaaaatttcaccattccagtaatcgtaacgctgtggggattgagtttgtttgccactcccctgatggagctgcttaacaaaaaaatgccgtggtattgccttctggttcctgatgcaaagcataccagcactgaggcaaccaatgatgaccagctgtga

SEQ ID NO: 97866 - DNA, 354 bp, Enterobacter aerogenes
atgaaatatcaggttaaagagtttattaacgaaaaatattctaaggctgttaatattttaaaggataaccttaaagaacactaccatattttttatggtttgagattaagtgagattctttttcctgccagcgaatacggctctgaaatgttttttcaggagtttgaggcgattaacagtgtaatattgcctttggtgattttggatttaatagaccgaaagccgattatggttatcggcttcggtgaagtatctggagttgattcacttgttgattctggtatagaagttgtttctttagacggtttaagcgatctgctactggttgaaaaactaacgccattatttaactaa

SEQ ID NO: 97867 - DNA, 285 bp, Enterobacter aerogenes
atgaataaatcatggcttgaacaacaggtgcaaaatgaaaaattaaaaaaagtacaggaagagaaaaaagatggcactatccaaaaaggattgtacagggttcgtataaaagacaaatacaggtgggatttgtgggaaaatgatttcagagttgtcattgcttattcgaaagatgatgcagagctaaaatttacgggaatgacagattttaatgaacattactatatagaaagcattgaaaaaataacgctttcagatatagaaaaaatcttactggaaaactga

SEQ ID NO: 97868 - DNA, 906 bp, Enterobacter aerogenes
ttgggtagtggtgctttcgaaatggtaatagctacaagtctgtcattactcgatgaaagcatcctctcatgggttaaagagcggaatatcaccttctctgtctctcttgatgggaatgaagccgtccataacaagaatcgccttcttactgactttcaggctcacaacaaagcagtaacaggtattcggaaaatcacagaagagcttggagcaaaccgggttgcaactgtcaccactgttactaaggaactgacaaaggagccagcttccatagtagatgctcatctgtctctgggtcttacagacatgtttatcaggcctgttagcccttatgggtttgctcagaagcagagcttcactttttcaatgccagagtattttgctttttataaagagttgatgcaggaagtgttgattcagaatgaaaagggaatacctgtcattgagcactcggctgctattcatctcaagcgaattttcaatccaggcttcagtggttatgctgatctaaaatcgccaagcggagtcgtgctgaactgcatcctgttcaattatgacggtaaagtctacggtagtgatgaaagtcgtatgcttcagaaagtaaacccggaagcagatttcagtgcaggagagtttgcctcactctcatttattagcaacgaattctaccgttccgctctctcatcttcatttaacttcgccatgccaggttgtgacacctgtgcataccagcctttctgtggagcagatccttgccagaacattagtgttcatggcgaacctgttggtgacaagagtcgttctactttctgccagtatcacaaaggtatgttccgcttccttctgaatgaaatctctcaggatggaccgatggcaaagatgcttaaagggtgggtttatgtctga

SEQ ID NO: 97869 - DNA, 276 bp, Enterobacter aerogenes; identical to SEQ ID NO: 91793

SEQ ID NO: 97870 - DNA, 321 bp, Enterobacter aerogenes
atgggggtaatggtgtttatcgctggcagcattatgaacggcgcgcaatcatcaatgccggcgctggctgccgggttctatccaacccagggccgcgccaccggcgttgcctggatgctcggtatcggccgcttcggcgggatcctcggcgccttcagcggcgctttcctgatgcaggcacaattgtcgtttgagaccatcttcacgatgctggcgatcccggcgtttttatccgccatcgccctggtagtgaaatacaaactgagccagcgccaacctgccgttaagccaaatgacggtaaaaacctacagaaagcctaa

SEQ ID NO: 97871 - DNA, 420 bp, Enterobacter aerogenes
atgagcatgagaaatgttgtatttgcatttattgccccgttaatagttttcgtaggggcttcgaatgcctctgaccaactgtgttctagcgctgaatccgtatttcaacaggaactaaagaatatgtgggattgtgcgcataattcttgggagaagtattccgactcgtcagcaagcgcaagtgaagtttcatctactgtatcttatgaatgtagcatacctattcgtaaacttgcgggtgctcagtacaactctgttgtttgtgaactttctaaaaagacggggaaaagctttgccgaggttgcagatggacttccggcgaaagaaactgaaatttctaaatctgaaaaggaaattaaaggaatagttgccgagaaagctatagctgaaacggtaaaataccgtgcagctaaaaaatag

SEQ ID NO: 97872 - DNA, 165 bp, Enterobacter aerogenes
atgagcgataagaaacaacctctgaccctggaacaacaggaattcattttcaaaaccaaagcggaattattggcggagcttattcagatcaaaattcctggtaaatccgatgcggaagaactggccgaagtggtcaatgccgcattcgacaaactaacagcttaa

SEQ ID NO: 97873 - DNA, 426 bp, Enterobacter aerogenes
atggctcgaccgaaaaaaatcgttgaaacaccggggcaggaaaaaacagtggcggaagaaaaagcattcacagccaccgaagccctcatgctcaacgaacagggcacgcagcgcgaaaagctggttgtcgccgtagatgaacctcaactgagcgaagaagcattatcgctggcagcgcgtaatgccattctcgccacactcaatgcgcagggcgccgccatcatcgcgcgctttgaagagtatgccttcactgacatgctcgatcacccgctgaccaataacctcgatttcctgaatcttgtacgtaaagccactgatgtaagcaccggaggtgcgggtgcaatggtgacgaacgaagagggcaagccgcagccggtacgcggcgcacctgtattaaccgaacacggctggcatgtgccgggctaa

SEQ ID NO: 97874 - DNA, 165 bp, Enterobacter aerogenes
atgcagaatttaattctgtctttaagagcagcagataacgctaaaaaatgcggttggccaacacgtccggaaagcatgaaattctgtctggctcctttttccattctggcgggtggcgattttgtccctctctatgctcgcgcacgcgcgcgtttaggggactga

SEQ ID NO: 97875 - DNA, 339 bp, Enterobacter aerogenes
atggctaagacatcagcagagagaaaggccgcgcagcgcgcgcggcagtccgccgccggtgagagaaagctcgagctggtgctggatgagcaggagcaggaaatgctggcgcgcaattgtgccgcccgtcgccctggtcgcgatccctatgaaatggccgagtatatcgcgttgctgatccgccaggatgatgcgcgggttcgcggccgtataaagtccatcggtaaacgccagtgcggtaagtgcggcgatcagcttccggtggcatcatgcccgtgcgctggtgattctcagtgctgggttacttatgggtggcatgagatgaaaatcgttgcgtga

SEQ ID NO: 97876 - DNA, 198 bp, Enterobacter aerogenes
atggataagtgccaaggtgttttcggcaaaatttttggtcattcattccgggtggcgataacaaaaggctcacctgacttaaggctaggcgaatatcatggtgggcgaggcgttctgttagacattatggaaaaaactaggcgcgaaacctatcacggaatttactgtaagcgctgcggaaaggttatcgatggctaa

SEQ ID NO: 97877 - DNA, 750 bp, Enterobacter aerogenes
atgtctgatgaaattgaaactatagataaaaatcccaaatcatgggctgcatggaaacgggaagcagaaaggctgcaagaaattatcgacggcatggcgctggccgcaatggacggcgagccggtgctgtacgtaatggggatgggtcaggcgcttgacgccgagactgcgtcaacctgcaaaggggccgtggactcttgggtagctgagtggaaccaaagtcgcctaccgggacaggcgaagtataaaaccgtaccactctatcgccacgcgcagcctgcgccagagcttgccgctattgttgagcgccttaacctcagcggatatgagtatgaaggcggagaggttacaccgcaaaatgcagcagccatagtcgatactctcctgcaacagctcgatgacgaagtacagggacgaaacgcgcagccagcgccggtatgcgttccgcttggaaattctccatatgatgttccacacagcatgccatcaaaccttcgggaattaattgctgaagagatcgggattctttttagcgatgatgacgctcaaagtgtgtgggatgtgtgccgccgcgccgccatgctccaggctggcaactctccggtaattccagatggttggaaaatggttcctgtcgaaccgaacggcgacatgctggcggcggctcaagatgcattcggcgaaactgatggcgatatcgcaagcacgctccgcgccgccatcgtagccgccccgcaggaggtgaagtaa

SEQ ID NO: 97878 - DNA, 240 bp, Enterobacter aerogenes
atgagcattagaacagagcatgggtacgggccattaacggtaactgtcggctggcttgataactgcccaaaatgcaacaacgacaaagccagtgtgactggatggtctgtgtctccggataccctttgggctggcgacgaagccgtatgcacgaaatgcggacacaaaggcgaaattgatgcagacggtgaaaacgcttgggttgaatgggatggcgtgaaggaggccagccatgactga

SEQ ID NO: 97879 - DNA, 657 bp, Enterobacter aerogenes
atgaataacgaaaacgaaatcacagcagcactagcatatatctataaatgccgcgagctttcaggctgcccggctggcgtagaccttcaggactgggtgaagcagctggcggcggagaatgcgtacttgatacctaaagccgctagcgaactgtcaaatgcctgggtgcttcataagtacctaatcggcattcaagcggcgattatgtatctggataatggaaacaagaaggccgcgcaggaatggctgtatggaactattgctggtccgggatttgagttccctgacgaggttgacgatatcgacgcatgggcaactcatcagatgcgcggcagcataagccatccgcgcgcacttgaaataatcaaggaagaaactcctgccaccgatcgcatcgtagcctggattaaggctgatggcgcagcagaacgggaaaagaccatcacattcaccgcagctaaaaagcgcacacaggatggcgtagcgttaatcgctatcggaaaaccttataaaattcacagcgatgatgtgatcggcgaattcttcatcggtgagcgcgggcgctacggcgtaatcaccatggacagactcaattacttcgcaacgtctgatgaatacgcatgggctttttcgcttcgcgagggggccgacaaatga

SEQ ID NO: 97880 - DNA, 144 bp, Enterobacter aerogenes
atgtctcagtcgaagtttgcgctgccgcgcaatggttttacctttaaacaattttttgtcgcccacgatcgctgcgcaatgaaagtcggtaccgacggtattctgctgggcgcctgggcgcctgggcgccgattgctcaggtga

SEQ ID NO: 97881 - DNA, 288 bp, Enterobacter aerogenes; identical to SEQ ID NO: 76838

SEQ ID NO: 97882 - DNA, 243 bp, Enterobacter aerogenes
atgggaaatatcatcctgatggccgagaaagcaaaaggcgcgattgatgaagaggctgaagtgtatgaatttgagggaatggatgatctgatccagtttcgtaagaaattccctgaacagatgaagtatgaatatcattacatcctttccggcggtacgaaaaattttcggcatatcgcgcttgttgaagccatccattttaagcagttcaaaaagctggttaatctgtaccaggatcgctaa

SEQ ID NO: 97883 - DNA, 156 bp, Enterobacter aerogenes; identical to SEQ ID NO: 12609

SEQ ID NO: 97884 - DNA, 258 bp, Enterobacter aerogenes
atgtgtattgatcacgtcctcacctttcccgttcccctggaagatgccagcttgctggcagactactgcgggtttgaagtgtatcccacctacagcacgaaccgggccgatgaaacgccccgtttttccgtggtggcacttcatcgccacaaagccaggctggaaacgttagccgtggctgacacggagaaaagcgcccatgctttccgcgatatggccgagattaccgccgcttactacttacattttcggcggtaa

SEQ ID NO: 97885 - DNA, 252 bp, Enterobacter aerogenes
atgctttccgcgatatggccgagattaccgccgcttactacttacattttcggcggtaatacgatgaacgattatctatccctcatggaacaggcacgacaggcagaggatttgcgcgactggaaaaccgccgcgcagctctacactcaggcaatggccgttagtccaaaagccagaacgatgcgccagcgccgcgaaaggctgaacctacagcagcgtatcgacttttgcgagcgtaacgcgagaacgtaa

SEQ ID NO: 97886 - DNA, 771 bp, Enterobacter aerogenes
atgatcatccctacccaggaaacttacgacgagcttcaacgcgcctacgaatttttcaatcaacgcctgtttgaaagtgcgctgccgccttgccttatcacccttcagcgcgaaaaaagaacgtatggctatttctcgaatggtcgctttgttggtcgctcaaccggacaaatcgttgatgaaatcgccatgaatccggtctatttctcgatccgcacgatacgcgacacgctttccacacttgtgcatgaaatggttcaccagttgcagcaacacaccggcaaaccgggccgccgtggataccacaataaagaatgggcggcgatgatggagcgcatcggcctgataccatccgacaccggccagccaggaggtaagcgcgtcggtgagtccatgagtcattacatcgaggacggcggcgcgtttgataccgcctgcaaggagctgcttaccacggagtttaaactaagctggctggatcggttcccgccacacaaaccaacgccaccaacgccaaccggcgcagacggtaaagggtatgttgatgacgaagattatgaggacgagggatacggcgacgatggcgagctggacgatgagatcacacaagccctttcgctggtaaacccgccgccagatacgccggtgaataaatcaaaccggacaaaatacacctgcccgaaatgccatacgaacgtgtggggaaagccgggcctgatactgtactgtggtggcgaacactgcggaaaggcagaataccagccaacctaa

SEQ ID NO: 97887 - DNA, 369 bp, Enterobacter aerogenes
atggaaaagcaacctgataaattagatatcctgatggactggtttttaggcgatgcgaaagaaatcacctcaaaactggaaagcgtaaccacaagcgttaccgaaacagtagaacggctggataaagcctccgatgaaataaagaaatcatctgaggtggcgaaaacagaagtgatcgcaagccagcgcgagctggtcaacactctgaagaaggagcagaaggttagcgaccaattttttgaacgtctggccggagcgcaaacagggttttcgcaagcgcttatcaggcagattctgattatcacggttgtctgttccttcgttggtggagcgctcggcgcggcggctataacgttcctgcttcactga

SEQ ID NO: 97888 - DNA, 711 bp, Enterobacter aerogenes
atgaaaattgcagtaatgaactacagtggcagtgtcggcaaaactattatttcgtcatacctgctgtatcctcgcatggctggcgcaaaattctttgccatcgagacaatcaatatgtcggcggctgatttgggtgttgatgaagtaatgagtttgaccggggataattttggtcaactggttgaagaaatcgtatttgaagataacgccatcgtggatattggcgcgtcgaacgtagagcgttttctttctaccatgacaaaatacgagggtgcaattgatgaatttgataaatatcttattcctgttaccccggatgataaagcatggcaggaaagtattaagaccgctctcgcgttaagcgctgctggcgttccaaaatccaaaattgttcttctgcctaaccgcattaaagcaactccgcaggaagatattgcttcagtgtatgaatgggcgaaggattctaaaaaagcctctattcataaagatgccgccgtttttgaaagtgaaatttatgaatacctcgcgtatcacaaaatttcgtttgaagaactgctggctgaagatccagaaacatttaaagcgaaagctaaatcctgcactgatgccgacgaacgcgcggcggctgcgcggcgttatcgctggatgaaattagcgctgccggttaaacgtaatcttgatcgtacctttgaaatattaacggctgaataa

SEQ ID NO: 97889 - DNA, 435 bp, Enterobacter aerogenes; identical to SEQ ID NO: 22495

SEQ ID NO: 97890 - DNA, 348 bp, Enterobacter aerogenes
atgccatctatcagtttaagagtgaccgaagcgcaaaaaatcgaccttgaataccgttcggagggcaacgtatcggagtacatcaagcaacagctttttggacaaaaagagagtgccagtgaagtgatcgcccggcttgataaattgctggaacgttcatcttcagagcagcaagccgccggacgagatcgatacatcgaggcaatgttgattgaggtgttattgatacttcgccaggtgagtaaagcagatgcgcagaaagttgccggtggtgaaattcgccggttagggctggagccgtggtcagcagagctggcccaggagagagaggaacagagtcatgaatga

SEQ ID NO: 97891 - DNA, 1578 bp, Enterobacter aerogenes
atgaatgaagcggataagggcaaaatttgcctgggggcattgctttttaccccccttgttacgtggtttatcgcggcgaaagccttgtatggttttacgccaaaagatgcgcgtgaacgtctggttttacttattcagcagacttttgatttatggcctttatggggtgctttattagtcggtgaaattattgccatcataggcttaatcatatttttcaaatttaatcaccagatatttaaaggtgcaccatttaagaaaatatatcgtggtacgcggcttgtttctcagcgggctttagcatccataactaaagaaagagagccacaaataacaatagccgatattccaatccctacaaaagcggaaggcacacatatttcaatagccggggcgaccggtgttggtaaatcaacaatctttgctgaaatgatgaaatgttgcttgatgcgtggaaaaatgcaacgtgttgcctcaaataaagaccgcatgataatcctcgatccagatggcgatttcctttctcgtttttataaaaaaggcgataagattttaaatccctatgatgccagaacagaagggtgggtatttttcaacgaaataaaaagtgattttgactttgagcgattcggtgtttctatcgtacctacagcgaaggattcgcaaacagaagaatggaatggatacggtcgtcttttatttaccgaggtatcccgtaaagtatttaacacaagtcgaaacccaacgatggaagaagtattctactggacaaatgaagtaccactggaagaacttgaggaatatgtcagaggcactaaagcacaggctttatttgctggtagcggtcgggccgttggtagtgctcgctttgtgcttagtaataaacttgccgctcacctaaaaatgccagcagggaacttctcaattcgtgaatggctggaagatccgaaaggcgggaatctgtatatcacttggacagatgaaatgcgtgaagccttgaaatcgcttatttcatgctggacagatagcatattttctattgtgttaggtatgagcaagagcaactcccgtaaaatctggacgtttatagatgaactggaatcccttgattacctgccatcattacgtgatgcgttaacaaaaggtcgtaaaaaaggactacgggttgtcaccggctatcagtcgtattcgcaggtcattagcatctatggcagtgatgtagctgaaacccttctgtctaaccatcgtacatcggttgttatggccgctggtcgcctgggtgaaagaaccctcgaatttgtctctaaatcattgggggagattgagggcgaaagagaaaaaacggggattagccgccgctttggtcagttgggaaccaaaaataccaatgatgatcacaagcgcgagcgggctgtaacgccaaccgaaatcgccacgctggatgatctgaccggctacatcgcgtttccaggaaatctgccagtggctaaatttgagactcatcacgttaactacactcgttctaaccctgtaccgggcgtggtcttacgtgaaagcaccgcatttgcaggaatgtaa

SEQ ID NO: 97892 - DNA, 2910 bp, Enterobacter aerogenes
atgctgaacattacgacgattacccgccagcgtgtcgataaggttgttgattactatgctgatggcgcagacgattactatgcgaaagacggtaacgcgatgcagtggcaaggcgctggcgcggaagaactgggcttaaccggcgaggtagaacaaaaacggtttgcgaaattgcttgatggcaaagtaacggatgacatttccgtgatgcgtaaaacggccaacagcgaaagcaaagaacgattgggatacgatcttacgttttccgcgccgaaaggcgttacgcttcaggcactggtcaacggtgataaacgtatcattgaagcgcacgatcgggcggtcactaaagccatcgaggaagcggaacggctggcactaggccgctttaccgtcaataaaaaaacgcacgttgaaaacacgaataagctgattgtcggcaaatttcgacacgaaacgtcacgcgagctagacccggatttgcacacccatgcctttgtaatgaaccttaccaaaaccagcgatggtaaatggcgttcgctcacgaatgacggcattgtgaactcgcttacgttattgggtaacgtttacaaatccgagctggcaagagagctggagctggccggttacaacctgcgttatgatcggaatggtacgtttgatttggcgcatttcagccaggagcagatagcccaattcagccagcgcagccagcagattgaggccgagttagcaaagaatggtttaagccgtgaaacggccagccatgagcaaaaaaatgcggccgcgctgaaaactcgtaaaagcaaaggcgaagtagatcgcgatgtactctatgagggctggaaaaaccgcgccaaagagcttcagattgattttgatagccgggagtggaaaggtgcggccaacgacgatatagcgcggaatacgcagccagcggcgctggaaaagcctatcgagtaccaggctgacaaggtaatgacctttgccattcgttcacttaccgaacgtcaatcggtgattaccgagcgggagctgatggacgtggcgatgaagcatggctatggccgcttaaccctcgatgatattcgggctgcgagagaacgggccataacctccggcaacctcatcaaagaagaagcaacatacgcagcggccacgaccaataaaaaacagcagaacgtagcaatgacccgcgaacaatgggtaacggaactggtgaaagctggccgcaataaagatgaggcccgtaaactcgtagataagggcatcacaaacgggcggctggtacagcaaaagccgcgttttaccacacagttagctcaacaacgcgaacgcaacatactgaagatggagcgggaagggcgcggaaagatccagaccccatacactcgcgagtttagcgagggctggttagccagcagaacgttaaaacccgaacagttaaaagcggttatgggaattattcatacccccaaccagtttatttctgtacatgggtttgccggtactggcaaaagttatatgaccaaatcggcagcggattttctaaaagagcagggcgtacacgtcaccagtcttgccccctacggtagccaggttaaagcgcttcaggctgaagggctggaatctcgcacactccagtctttcctccgggcctcagataaaaaaattggccccggctcagtagtttttattgacgaagcaggggtaatcccggcccgccagatggaggaaaccatgcgcgtgatccgcgatgcgggcgcacgagcggtattcctgggcgataccaagcagactaaagccgtcgaagcgggtaaacctttcgagcagcttattaaagccggtatggaaacggcctatatgaaagatattcagcgccagaaagacccggaattgctgaaagccgcgctaaatgcagcagaagggaaaataaaggcgtcgttgacccacgtaaccagcatcgtagaggaaaaaaatcatgatcagcgctaccgccgcattgtcggggattacgtggcaatgccgccgacagaccgggctaacgccctgatcatcaccggcacgaacgacagccggaaaaaaattaatgagtacattcaggccgagctggggttaaaaggccagggtatcaattacccgcttctgaaccgtcttgataccactcaggcccagcggcagcacagcaaatattacgaaaaaggagccgtgattatcccggaacgggattacagcaacgggctgaaacgcggggccgtttataccgttctcgataccggccccggcaataaacttacggtaagcgacggcagcggcgacacaatcgcattttcaccggcgcgattttccaaattatccgtgtactcagttgaaaaaacggagctggccgtaggcgaccaggtaaggatcacccgtaacgatgcgcatctggatttagcgaacggcgaccgttttaaggtaaaaggcgtccagagtggtgaggtactgctggagaacgagaaagggcgactggtaaaaattgatgccaacaaacctatgtatttagggctggcttacgcttcgaccgttcatagcgctcaggggctaacctgcgacaaggtttttatcaatatggatacccgatcactcacaacggccaaagatgtttattacgtggctgtcacccgcgctaaacacgaagccgtcatttacacagacgatgagaagaagctggataaagcggccagccgtgaagggttcaaaaccgccgcgcttgagctggaacaactcaaacgctatgccaaagagcagcagcatgatgcccgcgaaaaaggccgagacaaaaccgagccgacgcaggaaaaagacaatgccaagcgtaaaggcaaaggtcatgacaaaaataacgacgagagagcatttacctcgctctaa

SEQ ID NO: 97893 - DNA, 195 bp, Enterobacter aerogenes
atgggtcaaggtatcaacacgttgtctttagagctggatgacaaagaagcgctggcgctggcgcagtttgttaagcggttgacgtggagtgatttacgggggtgtgccgttgatgatgacgaggcgtatgtcatcaaggatgccgtcgataaattacagagggcaatggccgaagaaggtttttccccgcgatag

SEQ ID NO: 97894 - DNA, 483 bp, Enterobacter aerogenes
atgcttgatatgcgattaggaaacagcggcgatattcctttcatcatgaacctggtgcgcgatgggataacatctggcgcatttttctatgccgagggcaacggtcttgaaacagtgagatctgagctacaaagtgtcacccaacaatacagagataatatccccgtaggggattatctctttgtctttgccgagaagttaacgcggcagccggtgggattttcgctgttaaccggccgcaatgattttgcgggccgggcatctcatcttgagatccgtatgttcgctgttgcgactgatgagcagggtaaaggcattggaaagagtatgcttgcctcaatcatcgaagccacgcccggacaccggctggaagcctcctgtctccccccggccacaaaaatgatgagactgctggccggaagcgggtttaagctgattcatgaaacgcagggcggtaagaaaacgtaccgttttacagactaa

SEQ ID NO: 97895 - DNA, 555 bp, Enterobacter aerogenes
atgatccagcgtttaaaaaagcgcaactttctctttaaagcggcactggttgccgccgtactttacggggcttcggccccgtctctttttgctgcatcggcgcaagtaggtttctcgccggaaggaaccgcgcagcagctcgttatcaacgtaatcggctcggcaaaagataacatcagaatgatggcctacagctttaccgcccccgatattatgaaagcgctgattgcggccaaacgccgcggtgtagacgtgaaaattgtcgttgatgagaatggcaatacgggccgcgcaagtcgtgcggcaatgaatcttgttacgaacgcgggtattccgcttcgggttaacagtaactacaaaatccagcatgacaaggtgatcatcgttgatggccgtcatgtggaaactggcagttttaactacacggccagtgccgagaaatataactctgaaaacgcgattgtgatgtgggacgcgccagaactggccgggcagtacctgaagcactggcaatcacgctggaatcagggccgggattttaccccgtcttattga

SEQ ID NO: 97896 - DNA, 1032 bp, Enterobacter aerogenes
atgactgagttaaccagtaatattcaagatattcgccagcgcccccgccgtgagcagggggtatggctgacgctcgaaccacttcagcgctacctgagtgatcccgatgtgtgggagctgagaattaacaagtatcagcaggttgtctgtgaaacgtcgaaaggtcgtattttccacgacgatgagaaaattacggctgaatatatatcacgcttaaccgacacgctttgtggttataacggactaccgaaagagtccgttaataacgtgcttctgccggacggctcaaggggaattatttgcttaccccctgccgtactggagggaacagtagccatcgcgtttcgtaagcatctgcccgttgataagtctcttgaacaactccgcgatgagggccgtttcactggctggaaacgaaaggttcagggtgaagtagcccttcagccattcgagcaagaattgctggagttgctcgataaagacgacctcgtttcgttttttaaaattgcggtacgcaacaagctgaacatcgttgtatcagggtctaccggttcgggtaaatcaacgtttacccgctccctgcttcgggaagtgccttataccgagcgcattgtagtttcagaggacgttcacgaaattgggtctgatctgcatcacgaaatggtttatatgctgtacggcgatcaggatggccgtctggccccggcggtcagcctgaaagcgtgtatgcgtctttctcccgaccgtatcatgatgacagagcttagggatgatgcagcatgggattacataaactcgctgaataccgggcatccgggcgggatcacatccacccacgccgacgatgcaaaatccactttcagccgtattgcgctgcttatcaagcaaaccggcgtcggccagacgctggattatgacgtgattatgaaaacgctgtacaccacgatagatgttgtggtgtacatggaacaccgccagattgttgaggttctttatgatccagcgtttaaaaaagcgcaactttctctttaa

SEQ ID NO: 97897 - DNA, 1155 bp, Enterobacter aerogenes
atgagaaaagacagagaggaaaatttagattacctcgatgaagaagataccggcattgaggatgagcgtcagggcttcagtggttcccccaaaaaacgtattgccggtgcgcgggcctttgtcgggctgatggtgttgatcggttcggcaatggtggggtggttcatctataaccagatgcacgttaagaagctggccgacgatcccaaaaaggataaagagcaggttatgaccagctccttaccgcgccagtcttttgatgatgtgccgccgaccatcgacaacacgccgaaaaatagcgttgttcctccgttgcagacaacgcaggagccgcagcagcaggttgcgcgtcaaacattgaataaccagaaaaaggaattatcaccggaagaaaaaattatgcgcgcccggttaggggtgtccttcaacggtgttgatcctgagaaacaggctacgactgcgaaagaacaggaacgccggtcaggtcaggacaatacagaaaccagctcaaacagccaggcactggcgagccgaatgaaaccggcgcgtatggctgttgcccaggcatctgtaatgccgcatccaaatctgaccattgcgcagggaacaatgattccttgcggtacaaatacggaactggataccacggttccgggccaggtgaaatgtactgtaagccgtgatgtgtactctgctgatggtactgtaaaactgattgataaaggggctgtggtcactggcgagcagaatagcggtatccagaacggccagaatcgtgtgttcgttctctggtcacgcttgcgtaacccggatcagaccattgttaacctcgacagcagcggcactaacgctttaggtagtgcgggcgtacctggtcaggtcaactctcacttttgggaacgaatgggcgatgccattttcttctctgtgctgactgatggcatgaaagccggtatcgcgtcgattaacaacaacaactccgatgtgacgtttaacacaacggaaaacagtaccgaccagcttgctactgaagcattacgggcgaagattaatatcccgccaacgctctacgctgcgcagggcgatgccgtatccatctacgtagcccgcgatctggatttcagcactgtatatgggttagaaatgaatgactga

SEQ ID NO: 97898 - DNA, 888 bp, Enterobacter aerogenes
atgaaaaaacaattaatcgccggtttaattctggtcagcctcggcctctctggtcaggcgctggcgctggaagtgggaaaaggtagcccatacgactaccgtattaaatccgtggtgtataacccggttgacgtggtgcgtattgattccgttgccggtgttgccactcatatcgtggttgcgcctgatgaaagctatgtgacacacgcttttggtgacagcaatagttatgcgtttacccatgttgaaaacaacatgtttatcaagccgaaaggggaagttcctagcgatactaaccttgttctggtcacgaacaaacgcacttataacattgtgttgcactatgtaggtgactacaccacgaaagacgcgcagggtaacgttaaagccaactttatcaagacgccgtggagcatgaaaaatgccacgctccagcttacttacctctatccatttgaggatatgaaaaaggctaataaaacgctggaaagtaaccgcgtgaaaaaggcgttgaaagaccttcagaacgggccttacaacctgctttataaaatgtcagatgaagatgaatatcggactgtggccccggtaaacgtttgggataatttccgtttcacttacttcaagttccctgcaaacgcagatttacccgttgttttctatattggtgatgatggtaaagagcataccgttaaccagcatccagccggggaatataacaacattgttgtggctgaaacggtagcgaaagaatggcgtattcgttacggaaataaagtcgtgggtgtcctgaatatgaattacaacccaaatcttggggcgatcagtaccggcactacgtcaccagacgttaagcgcgtgaaaaagggtgagggggataaatcatga

SEQ ID NO: 97899 - DNA, 717 bp, Enterobacter aerogenes
atgctgaagaaaaacaaacatcaagcgatatcgcgggaagaactgaataagtaccatgaggaaactcaagggcttgagcgcgatatggttaatgagatccttaattcccgctctcgcgcctggaaaattgccacggcctttttcgtctttgccgttgtgagcatgattactgcggtcggcgtcattatccgttttgcgcagccgttaccggcatacctcaccacgattaacaaagatacaggcgaagtatcgcaggtgaaaattacccgcgatgaagcgacttatggcgacgtgatagaccagtattggatttcacaatttgttattcaccgtgagtcctacgactacaacagtattcaggttgattatgacgccatgagcctgatggcttccggtgatgtagccgatgaatatctctccatgttcaaaggcccgaaccgtattgataagcggttgggtgactctgaaagaacgaccgttcatatcaactcggtgatcaccgaccgcgaacacggtgttgccactgttcgctttaccacgcagcagcgcattcgccagcgtccgaaccctgagccgccgcgctactggattgccacgattgcgtacgagtacaaagcgttaccaatgaccgcgcagcagcgctatatcaacccgcttggcttccgtgtaacgagttaccgtaagaacgctgagaacgttggcgcagtgggaggctga

SEQ ID NO: 97900 - DNA, 171 bp, Enterobacter aerogenes
atggtgcatttcttcaaatacacggcaatggcacttatcgggctgctgttggccgcctgttccagtagcccgacgccgccgccagaacccaacatgaaaaagctggttgatgttaataagacgtatcccgccgagctgtatcgtgcagatgccgctaacaacggagagtaa

SEQ ID NO: 97901 - DNA, 1044 bp, Enterobacter aerogenes
atggccttttcatttacaacggatattttcaattacatggatacggtcacaaaggaatttgtggcctctaatcttggaattgttatatccaccatttcaccggtaattgggttggcgttgatttgcaaactcaccctggacgggctgtttacattagcccggccacacggtgagccgctctcatcgttgataaaaaaattcattgtgtggtcgatgataatcagctttgccagcgcgggcgggctgtatcaaacccaactggctgatgcggccatgaagatcccggatgagttttcctcggtactggttattaacggttcgtccggtggcactgaagatgcaatgggtaacaacatcgacaaggccatccatgacgggatgcaggttgcgcgcactgcgtttgataacgccgatatttatagcggttccgggctggcgtcattattcctggcttgcgcggtcattatctccacggtgttgatctgcggtattggggccgggctggtactgatggcgaagttactgctggcaatcactgtgtgctttgggcctatcttcatcttctgcctgttgttcaaaccgctgtatggcatgttcaataaatggcttggctcgatggttaactatgggctggtaacagttctgctgtcgatgctgtttggcctgatgattaagttctatcaaaaagcgctcgatgccgtcaccgcttccggggctgacagtagcctgttagggccggtgtttgcgtgtctgctgataatgattgtctcttacctgatcctgatgcgcattcctgaaatagcctcccgttggggggatggtatctctgcgggtattcaggagctgatacctaacgccggtggcggtggccgtggagctggcggtggtggcaatcagcctggtggtcaaaaaggcgctacaggtgccgggggcggtactggcgctaagactgcggcggctacggctgccggtggccccggcgcgggagcggccaccgctgcgggttcccaaatgcagggtttcgcaaagggttcacggcgctaa

SEQ ID NO: 97902 - DNA, 237 bp, Enterobacter aerogenes
atgaaaaaactgattttacctttagctcttttcctgctggccggttgtgattctgaacatcctgtttcctggtacaaggaacacgatcaggagcgtaaagcgatggtggaaaaatgccgtgatgatgcggcgctcaaagtgaagccagattgtcagaacgcgctggaagcagagaaagatttgaaagtgtttggcaaaagtgatgatggcctctcaatgccaaaagtcacgccctga

SEQ ID NO: 97903 - DNA, 708 bp, Enterobacter aerogenes
atgaaaaagacacttgcaagccttgttttagctctggctatttcgccggttgcagttaatgcgcaactggtagttaacgatcctgcaaatctggcccaggcgcttcagcaggtcacattaatgacgcagcaaattgaacagctcaaatctcaattgctgaagcaggagcaaacgctggcttccttaaccggcagttctggtatcggtaatttgctgaatggcgatattagtacgctgaaaggcaatttaccgtctgactggacgcaggtatacagcgacgccatgaacagcagttcaggtatcacttcatctgctcaatccatgctgaaggaatttcagtcgcagattgacggtatgaaccgttccgaagcgatgagtttcattaagcagaagttggcggagaaaggggcgtatgaccgtgtgatggcgcagaacgcttacaacaatgaaatggcggagctgaataacattcaggagctgaccaatcagattgactcaaccacggacatgaaacaaatcgctgaccttcaggcgcgtatccagaccgcgcaaggtgctattcagggggagcaaacgaagctgcaactgatggcgatgctgcaaacctcgcaagacaagattttgcaggaacaaaaacaatacgcccagaagcgctttgtcctcggcgctgacggtgaagatctttccatgcctaacgtaacggaataa

SEQ ID NO: 97904 - DNA, 2631 bp, Enterobacter aerogenes
atggccgtagcggaaatgaaaaaaaggggggtgaaagatttcaaaaaagaaccttcctctttgaaatatattccttactcctaccatgtgacgccccatgttatcagtacggtaaatggggagtacctttctatatttaaaatccgtgggcgaacccatgactgtgcctctgatgccgagctgattaagtggcacgctgatttgaatcagcttttaaaagggattggtagtgagcatgtaaagttatggactcacttacatcaccgcgaaattaataattatcctgacacgcattacaatatgacgttcccgcgtatggtgaatgaatattatcgtgatcagtttgatgatacccccatgatggtaaatgacctgtacctgacggttgtttataaccctgtgggggatgccgctcaaaagatgctggcaaagtttgataagccatcggccaacgagctgcgcgaaatgcagactgatgctattagtgcgctggaagatatttgtgagcaggtcatgaactccctgcgtccttatggcattgaccgcttaggctactacttccgtgacaaacgggggaacgtcattcctgaacagaaaaaagatgatgcagaagatgatgaggatattatcgatctgcgtgaagatttgctggccgatgtggaatatcaggacgttcaggaagataaagaagtctttagtggcactcaacacacctattctaaagcgctggagtggctctattacctcgtcaatggtgagtgggcgccagtgccggtttgtcgtggccgaatccgtgaatatttggctactacccgcccaacttcttcattttggggggatggtatcgagattcgcggtaccgacgaacgccgctatacgtctgccgttgaaatccgggattacgattccgatactgagccgggtcagatcaatatcctgatggaagcaccgtttgagtttgtgttaacgcaaacgtattgctgtatgtcccagcaagcggcaagaacttacctcactaaccagcaaaaagcactactggaaacaggcgatccatcctttacgcagataaaccagatgagtgacgccgttgatggcgttgtttcacgtacctttatcatgggctggcatcacctgacggtacacacctttggcaagacgcttaaagaggcccgttcaaacgccggtgttgccagaaatatgctgaacaactgcgggctgattgccagccaggtagggttagcttcagaagcggcatattatgcaaaacttccggctaatcaacacctgtcgccacgaccttgcccgctgaatagctggaattttctttgcttctcccccttccataattttatgtccgggaaagcaaataataacccgtgggggccagcgctgacgctgttcaaaacggtggcaaatacgccgctgtatatgaacttgcatgtaacgccagaagatgaaatgtctttcggtaagcgaccgctggcgcatacgttaatgcttgggcgttcgggggcaggtaaaactacgctgcttaacttcctgctgacgcaagcgatgaagtataacccgcgcatttttgcctttgaccgcgatcagggcatgatgccgatgattaaagcgttacacggtcactacacggttctgaaagagggcgttgcttccgggtgggcacctctacagatgcctggcaccaaagttaacattgctttttgtaagcgcctgatgcgcctgtgcgctgaaattaccaaaggcagcgtactcgatgctgatcaggttaatgaccttaaccgcgccgtcgatgctttgatggatgagaactccctcattccgacagatttacgcaccgtggatatgttaattcagcagatgccgaatccatatcaaacagcgggcagtaaacaaacactggcgtcattgcttgttccgtggactcgcggccatgaaaacggttggttgttcgataacgattcggattcactgaatcttggtgaatacgatatttacggctttgacctgacagatttcattgttgcagataatgagatcccccctgcaacacgtactccgctcctgatgtatctcaatttccgtgtgcgtcagtctattgatggccgtcgccgtgtgattcaggtattcgatgagtttcaccagtaccttgacgatccaattatgagtgtggaagtcaaacgtggccttaaaacagaccgtaagaaagatgcggtttacgtattttccacgcaagagccgaacgatgcgctggatagctccatcggtaaaaccatcatgcagcagtgcgtaacgaaaattcttctggaaaacccggatgcggattatgaggactacgttactcgcctcaaattgacaccggcagagtttgacgcgctgctgtctattcctgagaactctcgccagttcctggtgaaacaaggcagtcagagcgcgatggcgcaattcaacctagccccgcgcgttaagacgccggagaacttcaggaagctggataagatccttagcatcctgtcaggggaaacccaaaacgccgaaacactggcgaaaattattgagcaaattggggatgataaccctgataaatggcttgaaccctactggaaatctgtactcgcagcgtga

SEQ ID NO: 97905 - DNA, 315 bp, Enterobacter aerogenes
atgaatttatccggtaaatatccgttatttaaaggcgctacgcgactgccgacatttgccggtgttccgcgaacagtaattattgccaccttcatattttgtgcgacgttatttatgacgatccacctttgggccgtagttctttttggcttgctgtggtttattgagttttgtatcagcaaacatgatgaccgtatgtttcgtattatatggctggctatcatgacgaaagggctaaatatgattaactccccgtttactaaactgtggggcggctctagttactcacctactgattatggagataaaaaataa

SEQ ID NO: 97906 - DNA, 291 bp, Enterobacter aerogenes
atgaatacagcgattaaacgttttttcccgatggcaatgttcatgatggttgctctgtgtgttcctgagctggcgctggccgctggtgcagataccggtgaatcatccatgagttccattaactcatggttaatgacgtggattccgattgcgtccaccgttcttatcatcgtgagtgctatcgcatggatcgctcatatgctcccggcgagctgggcggttcgtattgttgtcggtctgattgttgtcggttccgcgtcttaccttgttggccttttcgggctgagttaa

SEQ ID NO: 97907 - DNA, 318 bp, Enterobacter aerogenes
atgcgcgtttatctcatcttgttgaagcagttagaagaagtattcaatcaaaacaaagttgttcggatcgctattcaacggatggataaaaagaaatggataccgctttttgatgtgaaaaatagtgagggaggggtaatcacttgctccctgcgagttcagtctggagagggggttaggacgtgggccgatctgcggatactggccgacatgctgagagacgattttaatgcaagagaagtggggcttttcctggatgagcctgattttatttttcctgatgatggagtgttagacaaagatgaatacagcgattaa

SEQ ID NO: 97908 - DNA, 741 bp, Enterobacter aerogenes
atgaagcaggttgttgcccttttcccactgttgattgctggccttttggatgccacacccgcaaatgcggaactgtctgcgccggttatggctctggcaaaacgttgtgcgccagaagtgcatcctttaactattgggtacctggttagccatgaatcgcgcaacaacccatacgcgataaacgtcaacgttcctaaaggaacaaaatcaccgttagccagacaaccgcgctccctggatgaagctgttaaaacgacaaaatggctaacggctcatggttataactttgacgtaggtttagggcaaatcaactctgcgaatttcccaaaattgaatgtttctgccgcagatttgtttaacggttgtaaaaatctcgaagctgctcaatacgttcttaattactgctaccagctcgcaacaaaagaatatgcgccggggcagtcagctttgagacacgctttatcttgttataatacgggttcactaaccgccggatttacaaacggttatgtatcaaaggtggttgctcaaattgggcaatcaaaacccgtaatccctgctctgaaagccgatgatggctccactgatgtggaaagtgttgatacagcgattgatgctgtgccggtagatgctgctgatggtgaagaacaaccaaaagacgccggtatgactgatgcctttggtggctcggataaagacgcttttggtgcatctgatggtgacgctttccggcacaagtag

SEQ ID NO: 97909 - DNA, 438 bp, Enterobacter aerogenes
atgagtaaaattattgattttcctaccggaaaaaagagggagaaaagggccaaagcgatccgagcgcgtcgtaataaagaagcgcagcagcggagcgaaataaccccctcccaattttggtgggttaagaaaataaagttactcaccgtgattaaacagtcggcacgttttctcttaatatatttagggttattaactgccgacatccttatctatctcctttttattctaggaaaactcctaaaattctttacgatgattggtatcatcgcggtgcttctgtttctggtcgtggaatataggaatgattggcattatacgcaatctgcattccatgccgcagcaatatttgttggcctgatcgccctgcgcatcgggcatgacaaactactgaatggcctaataaggcttaaatcctatctatccagaaaagggtga

SEQ ID NO: 97910 - DNA, 315 bp, Enterobacter aerogenes
atgaaaactaaaagcatcatcttcaccgctgctctcttactgaccggctgcgccagtcagtcacaagttgaccagttaaccaagcaggtgaatacgcttaaaacagatttgtataacctacagattcaacagcgcaatgatacacaggcacttcagcgcgaagtacagaaatcgcgccccatcggtgtttgctatcttgacggccaaccctactcacaaggagcggtcattgctggccgcatttgtgccagcaatggcgttatcgtcaatggcaaacctacagaagtttcatggcaggtttatcaccgccgctaa

SEQ ID NO: 97911 - DNA, 402 bp, Enterobacter aerogenes; identical to SEQ ID NO: 16839

SEQ ID NO: 97912 - DNA, 261 bp, Enterobacter aerogenes
ttgcttaaacgacataactgtcgcggtttgttttgccataccggaaaaaccggcgcagcttcaaaagctgttagcttcgccagcgatcggatggaaattatcagcggccagcgcctgattgatttactcacgcccggcagctccttcaccatcgcaaccgcaccgcagacaatgatgaggcgtaccgcagcaacgcgaggaacgaacaccattgtcgaggaagcggataaaaagacaaccgatagcatgagagttaattaa

SEQ ID NO: 97913 - DNA, 402 bp, Enterobacter aerogenes
atgaagtcagtaactatagaagcaaaaacttttgctgaaatgttggggataacagaaggtgagttaattttcgctattaagacaactggcacatttaaaaacaaagccatcccacaacctcatgagccacataaatcaaataacagatttttatattcagacgtaatgaagtttatcgaattattaaaagacaaagaaaacctacagaaaaaatatctgatgcgtttccgtcgatgcagttcactggatacactggaaaaggtatttgaaaatttacgcgacaaattagcagggaaagaactagatgcaatgatgagcgcctcagaccatcgtagagccgaaatcactcataatactttatgggataaagtcccggcatccgcatggcgaaatgtaaaataa

SEQ ID NO: 97914 - DNA, 438 bp, Enterobacter aerogenes
atggctattagcgaattatctctagggaagcagatacttgaaaagataaataatcatgatcgttttaattctaaattgcgatttaagattaaaattttaaatgtagttgcgttcactattctttttgctattggagataagtttaacgaactggttatgtgtgcgattgctttcgtggttttttttgtactaaccggtgtgtatttgaagtgcaagatggttattccatcgtcgttaatatttgattatttcgagcgaagtgctgatgatgaaggttttagaagtctttttatggagttgtttaacagcaaaaagtttcttaccgtccgggatgatcgcaagaaaattaatgattatcttcatgagcaagataagaagtttgaagaattgaagaaaatagaaactatcactcatggtatgaatggtcgcggtgaataa

SEQ ID NO: 97915 - DNA, 258 bp, Enterobacter aerogenes
atgctgaattttttgaaaaaaatttatagctacctggagtttttaggcgctcttatttgggttggtgttgggttgtattccatctggttagggtttagtaaattatttaaagataactcaatctctattggtggtattgaggctgtatctcttcttgacacaactccgtttgcaataatgttcattttttgtggggtgcttatcattacatttatatgggttgggtatatcagcaagagactaaaaaatgaagcgtga

SEQ ID NO: 97916 - DNA, 246 bp, Enterobacter aerogenes
atgactcaagtaatcattaaaaaatggggtaatagcccgtctgttcgcctcccttctgcgattgtcaaagctgcttcgttgaacgttgatgatgtagtggagctgtcggtagaggatggcgcaattactatcgtgcccgttaaaacgaaggagtattcactggatgctctgatggccggtgttactaacgaaaatattcatgaggaaatctctttcggatctccagtgggtaaagaacttttataa

SEQ ID NO: 97917 - DNA, 207 bp, Enterobacter aerogenes
gtgtttggccttatttttcacatcatgtttgggagtgttttcatagtaatgagcgtggcttcgctgattggccttgttttacacggccatgaatacacgccgggtcacttttggaacatgaccgcattgtgtatcgcatcgactctggcgtgggtatgggcgctttctgaagctaaagaagcatggtacatcctgaagagtcgataa

SEQ ID NO: 97918 - DNA, 585 bp, Enterobacter aerogenes
atgaaaataggctacgccagaaaatcaaccaaagagcaagacacatcccttgagtatcagatcgaggctttacaaaaagctggctgcgaaaaatggtatgcagagcaggtatcgaggggcggtaataagcgcctgaaaacaggtacaccagagttggaaaactgtctgaaagcgcttcgcgccggtgacacactggtagtatgggcgctagaccgattaggtggcactctcttgcagctcttgcagctcatgaatgagctacgcagcaaaggtattcactttgagagcctcaaagagcgcatagacacacaaagcccaatgggtgaaatgtactattccctcatcgctattttttccaatttcgaggtagccagaaaccacgaaaggacaatggccgggcttgcggccgcaaagaagaaaggacgcattggaggcagaaaaccaaagctatctccacaggacattaaagaaattaacgcgcttgttaaatcgccagaaattacggtaaaagagatcgcggcacgttttaaggtttcacgtccaacgatttacagacatattacccccgacagcaatactgattaa

SEQ ID NO: 97919 - DNA, 885 bp, Enterobacter aerogenes
gtgacagacaaaccattaccagcgaagcaaataaaaacggtaaacaccggcatcgcaattaaagagaatcccccaaaaggggatgatatggcgtttactcactcgatattgtgtcaggttggcctaccccgttctaaggtggatggccgcgagtttatgaggaaatcaggcgatgcctggctggtcgtccaagctggctggcttgatgaagggagcgggcctgtagaacaaccgatcccctatggttcgatgcctcgtttagcgcttgcatgggtatcctcttatgctctccgcaaaaagacccgcgaaataccgatcggtaagagtgcaaacgaatttctgcaattaatgggcttatcaggtggcggcagacaatacaaaacgttgcgcgaacaaatgcacgcgctggccgcttgccggttgcagctcggatttaaaggacgttctttcaacggtcagcccgtagaacaattcgatgcctggcagaaagacgaccaaagcggccagctaagtttatggccgggcgtgatgaccctatcagaagggtatttcaatgggctaattgatagcgccgttcctctcgataaccgcgctctgtacgcgctaaaaggctcggcattgtcgttagatgtttatacgtggctggcacatcgtttacaccgtatcgagggccgcccgattaaacttcactggatgaatttacgggaacagttcgcccaagagtacatgggtaaagaccctgacaaggatttcaaaaagaaatttcttccagctctgcgcgacgttctgaccgtatacccacaggcgaaggtagaaaaagttaccgggggaatattactttacccttccccgcccccgatcccattcaaggaagcaaaaaaatag

SEQ ID NO: 97920 - DNA, 270 bp, Enterobacter aerogenes; identical to SEQ ID NO: 12731

SEQ ID NO: 97921 - DNA, 216 bp, Enterobacter aerogenes; identical to SEQ ID NO: 12730

SEQ ID NO: 97922 - DNA, 825 bp, Enterobacter aerogenes
atgttatctagccgttttcgttctgcaaatatcctgcgttctgaccgccctcttaacgatgatcagatcatgcgttatgccccgtctatctttgccactgaagcgcatgaaagccgctccgaccgttacgcctacattgcgaccagcgaagtattaaatggtctgcgtgataacggttttcatccattcatggtttgccagactcgcgttcgtaacctggataaacgcgaacacaccaagcacatgatccgtctgcgtcatgctgggcaaattaacggcactgaagcgaaggaaatcatcctgcttaactctcatgatggcagcagcagctatcaaatgctggccggtgtattccgtttcgtctgccataacggtttagtgtgcggtgataccgttgctgacattcgtatcccacacaaaggcaacgttaccgagcgtgttattgagggcgcttttgaagtgctggatcagttcgataacgttgaaaaccatatggatgctatgaaatctgtcacactgaatgcgctggaaaaacgtattttcgctgacgcggcgttagcactgcgttatgacgagaaagacggccccgcaccaatcgccgcgagccagctccttgaggcgcgtcgtttcgaagatcgcaaagatgatttgtggacaacgtttaaccgcgtacaggaaaacatcatccgtggcggtttgagtgccagaactaagcagggcaaatcaacccgtacccgcgccgttaccggaatggataaggatacttctttaaaccgcgctttatggattctcagcgagcgcatgaatgaactcaaagccgcttaa

SEQ ID NO: 97923 - DNA, 480 bp, Enterobacter aerogenes
atggcttcaagaggtgttaacaaagtaattctggtcggcaatttaggccaagatcctgaagtgcgttatatgccgaacggcggcgcggttgccaatattacgttagccacgtctgaaagctggcgtgacaagcaaaccggcgagatgaaagagcagactgaatggcatcgcgtggtattgttcggcaagctggccgaggtcgccggtgaatatctgcgtaaaggttcacaggtgtacatagaaggccagctcagaacacgtaaatggactgatcaagcgggcgtggagaagtacaccacagaggttgtggtcaacgtcggcggtactatgcagatgttaggcgggcgcccacaaaacgcttctcagcctggtaatcagccgcaagccggccagcagttcagcggtcagccacaggccaccggcacagcggcagcggcgggaaacgagccgcctccgtttgatgatgatataccgttttga

SEQ ID NO: 97924 - DNA, 303 bp, Enterobacter aerogenes
atggcagttgaacgcatttcccctgaagaatggcagcgtatcgcaccggcattacgcacatgcagccaggtaacgatcgatatggcatacgccgtactggttgacggtcgcaaacaagtcgatgtggctaaagagttcgaccggtcaaagcaaacggtcaatgctgcaatcaggcgcgttactgcgatttttaacgaagttatcccggaagatgagcagttagaatttgtgcaagtctggttgccgccagagctggcgaagcaggttaaagaaatggctaaaccatatcagaataaaaattaa

SEQ ID NO: 97925 - DNA, 342 bp, Enterobacter aerogenes
atggcaaaagttagatttgaaaactcacttaataagatgatttttgaaattcgtggttatgaatcattttccgaaatagaaacagcattactagatttttgtgatgaaactatgggggcaaaccatcctgatatagtggtggaatatccggtttattataagcattttattaatgataaaatttcatatgagcatataggttatgtgaatttaggaatagatcaggatgatggttcttgctatacgattgaacatctgacattagaccgcaaaacacttaaaaaccactggcatcctttctatttttataaaggcgaatgtgagtacggatttaaaaattaa

SEQ ID NO: 97926 - DNA, 858 bp, Enterobacter aerogenes; identical to SEQ ID NO: 74968

SEQ ID NO: 97927 - DNA, 1389 bp, Enterobacter aerogenes; identical to SEQ ID NO: 91792

SEQ ID NO: 97928 - DNA, 423 bp, Enterobacter aerogenes
atgagcgcatacgtagtatctgataaagccatttctactatcgttaaaactctggtactgaccggcacacttcagcctgtcgaggctgtttcatttggtcagatgatgcttaatctgaatacccattctgttaatgttcgctatcaagaaagtagcccggcgcacgcttttgaatacagggaaccggagctaaatattaacgacccaaaaacacaaattcaggtgattgtctgcattgatgagtatgaatatcagtcctgcgagtttgccgaatactatgaaacgatggtgcatacagtcctcaaagccataaaatcagcgttacatgaggcttatactgaaacattgcctaatcccgctcggtggaaagctaaaaaatcctatgaactgccgggctactcagaagctgaatggagtttatga

SEQ ID NO: 97929 - DNA, 981 bp, Enterobacter aerogenes
atggaattgaacggtattttaaacccgaagtttagtgaaactctgaacctaataaatatcccaccaatacttaataatggattttattacatagaccatcatttattacaaggtataggatggaataaaacattcgaaaatgaatacttcaaaactcatagagatgaaatttctaaaatagaaatagattctgaaaagtacgaaggggaattaaatgacacattcatttgtccgtgttgcggggagttaagcgatgttaaaataccaaaggatgctgtcagaataaaacttctttgcgagaacaaagaacttcataaaattgttggtcttttctatttcgagcagtatgttagctcgtttatggaaaatgtaatagaagaaataaacaatttcgaaaaaacaataaatagtgcaaatagaccagattgtctaattcttgtagaaggtgagagcgaggaaatatttatacctataatagcattaagagctgacataaaccttaaagcaaaaaaaataaaagtatataattgtaaatcgaaacaaaaagtacttagtgactttttatcatttaaggaaaaatatccagatcttaaaatggtttgcttacttgactctgatgcagttaaagaaaaagaagaaatccagaggattataactgacaaactagacaaatatagattaattgatattgcgcatggtgcattcgaggatttatttgatctagagacatcgctgacggtcttaaatgcattacaccctaacggtgaagatattatcaaagatgatatagagcagtctaaggattttgcaagaagcataagcaaagtattattttcaaagaaaaaagagaaatttgataaggttaagtttgctaaaatgatggcatttaaattacctattgataaaatccctcacgaaattaaggatgtttttgataaagccctactgctttgcagcaaaagcaaatatataaaaaaataa

SEQ ID NO: 97930 - DNA, 255 bp, Enterobacter aerogenes
atgaaccagatattaaacgattatatagatctaaaaaaaatctttaccccagatctatttctcataataaaccaaatattagacacaacccaaaaccgttattacaaaaacaatattgaccatatgttaggacttatagtagaagattttgatggtattaaagaaagctttttaattaccgacaaacactatatttataagagcctatggaaattagtaattgattctctttatctgtctcttatacacatctga

SEQ ID NO: 97931 - DNA, 1323 bp, Enterobacter aerogenes; identical to SEQ ID NO: 87840

SEQ ID NO: 97932 - DNA, 1182 bp, Enterobacter aerogenes; identical to SEQ ID NO: 87846

SEQ ID NO: 97933 - DNA, 468 bp, Enterobacter aerogenes
atgggtaaaaaaataatgcaaagtcgcaatgatgaatatcataagttaactcgtggggaacgtattggctacgggatgggcgattttgcgcaaaacctggttttcggcacaataggcggctttcttgctctacatatgttgacggtgaatacgatcagtacggccactgcggggttcatttttcttttcgtacgaataatcaatgtgttttgggatccgatggttggaacctatgtagacaaaaggacgtcagtcgcgggcaaataccgtccctggctgttaagagccggcgtgccgctggtgatcctttccgctttgctttttgctcccattcctggcgtgagaggttccgtaccgttcgcctttatcatttatttagcgctggatttagtctactccctggtgaatatcccttatggttctcttaatgcctcactgacaagagatccggaatctattgataaataa

SEQ ID NO: 97934 - DNA, 1137 bp, Enterobacter aerogenes; identical to SEQ ID NO: 89736

SEQ ID NO: 97935 - DNA, 474 bp, Enterobacter aerogenes; identical to SEQ ID NO: 88807

SEQ ID NO: 97936 - DNA, 1047 bp, Enterobacter aerogenes; identical to SEQ ID NO: 88798

SEQ ID NO: 97937 - DNA, 822 bp, Enterobacter aerogenes
atgcgtttggcttctcgttttggtcgtactaattcaattcgccaggaacgtccgttaacaaacgatgaattgatccaggtcgtgccttctattttttctgaagagaaacacaactctcgtagtgaacgttacacctatatcccaacaatcacattgctggataaattaagggatgaaggttttcaaccgttctttgcttgtcagtcaagagtaagggacgaggataaacggggacatacaaaacacatggtacgtttacgccgggaaggcggaagcaaaggaaaagaagtacccgaaattattctgcttaactctcatgatgggtcatcaagctaccaaatgatcccagggatgtttcgttttgtatgtaccaatggtcttgtatgcggaacatccttcggagaaatccgcgtgcctcataaaggtgacgttgtcgggcaggttatcgaaggtgcttatgaggttcttggtatttttgataaaatcgcggaaagtgttgatgtgatgaaatccattaccttaacaaaagaagaacaacgactttttggccaggctgctctgacatataagtatgatgacgaaactaaagcgcctgtgagtattgaacaaatcattcacccgcgtcgttatgaagataaacaggatgatatctggacaacatatcaacgtgttcaggaaaatatgataaaaggtggattgcctggtcgcacccagaaagggaagagaacgacaacacgacccgtacagggaatcgatggagacgtaaaactgaataaagcattgtggcttattgctgaacaattcagggcgtttaaagggtaa

SEQ ID NO: 97938 - DNA, 309 bp, Enterobacter aerogenes
atgttcgagttttccggcgtatgtatcagtattagtcatatggaagaaagtgacatcagggtacttcaggtgctctcatctaataaccattcttacgatagttataatgagtggattcacgatacaccgtatggttgtgtaatcagaatgtatgattttaaacggcatattctggcgctaaagagaggtggcgtatcaagactattacgtaaaaatctcattcggatgaatcaggaaaaagggtatcttcttttccatttcgacagtgatgcagattattacccaggtattgattctgtagacttttga

SEQ ID NO: 97939 - DNA, 546 bp, Enterobacter aerogenes
ttgagtctgggcctgggatgggttaacgtatttccggtaattggcctcggagggaaaatcatgaagggaatggcgctggcgatcacacttttattattttcggatattacttctgcttcagactgttttgacatggctggaagggattacaaaattgatcctgatttactacgcgcaatttcctggcaggagtcgcatttcaaaattgacgcgatcggccgcaatcctgtctcaggttatgggtcaggtcttatgcaaattgattcacaacatttcaacgaactgtcgcggtatggaattaaacccgatcaccttcttacagatgcatgtatgaatatctacaccggggcttattatcttgcgaaggcattcaataaatggggtgtttcatgggatgccgttggtgcctacaatgccggatttaaaaagacaccgcgccaggcagccagacgctatgagtatgcaaaaaagatccaccgttactatacggctataaaagcgagtaaacagcaacgggctaatgagcagaaaacagcgatgaactaa

SEQ ID NO: 97940 - DNA, 387 bp, Enterobacter aerogenes
atggctagggttcaggcatatcccagtgatgaggtcgtcgataaaatcaatgccatagttgaaaagagaagagctgagggtgcgaaggaaaaagatattagtttttccagtgtggccacaatgcttcttgaacttggtctcagggtttatgaagcccagatggaacggaaagagtccggatttaatcaggcagagttcaataaagtattgcttgagaatgttatgaaaactcagtttactatttcgaaagtactggcgatggattcacttagcccacatataaagggcgatgatcgttttgatttcaaatcaatggttatgaatatacgagacgatgccagagaggttgtggaaagatttttcccatcacaggatgaggaggaataa

SEQ ID NO: 97941 - DNA, 690 bp, Enterobacter aerogenes
atgtgtgcgaaggatcgtagtcaaaatgcgtttgtcagtcaaacggattccattcattctttaggtgagatgcttaacatttcatcttccctgtcatttattcgtaatgcccgtggtgaattaattcacaccagcccactttttgacaaagttttcttaacacgtaccaatgttgactcatggttttcctctctttcacttgaaacaggtatggagttggtaaagtcagagattaatgttttatcagaacgttctgcttgcattgttagagatgttcgcattgatggcttcgtgtgggatgtttttatagaaagcctgtcagttaataatgagttctacagtaaatgggtctttgtcagggaaacctacgatgttggatttatttctaatccctttgctcacgtggggagaaaaattgaaaagtatatctccagtttgtcttccagaaaggataataaatggaaaatactcaatttgtatgccataggtttaacacattcaaaaatttctgctatcactggcgtatccgaaaaaacatcaagaaacgttgtgagtgattttaataaagaatttgcttttgatagcagagataaccttattctctcgttattttattctgttagttatcacaggctggcaatgaatatcatggatatattaaagttctgtgttaatgatttgttaaagtga

SEQ ID NO: 97942 - DNA, 189 bp, Enterobacter aerogenes
atgaagaccggtgatggcactgtaaaagcaacttttggttcaggttccagtgtcgtgaaatgggtgattctggctgaggttattgtcggcggcatcatgtacatgatgaccaaaaacgttaagttcctggccggttttgccatcctgtcggtattcgttaccgtcggcatgtctgttgctggatattaa

SEQ ID NO: 97943 - DNA, 369 bp, Enterobacter aerogenes
atgactacagcattatccattcagagtgctgaaatgagtaagggtgttaagccatctctgcgtacccgtctcttcagcaagaccaaaatgctgaaggcggcaaaagccgttctccctgttgctgttcttgcggcagctttccctgaagtagcgatggccaccaccaccggtaccgatctgatgaagtcaggcgacggtacggttaaagccacctttggtaaagggtcaagtgtcgtcaagtgggtgatcctggcggaagttatcgttggcggcatcatgtacatgatgaccaaaaacgttaagttcctggccggcttcgccattctgtcggtttttgtcaccgtcggaatgtctgtcgctggttactaa

SEQ ID NO: 97944 - DNA, 567 bp, Enterobacter aerogenes
atggaacacggcgcacgtctcagtaccacccgtgtcattggtctggggtttatctgtctcggtaccgtcacagtactgagcctggccaccaatgttattcagggcatcaataactaccgcctgcaaaatgagcaaaaggttgcggtgacgcccatgttatataacgcccctttcgcggtatcacagaaccagtctgatgcatcctatctggaacagatgggcctgagttttgtttcattgcgcctgaatgtcacccctgaaaccgtggatgctcaacacgaacaactactgaagtatgtgtatccggcatcgcagaacaacctgaaaattcagcttgctgaggatgcaaaacggattaaggacaataacgttaattccagtttttactggacgtttgtccgtgcctacccggtagaaaaccgtgttgaaattcgaggggaactgaagacctggatcggggattccaggccttattcagaaattaaacattatgttattcagtttaaccgtttagatgggatcagctggctgacacgttttggagaggtgactgatgaaaatcgttaa

SEQ ID NO: 97945 - DNA, 741 bp, Enterobacter aerogenes
atgaaaatcgttaaacccctgtgtgtatccgcctgcctgagcctttgtctgatgacaccggcaatgtctgccacggtaagcggaacgcttgcacccacagtggtaccactgacaaatggtggtcaggcaaacatcgctgtcagcaacacggatcctaatctgtttatggttccgggcgatcgtatcaccgccattaacagtctggatggaggtctgacgaaccaggagcaaacagacagtggcggagccatcctggcaaccgtcagtaaaaaaccattcactttcattgttgagacagagcgcggactgaatttctcaattcgtgccgttccgcgcgcgggggcaggccggaccattcagctggtctccgagctggctggtactcccggcccggcgaagtcttgggaagagtcttcaccgtatgaaagcctcctggtatcactgaatcgtgccgttcgtcagggtggaatgcctgaagggtaccagcccgttcctgtcacgtcggaaaccttaaccgttccggcagggctgagtgcaaaggcagaaaaagtgtggacagggcatcacctgaaagtggttcgttatgccgtggataacgtgtcgctttctccacgtatggtcaaagaaagtgatttctggcagccaggtacgcgcgccatcatgatcagcgggacagcgggtcccctgttgagtggcggccgcctgcaggtctgggtcaccacagcagagggagatcgctga

SEQ ID NO: 97946 - DNA, 1413 bp, Enterobacter aerogenes
atggccaacattaataagctggtcaagaacaaacagtttatgtggctgggtgtcatcgccgtatctgctgtcgccgttatcggtggcggtatgtatctctctgatctcgaggttggttccgatgatgccgcccagacgcagaacgaacctgcgccggacatgacgggggtagtggacagtcgtttcgataccaaagttcagcaacatgcgacaactgaaatgcaggcaacagcagctgatctgactaagcgttttgatgcacttcagaacgaagtgaacctgttgaataaaggtcgcggtgaagatcagaagcgtattgagcaactcactacggaaaatcaggcaatgcaggaccagttaaacaagctgggtgtgaagcctaccacgaccagtggtgagcctgttccgaaaccaccgatccctgcaccgggaccggagggtgagccgcaaccggcgaatttcccgccgcaacctgcaggtgctgtcccaccacccacgtcattctatccgggtaacgggactacaccggcgccacaggtcagttatcaacctgtaccggcccctaaccagatccaacgacgtacattcagttatgacaaaggtaagaaggcaaaaacactgccgtacattccttcaggtagttttgcgaaaagcattctgattgaaggagcggatgcgaatgcctctgtcaccggtaatgaatctacggttccgatgcaggttcgtctggtcggccgtgtggaaatgcctaacagcaaaacttatgacctgactggctgttttgttggcctcgaagcttatggtgacgtttcaagtgagcgcgcgattgtccgtacccgaaatatcagctgcatcaaaggtgataagactatcgatcagccaatttcaggccacgtgtcctttatggggaaaaacggtgtgaaaggcgaagtcgtgatgcgtaacggaaaaatcctcggctgggcgtggggagctggttttgttgatggtattggtcaggggatggaacgtgctgcacaaccatctgttggaattggtgcgacggcatcagtgggtgccggtgatgtgctcaaaatgggcgttggcggaggggcatccaaagctgcgcagacgctaagtgagtattacatcaaacgtgcagaacagtatcaccctgtcattccaattggtgccggtaacgaggtgaccgttgtgttccaggatggcttccagttgaaaacgattgaagaactggatgcagagaaaaacggtaagcagcaggaacaaaatcaggaacagcagccgcaacaacctcagcaggcaggtgcatccctgaacggcttcagtactgaccagatgctgaaacaactcgggaaattagatccccaccagttttcatctggtgccatgtcagaggggaacaacaatggctag

SEQ ID NO: 97947 - DNA, 237 bp, Enterobacter aerogenes
atggctaggcagaaaatggagaaaagtaatccgctcccggatacgtctggtcataccgttcctgttggagaaacgggggccggcaaaacaaccattatgtcgaaaatggtatttgccttgtcagatacaaaccaactggagaaagtttatggtgccatgagtccggaagagagagacagatttactcagaaaattaaagctaacaccctattcaggatgaacctgaaaaagagctaa

SEQ ID NO: 97948 - DNA, 570 bp, Enterobacter aerogenes
atgaagggattaattctgttaattcctctgggcagcgcattgcttttaaccgggtgcgcaggtacggagactgattttcaatgtaacgcaacaacatcggatacctgtatgacgatggagcaggccaatgaaaaagctaagacgaaagaggaacgcagtgaggcaaagccggttgcggccgggttgcctcgactggttgacggtaatttcagaacaacgtcagtaaattcatacccgttgccgcaacaacctgatttagtacaggtgaaagccccagcggctgtagtagtaaataaaagtgccccgttattattaaataacaggggttcggtaaataagcctcggtatatacaacccgttacaccccaggttatgcgtccggtgacagtatcaacatttacatcgcctcaaactgtaccgggccaatatccgagaccattaagaaaaggtgagcatacaacatcattatggatcgctccctatgtggattccgatgatgtttatcatcaaccaacgacagtgttatttgtggtgaccccatcagcctgggggcaacctcgtcttaattaa

SEQ ID NO: 97949 - DNA, 414 bp, Enterobacter aerogenes
atggtgttaaatgttgactttataaagtatctgtatttactgatgaaagaagattcatcatatatcattctgagtgttgtcctttttggggtgctcccggcactcctgttgccgggtgtatcgcgaataaaaaacaaaacgaagcgcttattatcgtttgtcattattatgatattttcagttgcaatgcttgccttactcaatcctgaaagcaaatacaaggcgatattaacaaacaagcaatatactgaatatacattacagcactgcaaggtatcggcatttaacgcgcagccagaaacaccctttaccagggcaaaagatgcctggcgttgtcctgatgacattacccgctatctggatgttgagtaccgggataagggcattcacagcctttccggtagaaaggagtga

SEQ ID NO: 97950 - DNA, 393 bp, Enterobacter aerogenes
atgcatgcttacataaacggtatggatgtgtggtgggctatcgtcattggtctggtgctattatttgcagggattattgggctgtttctggcgtgtattcttcccgaacattatcaattcaggggaaacctttttctggctggagcgttcactgcgttggctggctttgcaatctcttttgttatggtgaggttaacttatagtaccagcgagatagatgctggccggcactggaaaacagagtgcacccttattgagggaaatgtaggaggaagttttttgaatgaccccatgaatatattaatctgtaaaggggttgttgttaatgttccgatgcataaatatgataattacatttttcagtgggagcggaaagaggaggtgaataaatga

SEQ ID NO: 97951 - DNA, 300 bp, Enterobacter aerogenes
atgattgtaagatttttacttactgggatgttaatgttgtcgttttgttttggattgtcagtcctgatttaccaaggaaatgaaaataactacgctactcaggaacaactacagaatattgttcgtgaaacaccttgtgcaaagagaggattgcgtgaggcacttacatttcaggagggtggggcatctgaacctttaactctcggagctgcaaagaaaatcgcatcagcttgtaaagaagatccagaaaacattaatcaattaaaagcgtatcaattaaaagcgttgaatgatatgtag

SEQ ID NO: 97952 - DNA, 2640 bp, Enterobacter aerogenes
gtgagtctgaaccctattgagtcggtagccaaagcagttaatacattactcacagcgctgaagctacctgatgaatctgcaaaagcaaatgatattctggccagtatggatttccctcaattcagtcgcgttctgccatataaggattacgacagtgaaacagggttgtttattaaccagaagacagtcggttttattctggaagccagacaactacccggcgccaatgagcatattgtaggttcgcttgagaacctgctgagaacgaaattaccgcgtaatgttccggtcaccattaatctggtttccagcaagctggttggcgatgatatcgaatatggcctccgtgagttcagctggagtggtcctcaggcagaaaagtttaacgccattacgcgagcctattatgtgcgtgcagcagagaagcattttgcgctgccacctggaatggatttaccactgacgctcagaaactaccgtgtatttatctcctgcagcgtgccgcgtaagaaaaattcgaatgcgcaaatcatcgagctccagaaccaggtcaagataatccgggcctcattacaaggggcgcaaataccaacgaaagcgctggatgcccccggccttgtggaaatcatcagtgaactgattaatccaaatccaggtgagatgtaccggaggcctaaaaagctggacccttaccaggagctgaattaccagtgtgtggatgatagctttgatatggaagtgatggcgaatcatctcaacattggcctgctggacaaaaatggggtggaacgtcatacccgggtgcttaactatcatcttgcacgcgacccggaaattgcgtttttgtggaccagtgcagacaactacgccaacctgttgaacccggaattgtctgtttcctgtccctttgtcattacgcttaccctgatggtggaagaccaggttaaatcacagaacgaagcgaacctgaagtttctcgacctggagaaaaagagcaaaacgtcatacgcgaagtatttcccttcggttgagaaagaagttaaggagtggggggatattcgccagcgactgtcttccaattcctcttcactggtgtcctattttttcaacgttacggcctataccgaagacgatccggaagcggcactggccactgaacaggaaatactgaacagtttccgtaaggggggctttgaactcatcgccgcccgctatcagcagatgcgtaatttcctgtcgattctgccttttaaggcgggagaggggatattcaaggaactgcaggcggcgggggtagttcgccgtgctgaaagctttaatgtggcgaacctgatgcctgtggtggccgacagcccactggcaccttccggtctgctggcgccgacataccgtaaccaactggcttttatcgatctcttctacgccggcatgaataacaccaactttaacatggcggtatgcgggacttccggtgcggggaaaacaggcctgatacagccacttatccgtagcgtcattgatgccggtggttattcctgggtattcgatatgggggatggttacaaatcactgtgcgaaaacatggggggtgtgtatctcgatggcgatacgctgaaattcaacccgtttgcgaacgtgctcgatgacaataacttcgatgcatctgcagagcgtatccgtgaccagctttccgtcatggccagtcccaacgggaatcttgatgaagtccatgaaggcctgctgcttcaggcggtcaaagcggcctggctgaccaagcataacaaagcccgaattgacgatgtggtggatttcctgcaggaagccaaagacagcgaaacctatgcagactcaccgacgatccgcagccgtctggacgaaatgattattctgctcgaccagtacacggtgaacgggatttacggcagctacttcaactctgatgaaccgtcactcaatgatgatgcccgtatggttgtgctggagctgggggggctggagtcacggccatctctgctggttgctgtgatgttctcgttgattatttatatcgagaaccgcatgtaccagacaccccgtaacctgaaaaaactgaacgtcattgacgaaggctggcgcctgctggacttcaaaaatgagaaagtcggcacctttatcgagaagggctaccgtaccgcacgtcgtcacctgggttcgtatatcactatcacacagaacattgtcgattttgactcagatacggcttccagtgccgcacgtgccgcctgggggaactcctcatacaaaatcatccttaaacagtctgccaaagagtttgccaagtacaaccagctttaccccgaccagttcacgcagctgcagcgcgacatgattaaccgttttggttcggctaaagaccagtggttctcctccttcatgctgtcggtggaggcgcattcatcgtggcaccggttgtttgtcgatccactcagccgcgccatgtattcatccagtggtgctgactttgagtacatcacacaacgaaaacgcgccggggtgagtattcacgatgccgtgtacgaactggcctgccgtaacttcccggatgaaatggcagacctggaggcccgggtggccatgaataatacaaggagtgctgcctga

SEQ ID NO: 97953 - DNA, 378 bp, Enterobacter aerogenes
atggaaaaaaataccagaaaacctttgtttacccgacgtgcccttatcactggtgggctggcgattgccattcttgccgccaatgccgtggttacccgggtcatgataacgcacagcacacctcgtgttgtcgcgtttgatatgaagaaaacgctcgataacttcatggacagtgtcagccgtaagcaactgacggaaagccagtctaaggcactgtcggaccgttttaacgaggcactggaaaaaagtctggatgactggcaacagaaaaaccatgtgctgattcttgtttctcctgctgtggttaatggggcgccggacgtcaccctcagtattcagcgtgatatttcgaagcggatgcagggaggcagggaatga

SEQ ID NO: 97954 - DNA, 630 bp, Enterobacter aerogenes
atgaaaatgatccgcggggcgctctttgctatatgtcttgtctccccgcttacccaggcagctgatctgggtacatggggcgacctgtggccaatacaagagcaggatatgttatcgctgataacccagcgacttgaagcgctggagaagtccgggcggtgggggcaggagatggaggcctttaaggagcgggtgaagaccaacagccagcgcccggccccagtcgaggggataaagaaagcggataaatatgagcagcgctggtttgatcccagcatcaaattaactgaagacctgaaggaccagaacggcgtgctgttcgcccggaagggccaggttcttaatccgcttaaaaccgttccttttatgcagacgctttacttcattgacggtgatgatccggaccaggtggcctggatgaaacgccaggtacctgagacgttaatcagcaagattatcctcgttaaaggcagcatccccgatacatcggcggcgctcgacagccggatttatttcgaccagaacggcgtgttgagccagcgctttgggctgacgtcagtacccgcgcggatcaccccggccccctcgggagagcggctgaacatcgaatactttccacccacgcgataa

SEQ ID NO: 97955 - DNA, 993 bp, Enterobacter aerogenes
gtgaaacgtattttgcttttcatcgcggccagcctgctctggagccacagtatgaatgccgctgcagacccgtcgtgtgaaggacgatttgtaaaccccattaccgatgtctgctggcgttgcattttccccttatcgctggggagtgtgcaggtggggaaaggagatcagcctgacacgcctaatcccggcagcccgatacagtattgcccggccccacccccaatctttgtacgcattggtctggctatcgggtactgggaaccgatggccatgaccgacgtcagccgatcacctggctgcatggttaatctggggggcttcagtatcaatctcggtaaaacagggatggggacggccaaaaaggacgacaaacaggtcaacggggcgttctatcacgtgcactggtacaaatacccgctgacgtactggctgaacatcattacgtcagcaggttgcctggaaggcggagatatggacatcgcctatctctcggagattgacccgacctgggtggacagcagtctgaccacgatcctgaatccggaagccgtactgtttgccaacccgatcgctcagggggcctgtgctgccgatgccattgcaagtgctttccacttaccacttgacccgttgttctggtgtgccggctcgcagggctctatgtatcccttcagtggatgggccagtaacgaatccagcccgctgcaatcctcggttctgcttagtgagcgtatggcctacaagcttcaccgacagggccagattatggaaacggtcggcgccgataccgcagtctgttacgaatatccgtcgccgattatccctaaagagcgctggcgctatcagatggtgaatatgtatccggacagcgggcagtgccatcccctcgggcgcagtgtgatgcgctgggaggccggtcgcaacccgcctaataccaggaagaattttggttacctcatgtggcgcaaacgtaactgtgttttcctctga

SEQ ID NO: 97956 - DNA, 627 bp, Enterobacter aerogenes
gtgacacgactaaatatttttatcctcacgcttttactcaccggtaccgctgtggcagctggcagtccggggagtccgacaacggctgaccgggagtggctgaagcaccaggaagacttcagcgagcagttacgccagcacccggacaagcagccgcagcaggaactggaagcacagattaaccgtaaccccctggcgaaagccgatcgtcagtacatcgataatctggccagccagcaaagggcgtcagcacagggaaaaccctcggaaggtgtgctttacttcgtgtcgttttctataccggaggaaggtctgaaacgcatgctgcatgaaacccgccagtatggcattccggccacgctgcgtggactggtcaataacgacatgaaggcaaccaccgatgcggtgatgcggctggttaaggatggtgtgacagacggagttcagatcgacccgacactttactcccaatacaacattcgcagcgtgcccgccctcgtggtgcgctgcaaagcggggtttgatgtggttcggggcaatatccggctgaaacaggcgctggaaaaggtggcggagaaaggggactgtgcggatatcgcccgtaatatgctgggaggtaaccaatga

SEQ ID NO: 97957 - DNA, 1893 bp, Enterobacter aerogenes
atgagaatacttccggccattctctttgttcatgccctggttctggggacatttatctggtttgctggaccagcctgcgcggacagtaacacggattacagagcaggttctgactttgcaaaacaggtacaggggggcggccttgatgccctgaaaaacttcaacggcgagcagaatctgccggggtatacgaaagatcccgagcaaaagaaatactacggtggcgtgacagccggcggcgacagctcactgaaaaatgactcagcttcccagtgggccgggagtgaagtcggacaaagtattagcgagtcatttaccaaccggcctccggacagcatctctctggacgccccgtttatccagaacgccaaagatattgaatcaagatccgacactatcatcggcaataccggacaggagtgtaaggcggaaatcgttaaccggagtgaatttaaaaactacacctgtgaacgtgacctgcaggttgagcagtactgtacacgaaccgccacgataaccggacactatgaggaaaccacggttatcaaaacgtataccgtaccgaataaccagttcagctacagctatgacggtaacaaaagtgtgatgctgacatttcgttccccggccacgggaacggtcctgagtgcatcagcggcgctgcattttaatgaccggaacatgttctaccggatgacctggtggggtgtgaatcaaaattcctctgcaggtaaagataacagctggtcacttcccggggcgcccgggacgtttctgaccgaagggggtccctctccgcaggggatcatccttaaccagaactgcctcagcggcaaacaggagcgttgccgggactatgcccgcaaaacactgaactggctacagggtggttcagaggcctggatgagtgtcacgctgaccatgcgggtgacggaaaaaaaatgggttccggacgtgaaatgggtcgagttttgcccattcagtaaagatgaaggtaagcagaccacgacggaatgcattgagccgggtggaaaccggacggttaaccaggacgggaatgtttaccaggtctaccaggcctgctggaaataccgtgatacgtatattacccaaccttctgattacggttcatgccagacactgatggacaaccataattgtacgctggcatcccggcaatgcgccttcacttctgatgacggaacctgtcttcatgaatatgccacgtactcctgcgaaaccagaaccaccggtaaacagatgatttgtggcggggacgtgttctgtcttgatggtgaatgcgataaagcggccagcggcaaaaacaatgattttggtcaggcagtggcggagctcgccgccctggctgcggcggggaaggacgttgccgcactgaacggggtggatgtcagggcgttcaccgggaaagcgaagtactgtaaaaaatttgctgcaggcttcagtaactgctgcaaagacagcggctggggccaggatgtgggactggcgcgctgcagcagtgacgaaaaagccctcgctaaagccaaaaaagataagctgacagtcagtgtgggagagttctgttctaaaaaggttctgggtatttgccttgagaaaaaaagaagctactgccagttcgactcaaaactggcgcagattgttcaacaacagggccggaatggtcagctgcatatcagttttggtggcgccagcagtcctaattgccgcggtatcacggttgatgaactccagcgtattaatttcgactcactcgatttcactaattttatggaagacctgatgaagaaccaaaaaattcctgataacgatgcgctcaccaataaaaccaaagagcgtataaaagaaattatgagtcaacaatcctcgaaataa

SEQ ID NO: 97958 - DNA, 261 bp, Enterobacter aerogenes
atgaaagtaatattctcttcaggctgtgttacggatttcctgattagattatgcctcactgttattgtctcatcaccggtaattatctggtcatgggatacggtaaaacaaaccacgggcagtgatattatcgctgctgtgtttttcatcactatcctcggtgggctctggcttcttctgtacggcgttttatctttactgatagacctgctgaaaccagctggcgaaaacagaacaaaaagaaaagagaggggggaatga

SEQ ID NO: 97959 - DNA, 333 bp, Enterobacter aerogenes
atgaaagaggaaaaccctaaatggccggttatcgcgatcgttgctgtgtttatcttatttatgacgggtatgatgtgttacggactcatcagggataagcgagaggtactttttcatattaccaatcagttttatggtgttaattgtgaaaaaagttcaggtatcgcctgggtaataaaaaatgactatcgtcaggatttaacgtttcatgattatgcggtgttctgcaatgacactggtttttcagggaagcaaattaacacaggccacgaaattcagataaataaagacgttatctataacgctctgtccggtaataaacatcagaaataa

SEQ ID NO: 97960 - DNA, 234 bp, Enterobacter aerogenes
atgcgtaaatttcgcatgccagatctggatatcacgggaacctgggtggtggccgtcggcgtgtttttccatctcattgcccgtctggtgcgtaaacaaccagagatggctgttgagatgggagaaggactgggtatagccatgatgattttcggtggttaccgcatcattaatgccctgattgcgcaggctgagaaagaggaaaaggaccgtgaaaatcatcctgaacattaa

SEQ ID NO: 97961 - DNA, 579 bp, Enterobacter aerogenes
gtgaaaatcatcctgaacattaatcaccgcgcgcggccggtaatgctttgcttcgtcctgctgctgtcaacatttgctcaggccggcacgcttgatgaggtgaaatcgttgtacaacccgaacggtctgaccggagagtcggcagatcaggcgccagtggtaaccaccacaccatcccggaccggagcggctcctgtctggtaccgcctcagtaacggtcgtcaggtgaatctggcggagtggaaggtggtgctgtttatgcaggggcactgtccgtactgtcatcaatttgatccggtactcaaaacgctgtcaacgcagcatgggttttcggtctttccttacacgctggatggtcagggcgatcaggcattcccggaggcgctacccgctccacctgaagtgatgaagacctttttccctaacattccggtcgccacgccaaccacgtttcttgtcaacgtgaacacgctcgatgctttcccgatattgcagggcgcaacggatgctcagggctttatggcccggctcgataccttatttcagatgatggagacacctaaaaatggacaaggttaa

SEQ ID NO: 97962 - DNA, 2823 bp, Enterobacter aerogenes
atgcaggaagtgtatgttatcgccgggggcgactggtaccggcatgtactgaacgccgttgcggcgtttatgcagaccgaaaactggaaaattatcgagagaatgtgtatcggtttttccgttttgatcgtggcagggagttggattaaaaaacacagcgtgatggatatgctgggatgggtattctcgctgacactggtatcgatgctcgttttaataaaaacccctgtacaggtcatcgattactctgaaccctcatcggtctatcaggtggataatgtgccgattggccttgcgattccggcatcccttacgacgcgcatcgggaacgcgtttgtacagagctatgaaatggtgatgacactgccggacagttcggtctacagcaaaacgggcatgctctttggcagcaacctggtggcgaaaagtaccgattttatgtcgcagaatccggagattgtcacgctgttctctgattacgttcagaactgcgtgattggcgatatgctgctgaatcacaaatattcgtttgaagacctgatgcattcaacagatccctatacgctgattttttctaaccccagcccgttaagaggcatatttgacaaaaacaaccagtttaaaacctgtcttgatgcgtcagtcgatctgaagtcagcgctggtgctggatacccagacgggtggaaaaacctggaactattatgtccgccagatttttggtggccgtccgaaccctgatgtgctgatgtccagtttactgggcgacagttaccagacgttctatcacaacagccagtctgccagccagattatccgtcagaatgtcaccatcaatgcccttagaagtgggatacagagttatgcagctcgcagtgcagattcggcgagcctgatcaatattgccaccacatcatcactggaaaaacagcgtctggcacaggcttcaatggggcagcaggctctgagaacgttgccgatgatgcagaccgttattctcgggatgatgattggcatgttcccgattattgtgatggcggccatgttcaacatgctgaccatgcaggtgctgaaggggtatgttgtagccttgatgtggctgcagtgttggccaattttatacgcaatcctgaacagtgccatggcgttctatgctgccaaaaatgccacgccggtggtgttatctgaaatgtcacaggtacagttgcgtgactctgatattgccacgaccgcaggttacatttcgctgatgattcctggcctggcctggatgatgataaaaagcgtgggggcaggtttctcaaacatctacagccattttgcatcctctggcctcagtgccacctcacaggcggcttccggtgttgtggacgggaattactcttacgccaatatgcagacagataatgtcagcgggaacagctggaatactaacagcaccactgcatttggccagatgacccggcagctctctaacggtggtatgggaacccagacacgggatggttcaatggtctgggataccagtggcgccatgtcgaaactgccggtagatatcaacgtcggccgtcagattgccagcgcacagcagcagatggccagagaatcagaagtacaggctgaaagcgccctgcacggttataaccagagcgtgacgagcgcctggaataccctgaagcagttcggtaccaatatggggaccagctcctcgatgacgacgggggcagacagtactgaatcctctcaggatacgatggccagaagcaaaatgatgaatgctgttgattcttacgcgaaagccaatcatataagccgtgatgaggcattcagtcagttaatggataaatcagtaaaaggtgcggtttctggcgaaatttatggaagcgcaagagcaggcgctgggtttgaattattcggtacaggtggtcatgtggaaggaggtggaaaagtatcggttagcggtactgccagttctggctctcaggataatactagtgaatctggtcgccattctaatacgaataatcacgatagcagcagccaagcggttaaagacttcagagaggcgtcggattacttaaccagtcataagacaactacttccggaaatgttactgataataatgcatcttcccgtgttgaccagtttgcagcgtcgttgtccagcgcgaaaaacagctatgaccagtatacgacaagcaaaacccgcagccatgaatacagtgatatggcatcacgcactgaaagcatgagtggacagatgagcgaaaatctgacgcagcaatttgcgaactttgtccagaaacaggcgccacagaatgcggaagccattctgactgataccagttctccagaaattgccgcacaacgagaggccctggccagagattttgtaaaatctcaggtagagccaaaaattgatggggcatatcaggaggccagaggttctctcgggaatgatatgggcggtgtttctgctggaggcggtcgtgacggtgttgtttccgattacggtcagcattcgagcagtattgacaatatgactgcacaagctggcataaaacatgatgtaggcaatggcgtcgaagcgctagtatctgaaaatcgtcaaattaatcaggatgctcgacaaaaaataactacgcaggggcaagaggtacagaaacaacatacagatctgcaaaacaaccataatttagagggaaataaaattgataatgaatacaataggagaacgtatgaacagaaagctcttcctggtgcagatacaagagatgagctcttaaggaaagctcaggactacgagaagaatcataaaaaatag

SEQ ID NO: 97963 - DNA, 591 bp, Enterobacter aerogenes
atgaagaaaatggtattgctgtttatagtacaggccatctcgtgtcttatcggaaggtgggatatcccttcaaccctctttgttacgttaacattggctatatggtttttgattttttactatgtttttttgaaagttgggaaaggtaagtccaaaagtgaagctaataatagattttatctgtatttagtggtcgtttgtgtgagtgcttttgccagtcctgttatttgcttgcttttaagtatgatgtatccattgtttgcaatgaataaacactgtcgttttgtatcctttcacaagaaaggagtattcaagagaatcggctatggcatggggatggatagaaacaaccaagtatctccaaatccttattcaggttgtcttgaacataaggctaatttatttgaatcgcacgagactctcgatgcatcgtctttgacgagtactgatgttaatgtgtataaaggctttgagacaccagtagatacttcacaatcaacgtttaccgatgttaatccagccagtgggcttcctatgatagggaatattgatgttgccggtaatccatatggtattgaccggcatgattga

SEQ ID NO: 97964 - DNA, 732 bp, Enterobacter aerogenes
atgaaacttgataaagttatggctgttgcagtcatgatttcagttttggtgctttctggatgtggtgcaatgggtaccgcaattaaaaaacgaaatctcgatgtcaaaactcaaatgagtgagactatctggttagaaccctctaataatcgcacggtatatctgcaaataaaaaatacttcagataaagatatgagcggactgcaggctaagattgccagcgcagtgacagcaaaaggttaccaggtggtgactaatccggatactgctgggtactggatacaggctaatgtgctgaaagcagataagatggatttgcgagagtcccaggggtggttaagtaagggatatgaaggggctacgacagctgctgctctgggcgctggtataacggcttataactcaaattcagcaggggctacattaggagtagggctggcagctggactggttggaatggctgcagacgcgatggtggaagatgttaactatacgatggtcaccgatgtccagatcgcagaaagaacctcgacaaaggtccagacagataacgttgccgtattgcgccaggggacgtccggatcgaaggtacagaccagttcagaaacaggtaatcagcataaataccagacccgtattgtctcgaatgccaataaagttaatctaaaattcccggaagctcagccggttcttgaagaccaacttgcgaaatctatttctaatattctgtaa

SEQ ID NO: 97965 - DNA, 402 bp, Enterobacter aerogenes; identical to SEQ ID NO: 16839

SEQ ID NO: 97966 - DNA, 1176 bp, Enterobacter aerogenes; identical to SEQ ID NO: 91318

SEQ ID NO: 97967 - DNA, 513 bp, Enterobacter aerogenes; identical to SEQ ID NO: 89287

SEQ ID NO: 97968 - DNA, 549 bp, Enterobacter aerogenes; identical to SEQ ID NO: 89286

SEQ ID NO: 97969 - DNA, 597 bp, Enterobacter aerogenes; identical to SEQ ID NO: 89285

SEQ ID NO: 97970 - DNA, 600 bp, Enterobacter aerogenes
atgacgaaagcaaaactggatagtaatctgattgctacggtagctggtgatattgttgtttataattttgatggggaatcgctggagtttactggggaatccactgaatatctgactattggggttgggatacccgcaaattcaaccatcgataaaccagacagcccaaaagaagggtatgcaatctgtcgtgatgtaatttcatcagcgtgggtatatattgaagaccgacgcggagaaacagtatattccatcgagacgggtaatgaaatggaggtgcattcgcttggtggttatcctgataatacaacaacacaaaaaccgttaacaccttatgacaggtggaatggtaataattgggtaacagatactgaagcacagcatgcggctgaagtgaatttagccagtaataacaaaagagaactattgcaggaagctcacgagaaaatcaacttctggcaaaccgagttgctgcttggttcaatttctgattctgataaagatagcctgaaaaaatgggttgaatatattaaaaatctgcaggcaatagatataaacaatgccccaggcattcaatggccggaacctcctgaactttaa

SEQ ID NO: 97971 - DNA, 714 bp, Enterobacter aerogenes
atggcgactaatgattttctatctttcgcaacggggagtaatgcaaatgttacccctcaatctgactggaaaactttacctgctgtaaccagtgggtttacatccggtaaagcttcatcagctcaggtaaataaggcaatcagacaggcaaccttcatagcatctggcttagcgcagtttgtatctgataccttattacaggatgttctggataacggaaatagtgcagcttttgtaacggcattaaagcaagctattgtaaacggatccgtaccagctggtattcctatgccgtggcctgccgaaacgccacctgctggatggttaaaatgcaatggcgcaaatttcaatacaagcacttatccattactggctaaagcttatcctgcgggaaaacttccagacttacggggtgagttcttgagggggtgggatgacggaagggggcttgacagtggacgcgcaatattaagcatgcagggagacgcaatccgtcaaatgacagggagcgtggctaacgtctggacagatgacgcgaactcatctgtgggggttcttgcatataatggcactggctttaatcttgtgcctcttggctcaggtagttccgttcaattccgcaatctgaagtttaacgcagcgtctcaggtcccaacggctaatgagaaccggccgcataacgtcgcatttaactatatcgtgagggccgcataa

SEQ ID NO: 97972 - DNA, 654 bp, Enterobacter aerogenes
atggcaatatcagataaaagccgtagtggcgcactagcagaggttctggcatcagagcgcaaagcccttaacgagcaattgcgcgttgcgttaccggggattattcaatctttcgatcctgaaaccgttaccgctgtagtgcagccagctatccgctacattgagcgagataacgatggcaacaaatcaacacaggattatccattgctggtggacgtcccggttattttccctcgtgggggcggctgtacgctgacattcccagtcaaagagggtgatgaatgcctggtgatatttggtgaccgctgtatcgatttctggtggcaaagcggcggtattcaggagccggtagacgacaggatgcacgatttatctgatgcgttctgcatcgttggcccgcagtcacaggcaaaaaaaatcagtggcatcagtaccagctcggtagaactgcgtagcgatgatggcggtacaaagctgagccttaatccttcgagtggtgagattaacggtaccgcgccaggtggattcaatctgaatggcctgaaaatcctcccggatggtcgcctgcaactggtggatggttccattgtcgataagcacacgcacggcggcgttgaatctggtgggagtaatacagctccgcttgggggataa

SEQ ID NO: 97973 - DNA, 186 bp, Enterobacter aerogenes
atgtctactgaggtgtatggaaaagttgcgtcgctcacacctgtggcgagatttattcgtgacttcctgtacttaaagggtcggaatcccatcgatgcaacagagctattaattcaggaactggatgggcttattgatgttatcgaaacaggatttcattccataaaattaaaatttgacaagtaa

SEQ ID NO: 97974 - DNA, 906 bp, Enterobacter aerogenes
atgaatagtgtagcaatagcagatcgagcaatcaacgtgccttttcacggggcgcatctttacattgtcaaccacaatggcgaaccgtacaccccgatgaagccgatcgttgaagggatgggtatggcttggcaatcccagcttgagaaaatcaaacaaaggttttcttcaactataacggaaatcgttatggttgctggcgatggcaaatcacgacctatgatttgcctcgcgctgcgcaaactgaatggttggcttcagaccatcagccccaataaagttcgccctgaaatccgcgacaaggtcatccagtaccaggaagaatgcgacgatgttctttacgaatactggaccaaaggtcaggtaattaatccacgcaaaactgtgaaaacagcgccgggtaaaatcacctcagaccagcaggaagccatcaagcagttggttctgacgcgtggacatgcgttgccaaaggaaaatcaggcacgagccattatcaccatgtggtcgtcgctgaaatctcactttggttgcagctacaaagatatcaatgaggagcaatttacagaggcgctttcattagctgctcgtgttcctcttgagggcgagttgcttaacaagcaagaaccatccccagtgatgccgatgatcccattctccgcaaacggtgaggtcatattcaccttccgcgatgggtacatagtctcagcaacggcagtcaaacccaatgagtttctgacgagccttgaggggcatactgaaatgctacttcgtcgcgggtatgttgtttgtcaccacaaaaagctcagaacggcccagatagatttcatagggcagatgtgcgacgagtctgcaaggcttgaggctgagtggacgctggcgaatagaaatcaaacagtgaggcgataa

SEQ ID NO: 97975 - DNA, 318 bp, Enterobacter aerogenes
atgaaaggtgccagccaaatagccccattcggtcttcggatgccagaggatttaaaaacagctatctcagaaagagccgccaagaatgggcgatcaatgaatgcagaaatagttcaaatacttgaagacaggctttctactgagcaagcactagaagactttattattgacgatgccaaacgttcaggcggtgttcagtctctcagcataaaagagcttgaggaaatgttggagaaaactgttaggaaagcattcagtgaatttacactatatccagttgatcgcgagggcagtgacgatgggaaaaagcccacctga

SEQ ID NO: 97976 - DNA, 342 bp, Enterobacter aerogenes
gtgaggaacgtatttttcatactgggcctgctattgtcagcccagtcaattgcagcagttcagtgtggtgggtataagctaaccattaacgataatgaaggtcttgttcgtattaatggcgatctcgttactagccaaaaggttagatatcttggcaaacaaggtgatgaaggaaatgccaaatggagtatggggttaatgcctgctagtgatggaaacaattatgggttcgacttcattaagcgcaatgggaagtcttggctcaacgtccagttgctgcagcacagtatggacgccccgaagattatcggatcattcccctgtaaaaaggttgctgattaa

SEQ ID NO: 97977 - DNA, 1041 bp, Enterobacter aerogenes
atgtctcagaactggatgcgtcatttcgagttgcagcttgtcgataagaaagggaatgccactgactttggtagttttaaggttacgtttaatattgactggtttaacctcagcagtgaaacgcgggtagggaccttcaaaatctataatttgtcagcagatactgtaaaccgaataaccggggaagaattttcccgaatcagggtaattgctggctacgatgggttggctggcgctggtggtactgaagaagatggtcagagtgaaggtcgcaactatggtctgctgttcgatggtgaaatccgctacaccataaccggcaaggataaccccattgatagctttgtgctgattcaggcggcagattcagatcgggccttcgtcaccaccatcaccgcacaaactcttgcagcgggttataccgtcgcagatatgaatgcagccctgatgaagaacttcaacgtaaacggagtaacagaaggccgcacaccaaccatgccagcgacagtttacccgcgagggcgcgtgttattcggtatgactcgtaatctgatggacaacgtggcgagccagtgcaatgccgactggatgtttgttgatggtaagcgtgaaatggtcgctcgcggtgagtatgtccacgacgctatcaagctgaatagcgatacggggatggtagggatgccacagcaaaccattggtaacgggataaacgtcagggcgctaattaaccctaacatccgcgttaacgggctgattgagcttaaccaggcatcggtatataaaacggcgttgccttctaatgatatcagcatggctccgggccgctactttgatcaaaacgtaaatgggaattcaaacgttgacctaccagcttcgcagcaaatgacagccagtatcgctacggacggcgtttatattgtgcgcggcattatgtacactggggatacaaggggccaggcgtggtacatggatatgatgtgtgaagcgcgtggcgcaatggatctccgtacacaatcttctctcgaaagaggtgctgggtga

SEQ ID NO: 97978 - DNA, 303 bp, Enterobacter aerogenes
gtggaagttatcgaaattcctctatacccggataaccagcagttcagcatcattctggttgatgtaacctaccagataagcatcatctggcgcgaaccctactggattatggatatagcgaataattcaggctctcaggttgtaaagggagtgccgctggtgactggtgctgatttgctggcgcagtattcctatctcgggttcggctttcaactcgtcgttgtttgcgacgatgccaaccaggattatcccacccaaacagatctcggcactggcagtcacctgttggtcgtcacggagtaa

SEQ ID NO: 97979 - DNA, 603 bp, Enterobacter aerogenes
atggatatcctttctactctatttcagcagcaatcccgtcgtcttggcccaagtaccaatttaattgtgccaagtgtggttatttctgaaaagcacagcgacaccctggaaatcacggagcaccccgtggaggttggcgcggccatttcagatcatgcctataaacggccctcagaggtcgttatggaggtggggtttgctggtggtggttcgctgctggatttcgttgacacatcctctctgggtctcacgcttggtttgagcccaagagaggtatacgagaacttaatttccctgcagaacagtagggagccatttgatgtagtgaccggaaagcgtatttatcacaacatgctgatccgtgcgattgaggtgacaactgaccgcgccactgagaatgtgctttctgctgtgcttacattgcgagaggtcattattaccagcacgacaactacgcaagtagcggcaaaatctgacatgaaggatggtgttaacacatctgcagtacagaactcaggagttaaaacaccaaagccggtaaacgaatcgctgctttccaatttcatgaattatggaaaatctttcctgaatatagggggttaa

SEQ ID NO: 97980 - DNA, 495 bp, Enterobacter aerogenes
atgtctaacaccattctttaccggatgcctgcgggcatcgccgggggtatttctcgcccgcaggatttaaccgttgaaccgcatattcttgatgcgtcaaaaccgttcccggcttatgggctgggcgggaagattgttggaggtaagttcgttcctgttgaagcaggcgatcccgttacggtaatggcaggtatttttgttcgtccttatccgacggcttctcagcccgataagatccgccaggttggtactggctataacttcgctggtgacaatctgaaacgcggatatgtcaccgtcaacattggcggggatgcttcttctgttgcactcaatgccccggtatttatgcgagttggcaccccgacagcttcaagcccgcttggtgccttcctcgccgctgccgatgatgcaaacaccgttcagatcaccaacgcctatttcaatggtcccggcgatgccgatggcaatattgaactggcatataacatttaa

SEQ ID NO: 97981 - DNA, 216 bp, Enterobacter aerogenes
atgttagagaactactttaagtcaggcgccgttaaaactgatgatgaaacaaaacgcttaattgctgttcaagccgcccttgaaattgcgaaggcatcggttgggagttcagacgcagcttcagcctgtaaaactgatgtcgagcttaaatatgttgctgagcacctagcggtacttgccgatgccattcaagaggcgttgaaggttaaaaaataa

SEQ ID NO: 97982 - DNA, 315 bp, Enterobacter aerogenes
atgcaacgtatgaacccaacagatggtcacaatctgccttactggtggtctgccttgcttggtttcttttctgtcctgagcctgcaggattacgtttttatcattggtgcgctgatatctgcgttcttcacgatcaagacgtactacgcaaaaaggaaggaagagcgcgagcggcttgatgaagaaaaaaaaagaactcagttgttggctagttatctggctgaagctgccagaaagccagacagcgatcgcccagctgcggttgaggtggtagctgaggcaatgaaacgtattgcgagtgatgttcaggggtaa

SEQ ID NO: 97983 - DNA, 942 bp, Enterobacter aerogenes; identical to SEQ ID NO: 91634

SEQ ID NO: 97984 - DNA, 309 bp, Enterobacter aerogenes
atgacagatattcagtacgcttttactcattttttaagaatgttcgttgtaattactgttattgccgttgggtatggatatctgctccttagtatccttacaaccaggaggctggcgtttattctacagttgttgtctcttgttgggctcagtgcgttattttcattcctggtgctcaggagtgacagtatgtggtcaggggctccggaagtgtccctggcgatactcttcggaatgttcacggcgacggttgttttttacatgttcagtctgctgttacgtgcctttgagcgacttatagcccaatga

SEQ ID NO: 97985 - DNA, 258 bp, Enterobacter aerogenes
atggctgaagttgaagccgggcaatcagcgccggaatcgataatgtctttatggattgccggggcagggtatgcggtgtgtgtcgattttctcagtgacaaaccaatacgtcgctggagcgaggaaaggaaagctgcagcccgtcgtcgtaatctgacagcgagagtgaatcgtatcgccccgttatttgctgacgaactgatcgagagggaactggaggcccgtcctgcatattttcgtgggatatcaccgaagtaa

SEQ ID NO: 97986 - DNA, 510 bp, Enterobacter aerogenes; identical to SEQ ID NO: 97383

SEQ ID NO: 97987 - DNA, 276 bp, Enterobacter aerogenes; identical to SEQ ID NO: 91793

SEQ ID NO: 97988 - DNA, 909 bp, Enterobacter aerogenes; identical to SEQ ID NO: 85078

SEQ ID NO: 97989 - DNA, 276 bp, Enterobacter aerogenes
atgtatagaagtaaaaaatggcttgcggctgttgggaagattgaacaatgcgttctgtgtgggcgatggggaacacaagttgcccacaggaatgaagggaagggaatggggcttaaggttgatgattgcgcgaccgctgcaatctgcgttgagtgccatacggaaatagataacgggaaaaaccttactcgtgatgagcgtcgccagttgatggatcgcgcaatcgtcttaactctcattcaaatagcccgtatggggctggtggtggctaaatga

SEQ ID NO: 97990 - DNA, 498 bp, Enterobacter aerogenes
atgaaagatatcccaggatttgaaggacgttatgcgattactccagatggacgtgtcctatccaaatttaaggggtggaagcctctgcgtcccggaaccaaacccggaggttatttattcgtaggtctttatgccgatggttctcgtgtagcggtttacaagatggttcatcgtttagttgccgaagcattcattcccaaccccgaagaaaaggcagaggtaaatcataaggacggagataagcggaataatgatgtaagtaatctggagtgggctacccgttctgaaaatgccattcatggtgttgcccatgatttgctaaagcatgggtttgaacatccatcaagcaagttaaccccggagcaggtattggagatttattcagcgaaaggaagatatagagacattggcaagaaatatggagtctgcgctcagacggtttgcaacatcaaacgcaaatcaatatatagccgttttctggaggccgccaatgtatag

SEQ ID NO: 97991 - DNA, 459 bp, Enterobacter aerogenes
atgactgatatcaacagactgatagccagcctcaaacgccgctcagcccacgcaaaagagtttggcgacgacattacgtttgtaaagttgaaagacctcgacgcgctggtagaggcgctggagaaggcgcagcagcgaattgatgaactggagaacgatgaagttcgtcagcgcttggctaacgctgagcatcaactatatatggctgaactggctaagcataacctcaaagcaagtcgaaaagcccagttccgcaagcgcaaggcggctgagcagcgcatcgccgagctggagtcccgcaccgtgaagctgccgaagcgctccgttggcgaagttatgcacatgagcgggtttagccgggattatgccgagggttggtgtgccggtaatgacaacgccattcatgaaatgcgcgtcgctggagtcaatgttatcgaaggaaagcagaataatggctaa

SEQ ID NO: 97992 - DNA, 708 bp, Enterobacter aerogenes
atgaccaaatcaaccataaccagagagccaattactcactacctgaaaatttacccggagttcttctctgctgtgtgtactggcgttaaacgtgcggaactgcgtaaaaatgaccgtgattatcgtgttggcgacactcttcacctgctggaaaccccgcgcggttgttgctctccaacaggagaattcatcaacgctaaaatcactcacatagctgatgtaggcgagttgatgccgggttatgtcatgctgagcatcgagcgagaggctttggatagcgagtcggtgatattgtaccgggagcgcaatccttacaacggcttaaccacgggctggcaagagctcactgaaaatgagctctcattcctcaaagagaatgccggggaaaatgccgagttcctcaagctctatcgccacgcgcagccagctgtaagcaagccatggggttataccagcggcatattaaatccagcagttggaatggcatgtgttacaccaacgagggggaaaaaccaattccctgtgtaccttgatccgcagccagcgccggtagtgccggatttcaaaaaactggccctcgaactggttggtaatctggtcgattgcggcggtctggatgaaggggtgaaagaacggtatctggagtgggcagagaaaacctgccgcaccgccatgctcgtagccgccccgcaggaggtgaaaccataa

SEQ ID NO: 97993 - DNA, 189 bp, Enterobacter aerogenes
atgaacttgaaatttcgctgcccgcattgccgaagccgccgtgttgaggtcgatgagttcgatccgaaggaggaacgcatcatctgttctaactgtcttcgagaggtcaaaccttccgaacttgacacctacgtcgaaaagacagtcgataaactcatctcggctctgaaaaacagaagggacgagtaa

SEQ ID NO: 97994 - DNA, 207 bp, Enterobacter aerogenes
atgaaacaccagcattacggtactgaagaaagacagcgtaataaagtcatccccggcaccatgattaaacataatggcagaatttacagagcatccgccaacgttgaaaaaggtctttatgttcattcagtaatggaacaaaccattataaaaaccgaatatgtcgagatactgttaaacggacatggtgaagcgttaattaattaa

SEQ ID NO: 97995 - DNA, 306 bp, Enterobacter aerogenes
atgtttggtaaagttgaaatcaaatctacagaattcgaattacgtcgtgttaataatgtcattgcaactttcaaatgtaatgactctgtatctggcgtcatgcactgcccgtcaaatggtccaattactatcgttcttgatggtggttatgttctgggtgaattccactgcgaagtttgtgccatacgtgaaatcagccttctcaccatcaatattgaggatgctgataaacattacggagccagctactcgcgatacaaagaactctttggaatcggtgcgtcctgtcgctccgtttacgcctaa

SEQ ID NO: 97996 - DNA, 348 bp, Enterobacter aerogenes
atgagcaaatacagaaaaggcgcggtatatctccgcaaaatgaaagccggagataaatcgaatgactttcgcacttatatgcgcatggcgatgttcagtgacaaaaaagcctggaaacaccccgagaagattaaacctgtcgtgctcgttcaatatgggatgaagaatatcgtaagcgtcttcatgaatatggatgacgctaccggttgcctgttcagtggggcgattgaaaagcgagcgcgtaactcccgacacaatccgctccgcggtatgcgttacacaaaaggcgacctgaagaaagcttttcgaaagtgggcattcaaacacaacgcggaacatgccgcatga

SEQ ID NO: 97997 - DNA, 225 bp, Enterobacter aerogenes
atgaaattcatcaaattaagccagcaagcgacgattgagcgccagggtaaatatggctgggaaccagaaacagtttacgaaccggtatttgtcgctgctgcgcatatcgtgagcatggctccgcatggaattacaactgtgaaaatgtcctctggcgagtgtatcgacgttaaagagactcctgaagaaattatcgcattacttgaaggtgaggtggcagcatga

SEQ ID NO: 97998 - DNA, 2235 bp, Enterobacter aerogenes
atgagtgatattaactacaatgagaacgactacaataatggggtaccgccggaacccggcgtcgtctggtacgaggaccactgggcctggcctacgcgcggatatgatattccgccaggccccggtgacagcgagccgggaagagtggtgactccccagaagaagcaggatacctggccgaaaaggcccaacgtgaaagagtggtatgtaccgggcgaaaagccctttgaccccatcacgggtgacggctgggtacccgaagaagacggctataatgaggcgctgccggccggcgtgccggcggtggtgcaggacgctgttaatcaggttaaatccattcccctgaagggcggcatgtccgcccgtgatatctggcgactgacgcccgccccggactatccgggtcccaaaaacaccttcgaccctgcgtttatctggttccccgcacaggcgctgactgatagcaacctgtctgcgacggcagcggccccggagcatgtgccggtgcatacccgcattctggatgatgttcatgacggggtgcagttcatttccgccgtatctgccggcccagaggcatatgacctgccggtggtgaaagccacggcacacggggcgtattacactatcgggcgtctgcccggggcgatgggcccctacacgtttgagttttccgcaaaagcttcccgagaggactcccgttttgtcagaaacgaggcgcagagcggcggtgaggtacgtgaggcggggttcacggtgggggccaatactagcgactgtatagtctggttcccggatggcagcggtgtggagccggtgtatttttccatgaccatgaaaatgccggcggggccgctgcagcgtcgccaggaggcggaaaaccgggcccggaaggaagcggatgcggccagaacaaaggcagaagctgaggccaaagcaaaatcagacgccgaggccagagcaaaagcggatgcagaacgcaagaaggaagaagaaatccggcgtaaagccgaagaatcccgtaaggcgctgtttgcgaaggctggtatccttgacacgccggtttacacgccggatatggtgaaagcggccaacgcggcgctgtcggcggaaggctcaatggctctgaaccgtgccccgggaatggttcagctgtccgcagcgggcgtggggacgcttcctttcaatagcagtctggcgggatgggaggccggtgcgctgtggcgtggcgccgccgaacttgccagtatcggcagatctctttccggatgggctatagttgctacggttctgcgggccgcacttgatatcccgaaggccggtgaaggcagcgataaggttcccgggagggatattgagatgatggctgctcaggccagcctggtcacggccatgaagacgaatattaagccggggatgaagaccgtggacctgccggtgcggggatacatttccacggaaagcgacggcgtgcagtcgatcaacttggtgaagacaggtacgggcgggatttcggccacggtaccggtgctgagtgcagtgcgtgacaaggcgacagggcttgataaaatcactgttccggcggtggccggtgcgcccgcacggaccatactggtgaatccggtgccggtgggacctgctgctccgtggcataccggcaatagcgggccagtgccagtaacacctgttcacaccggtacagaggtgaagcaggctgacagtatcgtcacgacaactttgccaattgcagacattccgccactgcaggacttcatatactggcagccggatgcttctgggacaggtgttgagccaatttatgttatgttggctagccctagagacttgcctggcaaagccactggtaaaggcgaaaaggtgggcgatggttggttaatcaaagcaggtcaggagctaggtgctccaattccaagccagattgcagataaattgcgtggccgtaaatttgctaattttgacgcgttccgccgggccttatggtatgaggttggaaaggacacaactttggccagccagttgaataatagtaacaggaaggctattagcaaaggatattctcctttcccccctgaagctgagcaagttggtgggcgagttcgttacgaacttcaccacataacgccgattaaagatggtggggcagtctatgatattgacaatattgggattttaacgccaaaaaggcacattaacattcataaaaatggtgaatag

SEQ ID NO: 97999 - DNA, 258 bp, Enterobacter aerogenes
atgtctgattggaatattgctgcaaagccgcaggacgaacgcgacaaggttaacgttgacctggcagcctccggagtggcgtacaaagagcgcctgaacatgccggttatcgctgaggtggttatgcgcgagcagcctcacgagtatcaggagtacttcctcgagaggccacaccattaccgcgagatcagcttgctgttgccgaaggtaagcgacacgcgttatgtagagatggctgagaagagttcgaagatataa

SEQ ID NO: 98000 - DNA, 486 bp, Enterobacter aerogenes
atgaacacaaaatataccgatgatgttttgctctcggcccttagaaaatgtattgcgttacgtgatgaattgaactctcttggttttaccgataatggtggggccattcactcagtggagcgagtgctggagttattgtgtgtaagacgaaaatattccctcacacatattaatagccttaaaaagtcacacattgctgaacgcactctaggggcttctatggccttatctgaaggtcaaagtgtccgaatagagcacgttcacccgataagggaatggaccagaagcgtcattgataaggttaatgccaattgctctgatgacgaattactgtcgtacattgatgagaattaccgattagttcttgtttcaaaggacgaagctaggtctctcgacagaaagaacagaagcaagatagaggttaaccggctagaaaacgcggggttggttttggatccaaaatacccgcctatgcgaaagagataa

SEQ ID NO: 98001 - DNA, 360 bp, Enterobacter aerogenes
atgaatatttacgatatcacgccggtcagtaagccgcgcatgacacagagagatcgctggcataaaagacctgcgacggcggcatattgggctttcaaagccgaggtgcgcctgcttggaatcaacattcctgaatccggttatcacatcaccttcatcattcctatgccaaaaagctggagccagaagaagcgcacgcaactcaacggccaggcgcatcagcagaaaccggataaagacaacctggaaaaggcgctgctcgatgccattttcgacgacgacagccgcgtctgggatggccgggtgacaaaactttggggagagaagggacagatcattattggggagtgcgcgtcgtga

SEQ ID NO: 98002 - DNA, 597 bp, Enterobacter aerogenes
atgaatagctatgagttgttagagcaaattaaacatgatgttggtgctgtaaaaaatgatggtatggattccatacccgtagataacttactaaattacctttctgaaatagatgtaagcgaaggcacagaaagcaatgaagtcgctttagaggggattaagcacagtaactctagacaacttgaaattctaaaaattgaaaatatctttcaaattgaatcatttaaagccgcaatcaatattggttccaacgcatgcaagacattcttgataatgaatggtggcgcagcgatcgctttactggcatttcttggaaatatttggaataaatcatcaacatccgaagcagcctcttccgtcgcaggagccctttttcttttttgtattggggttgttttgtctggcgtttgcgcggggttgtcgtacctatctcagtctttgtttgtatcatctgagttaggtaaacataaattccgcctacgttgtggtcagacgatgaatgccttagcctgcatatgcggcgctgggtctattattgtttttggatatggagcctataccgcttacctttcgatgattgctcagttagttaaataa

SEQ ID NO: 98003 - DNA, 276 bp, Enterobacter aerogenes
atgacactggagatgatcgtcggccttgctgcattggttatctctgctattgctggcgcttttggcctggggcatattcgcggtaccaacaaagcagaagcgaaagccgaacagcaacgcgccgaagagaacgccaccgccagcgttgccgctgctgaacggaaagaggaagccaccagagaggccagcaatgtacagcagactgttagccatatgcctgatgacgatgttgatcgtgagttgcgcgaaaagtttacccgccccggtagtcgttga

SEQ ID NO: 98004 - DNA, 864 bp, Enterobacter aerogenes
atggaaagaggtgtggtttttactcgtagtgaattgattaagattgctggtggccaaggttttcgaaatggtaagtcactaagcatattagatataaattattttttattatactgggacagactggtctcacccacaaatgatatggttcattttgggttgccttgcgaagatgagttaattcgacttgggaagcttgaggttcctaaattctcggctaacggcattgaatcctcaacgtatgctgactttgacgccgcatctcagaccaaagccctggacctaatgaggaagaaacataaaagtactgactggcgaactcactctctcaatggtgagcttagtttttctgacaacgattccgctataaagcaaactttgagatttgatttatgcaaccttcttcctgtaccgggttcagatgtcaaccttaacgagattctggagttcaaggaaagaagatctgatgaattaatggcgcttcactcgtatatagacgagctttattttgaagttattaattctggagattttgagttatctaaagctaaagcatttgatggttttaaaagagccatggctgatttggatgcattaaacgcacagggttggagaagcccaattaaatttgatatctccacctcctttgagttcgacctgagtcaggtgatgactgctgctacagcaggtatagcagccatgaatagtgagcatcccttggcgatgttaagtgttggagcagttgcctctgttctcggtggattcatcaaagttactccgaaaatacaaagcgtattgaaggatggaaataaaaaccttgcctaccttgcaaaagcaaaggttgaaggtgttatagctaaatga

SEQ ID NO: 98005 - DNA, 903 bp, Enterobacter aerogenes
atgttccgggatatcgaagaccgttatctcggcatcaagcgagcgctgaaagcgctcttcgaacagcgcctgacaggccgagagcgtgaggtaaatagccatagctggaacttcctttgccatgaccacggcgaggacatgcggctctaccaggtcaacgccggcaagtttatctacgacatgtcggcgcaggaactggctgacctgctggaagcggtgcagtccattctcgacgattacctgctggatggtggcgagcaaaacctctgggcaatggattacgtcgtcgcagaggcgcagcgcggcacgctggaggctttcaataatctctcgcagcagtcgcaggtctacgccagccagacgacgctacagcagcttttaaacggccccggttatctgaaccagatagcggcggcaagactgacaacgttcagtgactggaaggttatcagcgataccgcccgcggcgacctgaccaatatcattaccgacgcggtggcgcgcggagtaaacccacgcgagacgaccagcgttatcagcaagcgcctcgatgtgtcgatgtcgaaggccaagaccatcgctcagactgaacaggtcggcgcgctgcggcaggcgcagtggaacgaaacggactgggctgctgaccgtttaggtttgaatactggattgctgtggctgtctgcgctcaagccgacgacgcgcacctggcacgccagccgtcacgggaaggtctacaccaccgaagaggtgcgagacttctacgccgagaacggcaaccggtacaactgctactgcagccagattcctgtgctgctcaacgacgacggcagcattttcaatgaaggtttggcggataagctggtgaaagagcgggacaagtggcatcctgatgaaaataattag

SEQ ID NO: 98006 - DNA, 675 bp, Enterobacter aerogenes
atggttaagcgacacgatagctcaggatacttttaccactggataaaagctgatatatcacatggcaatatacaagagtggtatgagtctgcttatagtaaattattaaaaatactgagtgaatttgagcttcgctcaggggcaagtttgggcctgcctgatggtcataattgcatttgtttcacagagtcaccgttatcatatattactaacgatacatctaaataccagccatttggtttagagttttcaaagaaaaatatttatatccttggtggtgcgcaggttatttacggatcgcgaagcgatttattgttgctcccagaagagttgaagtggagattcatgattcacgaaccattgctgagagatgataagagaacatatggtattgacttcacttgggaaagggaggtcagggtcaattctgacaaaatagctcttataggtgaaagcttgataacagtacctagctatagtggtaatgtagatctcgcattcaattcaattgtattacctaatgtgtcttacaaagaccggttatttcatgagctgaaaattacctatgcacaaagtgcgcaacgcaacgcaagagacgaaagagaatatgattggttaattagtttttatgatgatgtgcttgagcagtacagctaccaaataaagattttataa

SEQ ID NO: 98007 - DNA, 1194 bp, Enterobacter aerogenes
atgaaacgcaaccgcgttaacgtgctgaccgtcgtcaactccgcttcaaatatcaccactgaaaccatcgacggcaagccacatatcgtggttcgcggcatcacgcctgtcgtggacgatatcgtgatgaaccggaagttgtacccggcagcagaaatcgaaaaggcctacaacacgcttgagcgcaacccgatgccgctgggccaccctaaagtggacggtaagcacgtgtcggcgcgcgatgtccgggcggtgaatgaataccacgtaggcgcctggctgcagaacgtcagccacaaagatggaaaggtgactggcgacatgtacgttaatcgccagtacgccgaatccagcgagaagggcaagcgcctgattaatcgccttgatgagatgctcgcgggcaccaattccgagccgatccacatctctacaggactcctgtattccggcatcgctgctaacggcgagtcgaagggcaagaagtacaacgaaatcgccaccaacatgatgtttgaccatgtggcggtattgctcgacgagccgggtgccggaacgccggaggagggcgtggggatcttcgttaatgccgagggtgacgaagtcgaaatcgaggtcgtcaacctcgaagagtccactaccccagaccagcaagaccccgcattcaaaacatttttcaaccagctaaaggcgtttttcggcgccaacagcgattcaacccagaaggaaacagacccgatgaaagatctcatcgttaatgcgctgaaggccaaaggtaaatcggttgatgataaaaccgatgccgaactgatggacgcgtacaaccagatgctggcagaaaacgccgacagcaaagaagaaacgcctgaagcgaagggcgcccgtgagaagaaagaggcggatgacaagaagactaacgagcagaccaccaacagcgaagagatgccagcctgggctaaaacgcttaccgaacaggtaatggcgcttaattcccagatcaacgctaactcggagagtgagaaggccagcatgcgtgccgcggtgaaagccaaatttggcatgactgatattgcagttaacgccctcgacggtgagccgctcagcgagttgtttgctaaatgccagacctcaaccggcctgaatggtgctttcctgcaggccactaacaaccaatcagtcagtgaaatgccggagtaa

SEQ ID NO: 98008 - DNA, 468 bp, Enterobacter aerogenes
atgatcaaacttgaaagggaaaagcaaaaagagcttctccagatactgtttcacgcttacccaaaccatatgcagaacaatgcatatgttgagttgaaatcaatgtttgatagtgatgatacctttgtagcaaacctgctttaccttgaagagcacgagctgattcacagcgggatacggcatcaccttagcggctatagcataaatcccggagcaatcatgatcactgctaagggcattgacttcattcaacaggacggcggactctctgcaatcctgaacgtgcagacaatcaagtttcatcgtgacgccgtaatcgtcctggaagacctcattgccatgtctaatatgacaagtgagcagaagaaaaaggccaagtcgactctcggcgaaatgtctactgaagctctaaaaactgtggtacaagctgcgacgactgccgggatatcagtgattttcggtaaatga

SEQ ID NO: 98009 - DNA, 477 bp, Enterobacter aerogenes
gtggcaacagtttcatacccggaatttctaccccttccgcagcgtcccatccagaacatgacgcaggataccggctggcagacaacgcagccggcggtcgggccagcgatattcacccctttcaccactgacctgaaggctacctggacgctgcagtggatattcacgctgcagcaggctgaacggtttaagtcgtggctgcggtcgccgacgtactgtgatcgcgggcgtaactggttcacgatgtcaattgaccttggtgatatgcagggtgttcagctacagacgcttcatttcgtcaatatgccggttcaaaccagcaaaaatggcgggacggtgacgtggacagcaacggttatttgtaacggaatcgatgacatcaccgaagattatgacgactggatcgttgaggctcagcctgaatatggatactggcttgattatcttgttaccgaagtgatgccgagggctgactaa

SEQ ID NO: 98010 - DNA, 396 bp, Enterobacter aerogenes
atgacgcagagcgaatttatccggcttgtgaatggcacgccgtgggttaaccgtgcctgttgttttgaacagatggattgctgggggctggtggtgctgtattaccgacatgtgctaggtctggagctgcatcatatccccggctacgaatctggcgccgacttcatcacctgctactcagaggaatccgcccactggcgagtggttcccgtagcttcgcctggctgcctcgcagtgttttattacgctgatcgtcctgttcatgtgggcgtaatgctggacccgattaaatgcctgcattcccgcggtgaattcgggtttgttcgcgctgacagcatggtcatcctggcgaaaaaattcaacaaagtggagtatctggttcatggttcgatatga

SEQ ID NO: 98011 - DNA, 1959 bp, Enterobacter aerogenes
atggcagaagttccattacccacaccaactaaagctcccgtgccgagtactgatattcgcaacgcggtattcgcaggtgctaagcttgatgaagaggctaccagtcatgatgattactatgttgatcgtcttggagtggcacgcctgacgaatgcaggcagaaacagtcaatttgatgcggctcaacaggataaagaagctcgtttttatacctttatccaaagctccggctatcaggttatcggtgattatgttgatggtcctcttactgtcactgagtacaaccagctcattcgctataacaatgagctgtggaaactgacggccgctaccgatttaccgtacaccactgcgggaactactgatgaaacatggaatgagactgactctttgcatttcgtttctgtcggggatgccgatcttcgccaaaacctgggttcaagcgaagggacaactttagtcgttgagaatgaggcgaccgtcgcccagttactttccccttcaatcttcaaatacatgacgcaagcagatatttttacgatgctgacaacagttggtgcagacgtgaatatcgactatgcgttacagaaggctatcgataaaggagtaatgtcggttgtcatgccgtggcgtcttggtatctacaacgccagccaggatgttacacttccaagtgggtttaatatattcactgagggatctaaaaggatttataccgcagaaaacgacacgtcattcaataatgctggtgtggttatcaggaaggcagttggcgctaccggcattttaaaaatgaccagtcgtcatactttcaaagatattatttttgatgggcgtgataaaaccgttggcatgataaacgccgattcacagccatcaggattgacgtttcttaactgttcttcttatcgctggcttcgtggatttggaaggacatcaggatatattggaactctgcgcgcaataaattgtactgcaaatgataactatgatggtttctataacaccattgactcctggtttctcaattgtgtagctaatgccaatgccaatcaggggtggaattttcaggcgggagctaataataacacccttacaaactgcactccagagtggaacgccaaagaaggtgtaatggtttatggtgctaaggtaatcaccattactggagataaaattgaccgcaatggggctgctggtctggcaattaaaaatggaggggcagccaagattatcggagtaagcttccagaggaatggcgcgaaagccgctacgggttcttccgataactgtcacatactgatggaaggcgatggctctgaactcgaaatggtttgttctaagactattgcaggggtggatgatgatggtggtggcaatgtgtcacctcaatatgggcttatcaccactggcagcagctcgaacatgaaaatagttatcggtgatagtgatatgagcggtgcgacggtatctcctatcaggagtgtcgtaaccgctgcgattcgtaaattcagaaatgtcatcggtctgcctgatgtcagtacggaaggactgactcagatcagggatggtgtaccaaacattggagatccagtacttaatgccaatcttcctgttcatggaacaatgccattcaccctgacgcaactatttactggtctaggtacctattctactccaataactagaaccattgagtttcagtgccgaaatgaaagccagggtgttccagaatcatatttcataaaggtgcaaacctcgcgcgtaaaagccaccaacgctattgtaaccgtattgggcgttgagaccggaagtgcaagtaactggggcatggcatcggcggcaccttcagctgtcgctatcacgctttccgtttctgcggatggtaaaactatctccggaacacttgaagggatcgacagtggcaaccgatatattgatattttcctgaggccataa

SEQ ID NO: 98012 - DNA, 165 bp, Enterobacter aerogenes
atggatgaagaaattgaagttagcgaatttgatgcctggtatcatcagttgatagcgatactttctgtagacggtcggagagcaccttacaaaatggaatggcttgagctatacgaaaggggtttaaccccaaaggaggcttcaattatagggccttttttttga

SEQ ID NO: 98013 - DNA, 750 bp, Enterobacter aerogenes
atgttacaatcaattaaaaagattaaaaacaagattgaaaaaaaataccaccttcatatgtgcaagagaaatcaggatgagaaaaccgtatggctatctcttggtgaaaattgccttccggatgatatcctcaatagatttcacttgaaaagctacagctctccgtttgcttcatgcagatctaacatagattatgtaatatcaatgcatgaaaataactacaatggactacttgatgtaaaaaactcaacaaatggcattattcttggaaaaaatgtattgagaagttcaatatacaataagtgccatacagtctatcatgacttacacattaatggctttgaatttacgcaccataactgggctattaacaaaaacataaaatcatctctacaaagaagaatagacagattcaaaggagatattggaactaaaaacataatcctactataccatcataggaaaactcataaatctgacattgaatatataataaaaaggctatccgagttttcaaacaaactgacaacaaacggaatggaatgcactatagcgctattctatcaggaattagtccactataagaaggatagaaagttaataaaaagatatccttcagataatgtttatgaatatgaattcagaactcaacacacgtgggagggtgatgatgaaaagatattctggggtaaaattgatgatgaccttataaaaaacatgctcttagatataaaatcaaaaaaaatatag

SEQ ID NO: 98014 - DNA, 162 bp, Enterobacter aerogenes
atgaaaattggatctaaacgcgctttgactcaggagttccctgatggaataccaattgccattgaccattcccactcatttcccaacatgaagagcgaagagaggcattactaccatctggatcaaaagtcctgtaatgcaatattgcgaaattatttctaa

SEQ ID NO: 98015 - DNA, 531 bp, Enterobacter aerogenes
atgttgcaatacttaaaccagtgctcacggggacgcggcgcctggctcttgatggcgttaaccgcttttatacttgaattagtggcgctgtggttccagcacgtgatgctgctgcagccctgcgtgttgtgtatttatgaacgctgcgccctgtttggcattatgggcgccggtctggtgggcgttatcgcgccgaaaactccgttgcgctacgtcgcgctgctgatctggctgtacagcgccctgcgcggtctgcagttagcctgggagcacaccatgattcagctgcatccttctccgttccagacctgcgatttcgccgcgcgtttcccgacgtggctgccgctggataaatggctgccgcaggtattcgtcgccaccggcgactgttccgtgcgccagtgggaattcctgacgctggagatgccgcagtggctggtaggcatctttgccgcttatctggttatcgctctgctggtgctgatcgctcagccttttaaggctaaaaaacgcgatctgttcggccgttaa

SEQ ID NO: 98016 - DNA, 183 bp, Enterobacter aerogenes
atggccgttgtcggcggtataatcatcatcatagggttaatttatggcgtacttggcggcacccttgctgccgttgttatttggcttttctgcaataagattaatacattcagtcgagttatcgcactatggtttggctgcatggccgtagttttcttaatgacgattattttagcgctatag

SEQ ID NO: 98017 - DNA, 2793 bp, Enterobacter aerogenes
atgttaactataccagcaagattaaaagaaaaactagaacttgatcaactgttatttggtgaagttagttcttcgatcgctaaatttactccgtggtttgctgataacaagctcgttttttttcctgaatatacagatcatggtattaatcaccttcaggaagtattaaatacttcttcaagtattattacagatgaaagttgggatctattaacatcacaagatgctgcagctattattataggaactttattacatgactgtgccatgcacctttcggaagatggcttttatgatttaatatcagacagttatcctgaaattaaatcccgttacaacacccacccagagacatcatggaaaaaaaaatggttatcttttttttccgaggcaaagcgctgggacgggaaaaaattaaattcaatttttggtgacacaacgccaatacatgaaattgcattgtctaaaaatgatcttactagaagatcaagacttctgattggcgaatttttaagacgtgaacatgctaaccttgcccattcaatatcattaaatggtgtgcccagtacaacaagtaaaaaactacaccttgatattactgatcaaaattttcgtgatttagtaggctttatagctaaaagtcacaatatgtcaattcgatcagcaacagatcgacttggcgttagtctgaagcgcacagcatttaacgtccatgcaccgtttgtcatgagtgtattgagaatttcagattatatacaagtccatagctctagagcgcaaaaccaacttctagcagttaaacgtttaacaagcccaatttcgcgaggtgaatgggataaacataatagtatattagatataaatcaaacacatgatgaccctgaagcattatatatagaagcagaacctaaagatcctttaaccttcaagtctttaaaaaaattatttaatgatattcaaaatgagttagattctacatggtctgttttaggtgaagtttatggaagattccgcccatacgataagcttggcataaacattcggagaataaaatcctctcttgatgatgaattaatttatattaaaaataaaaaacctaattttgtgcctacaccagtgagttttaaaacgtcggatgctgagatgttatctttattagtcgcacctctatatggaaatgatccttcaataggtgtaagagaattgatccaaaatagtgttgatgcgtgcaacgaacgaattgattactttgataaaacaaattggggaaattacactaaagaagatatcaacgtaacaattaagatttcaaaaaatggtgatagcccaattttactgaaaatcgttgataaaggaataggaatggacctttccattataaaaaattattttctaaacgttggtgcatcattcagaaatagtgattcatggaaagaaaagcacgaaacagatggtcattcgaatgtccacagaacaggtcgatttggtgtaggtttacttgcagcatttcttttggggtctgagattaaagttcagacaagacatataaatgaaaaacatggttataaatttaaatgtactaaagatagtgatgatattagtttatttccaattgaatgcgatattggaacgactattaccatagaaattactgatgaagtttttaacatactaaaagaaaataataataaagattgggattggtattgtttaggtactccaaaagtcacaagaatcttggaaattaatggggaggaaaaaatactagatcaaataattaaggtaccatctagtggagatactctcgatggtactaattggttcagaattcaacatcctgattttgatgatattttttggagcacagaaaaaatcagagagaaatattattcacaaagcatagtcgtatgtaatggaatcaagatccctaacactgatcatagggacattttcagaataaaaaaatcatattccatacttaacataggaataataaatcccagtcttgtcgtatatgatcaggataataaaatgcctataaatttaactcgtaacggattcacttcagaagaactcccttttaataacgaattgatttatgatatttcatttaaactagccaaagaaattcatgacatatttcatattaaatatgataatttagattcagatgttgtatccctaatgttaacttcaaagttagaatacttcactactaaatatcgccatagtcaattatcaacattaaattatttcaatgacaaaatatacccaagcaacatcaatataattcactcgcaaaaaccgaaatccatatttattgatactgtaagcgatcaagataaatcaaattcagccccatgcttcaataaaataaaaaacaatacgatatatagcttctataatagtgaaagacgctctaggacatcaaatgtttcatatctaagaacaatttttgaaaatgacccgtacagtgaatactttcctcttcaaggcaagcgccttttcataaagaatagcgaaattgatagtattctaacaccaggttcattcccaaaatatttatgggcacgattttctcttgaatggacggataacgaatggtctataatgaaaattggtcaggcaccaaaattagactgggattataaagaggttagtaaattactatctaaaacaagtcaaaaaatgtttagtttgatatattttaattgggatgacgaatatactcccccagaggagactatattctataaagcatggactgatttattatctttaaaaaacatttaa

SEQ ID NO: 98018 - DNA, 1431 bp, Enterobacter aerogenes
atgacaaaactcccccgcgtgttggtaatgctgagcacgcttgccgtcgcgatgccgctcttcgcccagcagatcagccctgcgcttgagcatctggcggagaaaggcgaagcggtcgcccagcgcaatctgggcgccagctatctacaaaaggaacatcccagcgacgatgataagcgcctggcttttcagtggatgcaaaaagcggcggatggcggcgacctgatggcgcaaaattaccttggctacttttatctcaccggcagcggggtggcggaaaaccgtgaacaaagcctggcctggtataaaaaagcggcgctacgtggcgatgtgctctcacaatattcgctgagcgtgattttcgcacgcagccaatcttatattgaatccaactactggcttgcccaggccgcgcagcgcggcgatcctgcgtcgcaaattgaactggcgctgcgttatcgtgacggcctgggaaccgatagcaccggcaggttgcggtccgatgatactcagttgttctactgggcgcagaaagcggcgctggcggattacggcagtgcgcagtttatcgtgggcgatatgtatgagctcggtcaggggatcccacaaaatagcgtgtttgccgcggcctggctgctgttggctgcagacaaagaacagccgggtacgctggtggtgaggcgtaaaaacgcggtactggccgcgctgaatgaacgtgaaaccaaagaagcctggcagctatatcgtcattatttaagcattatgaaaagcaatatcgaagcccgggagcgacagctggcgcagcatatcccggtaagcgatcctgaacccgagaccaatttccgcaatcagctggcgctcgccgggcagggtaacgcggcggcgatggtcaaagtaggattgatctacggcaacggcgtcgctgttaagcaaaaccacgccgaagcattgaaatggtttagccgggcggcggaaaaagccaatgccgaggcgcagtattatctggcttacgcgtgggcgaaaggtattggcgtcgagcctgatgaagataaagctgagcgttatttcgcgctggcggcaaagggtggcgagaagttctctcttaactacatggggatcgagtatcgcgatgggaaacgcgtggcgaaagacccgcagcgtgcctgcggctattttaagcgtgcagcgtataaaggcgtcgcgatggcgcaggagagcctggcgaaatgttatctgcaggggattaacggccgtgaagatctgcggcaggcctacctgtggttctcgctggccagcgcatttggcgaagagcgggcattaagtcagcgtgcggaagtggcgggaaaactatcggcaacggcgctgatacaggcgcagaatgaagctcaggtattgtttgaacaaatttttaaggcgcgagcgggccattaa

SEQ ID NO: 98019 - DNA, 1794 bp, Enterobacter aerogenes
atgtttaaacttaaattaacttatgttgctttggcgacggcgttaagctcgacggtggtatacgccgacccgacaacctacacccattcatctggcgcgacagtcgttgatattgaagcgccgaactccgcgggcgtctcacataacctgtatcgtgaattcaacgttggcagcaacggcttaatactcaataacagcgatagcgacctcaatcatgatacttttggcaatatcgccaaaaacaacaacctgaccaacggcggcgcttccgtcattttaaatgaagtgacctcaaataaagccagttcattaaatggttttattgaagtcgccgggctgaaggccgacgtggtaatcgccaaccccaacggcattacctgttccggctgtagcttcgttaacaccaacaaagcgatcttaaccaccggacaggtcaatctgacggatgaaggcgcaatcggcagctataccattacagacggcaaaatcaccatcggcgaaaacggtatggatgcctcctccagctacgccgcgctgctggcggacgctgtcgctatcaatggcatgattaacgccagcagcgctatcgttggcggcggcaatttcacctttgacaatagcaaaggcaccatgacttcggctggtaaaacggccaccgttctgcaactactgaaaccggtttacagcattgatatcagcagtctgggcggtatcaaagccaacagcattactatggtcggtaataatttaggcttcggcgtgcgtaacaaaggctccattaccgccaactccacgctttcgatgaccagcaacggtttgctgaccaacgagggttccatcaccagcaacggtctcctcaccagcatcgtctccgccggcaatttaaccaataacggtacgctggagactaaaggcatgacggttatcaatacttatggcacgctgactaacggtagtaaggccagcatcaactccaccaggcaactgattctcagcgcaagcggcaatattcaaaatagtggcgccatcagttcgacatccactctgaccgcagccagtaacggggcgattaccaacagcgccggcgccagcatgacctctggtaatcaactcaccgcgacgtcattaggaaacttcaccaacgaaggcaccattagcggtaaaaataccacgctgaactttatcgggagtaactttaaaaataccggggctatcaaggcgaccggcaatgtggcggtgaaatcgctgaatcaggatagcaccaccaataccggcgagatatataatctgggcagtattactggtgaaaatatcgatatgttgaccaacggtacgttggcacaaagcaccagtgggaccatgacggccacaaacgccatcaccgcgcatagctactggctgaataacaacggtgcgatgaaagcggcaagcatcaccaccgatcacggcccggtgaacaataccggttcaattaaagcggataccatttcaattaccacaactggagatattgttaacgaaggcaccatcttcagcaccggcgatctgctgctggatacgcagaataaagcgactatttacaactattctttacttcaggcgaacggcaccttaaccatgacggctaaaaaggtggttaacggcggtcgcggctgcggttggttaaaatggagcacctgtgatgtcggcactatctacgctgataagatgatcctcaactcctcgcataaatacgccagcgagatgggcggttatcagtacttcaagattgcggaaatcaataccgttctgtaa

SEQ ID NO: 98020 - DNA, 621 bp, Enterobacter aerogenes
atgtacaagaaaacctgtctcgcgcttgccgttctggcgctgggcggctgccgcatcgtctcgcagcaggagctggcagacctgaaatccccgcccaatccgcatatggcgaacatcgataaaacctggcagcagagcatcgtgccgcaggtggtcgcccacgcccgcccggcggcggagttgatgagcgcgctgaaggcgcaaaaagatatcgatagcgcctgcaaagcgctgggctaccgcgcccaggacgaaaacccgtgcatcttttacgttaaggtggcgggcgccgtcagcaagctggatagcgcctcgcgtagcggcaaaatgaccctcgccgatggcagcatcggtaatgtgatggtgcagattggccctaccctgcgcggcaccctgctgcgtgacggttatcgcgacgccagctaccaggactttaatgaccaggtgctgtttggcgaatacagcaaaaatattaacagtcaggcggtcaaaatgattcaggcggccaacctgaaaaccggcgacaacgtagaagtgtatggcgtcttctcggcctgggatattccacaaactattccggaaatcaccccggcgaaaatcgttcatccgggaggtcaataa

SEQ ID NO: 98021 - DNA, 1848 bp, Enterobacter aerogenes
atggtgcccaaccttaatggcgaaaatcgtcgtttacactcgcgtttgcagtggtgtcgtgccatcaccgttttgctgctcctctccgctggcgcaggctacgttgcgctgccgccctcgacggcaatgagctcatggttaccactgacgcgcctgttgattgccgccctgttgctggccttcgcggtgagcgaaaatgccctgcgtcaactgcctcctgccgccaaaaagccgggcaaacgacgctggactatcgccctgccgccacgggcggcaaaatggaccgctcacctgacgcagctggcgttaaccgccctgtgcgccggcctggcgatagacgtcgtcagcatgaatttcaccgccagcggcagtatggccgctatcagcagcgggctgattcctgtggccatcgtcctgacgctgctgtgtttcgcgctgctggtctgtgagcgaatgctcagctttcgttccgttcgccactggccgtatcagagtgcctgcgttgggctactacgcgcattactcagccttggcgtattaagcgtaataacgctggcggtctcgagcttcgccctcacaccggcaggatggctggttgaacttgccagcgccatcgtcgtactggttgccgctgaatttttgctacgcacgctggccgccgcgctggtggcgccctcagccgataaagcgccgccgttcctcagccagagtctgctggcagaactgtaccgctggccgccgcgcccgctgctgctgatgcgcaagaaaattcagcgccattttggcgtcgatattggcaaggttcaggcgttcagtctgatgggacagatcttcttcccggtgctgttcggcgccgcgtttatcggctggctgattagcggtattcatgaagtctcgctacagcagcgcggtgtttacgaacgatttggccgcccggttgaggtgctggcgccagggctgcacgtcggcctgccatggccatttggccgcgttgtggcggtggattacggcgcgattcatgaattgacgttaagtgaagcgcaacctgcgcaggcccagccaacccccgccgccaacgccgcccccgttgatttagtggaaggcccggcgccgcagagcagctggcggctgtgggataaaagccatgtcaccgatcaagcgcaggttatcgccagcgccatgggcgacaagcagagcttccaggtagttaacatggacattcgcctgatttggcgcgtcggcatgcacgacgccgatgcgttgaatagtctgtatcaaacggattcgctgcccatcactattcagcgtattgcccgccaggtgctgacgcagtactttgcccaccagcagctggatatgttgctcaatgaacagcgctcaaccatggctcatgaactcaatcagcagatccaacagcggctatcacagctccatatcggtgtcgaactactctctacgcgcattgagtcgattcatccgccagccggggcggccaatgcctatcacgccgtacaggcggcacagattaaagccagcgcgcagatcgctcgcgagcgcggttatgccgcggtggtcggcaaccaatcgcaacagaaagccacgaccgccattgatgccgccagcgccacggcgaacgaactgcaggcgcgggccaacaacgcactgacgcactatagcgccgagcatgacgcctgggctatcaaccccgaagcgttcatcaacgaacgccgctaccaaatcatgagccagacactctcgcataccccgctgctgatcatcgatagcaaagtcgccgggcaacatccaccgatgctcgatttgcgtcaattttctccttcagcgcaatag

SEQ ID NO: 98022 - DNA, 1005 bp, Enterobacter aerogenes
atgaaaattcatactattactccccctgcgaccagcggtaaagtgggtctgacgcccgccgcgcagcagcccctcaagccacgcgcaaccaaacgctggctgcgttatagcgtcgccgctctgctggtgattctggcgttattaaccgcctgcctggtacaggttcatgccggtagcgcgacaatcatcacccgcttcggcagcccggcgcgcgtcctgttgcagcctggcctggcctggcgtctgccggcgccgtttgaaacgccgctggaagtggatttacgcagccgttcaacctccagcggtctgcaggatgtcggcacccgcgacggcctgcgcgtactggtacaggcgtgggctatctggaaagtcagcccggaccagccacacgtactgcgctttatccgcgcggttcaaaaccagccggatgaagcggcgcggcagatccgcacctttatcggctcggcgctggaaaccaccaccagcagctacgcgctggccgatatcgtcaataccgatggcaaacaggtgaaaattgcccaactggaaaaacagattgaggatcaactgaaagcccagttgctgaatagctacggtatcgaactggttcaagtcggaattgagcgtctgacgctgccggcggtcaccctcaatgcaaccgttgatcgcatgcgcgccgaacgcgaaaccatcgccaccgagcgcactgctgaaggtaaccgccaggcggcggagatccgttcgaaagccgatcgcgatgcccgtatcaccgaggccgatgcctccgtcaaggcggcaacaatcaccgcccaggcacagaaagactcggcggcgatttatgccaaagcttatgcgcttgacccgcagctgtacaatctgctgcgctcgctcgataccctgaacgcggtggttaataaaagcacgcgtatcgtattgagtaccgattccgcgccgtttacttcgttggtgaaaaagcccgacgatacggctaaggcggcgcaatga

SEQ ID NO: 98023 - DNA, 1080 bp, Enterobacter aerogenes
atgagaaaacccgccatcggatccagcccctggggacaatcctaccgcatcgcctttttcggcctgtatggcgctacgctgctggcggcgctggcgtggctgttttccagctttcatcagatcgcgccggatagccaggcggtggtattccgcttcggcaacccggtcgccgttcaacactccggcgtactcttcgcctggcctaaaccaatcgaccgcgtcgaggtaatccctggcccggcgcggatccttcagcacgatgttgtggcgctgaagcgtagcgaacagttaaaaccgctgagtagcgagcaaatggccagcgacgccggcgccggcgccggatatctgctgaccggcgatgcgggcgtggtgcagctcaacatgcagattttcttccgcatcagcgatccgctgcgctatgtgctgcaacgcgatcacattaatgccctcctcgaccgtctggcggcacgcgccgcgacgcgggtctccgccggtcgcgatctcgataccattctcgtcgcccgcccggaaacgctgagcaatgacagccatgcggccgaggagcgcgcgcggctacgcagtgacctgaaacaggttatagagcgcgatctccagcgcctgaaccatagcgccagcggcccgggtattaccattgaacgcgtggatgtctcttcagcattgccgcaggacgcagtggccgcctttaattcagtgctgaccgccagccaacaggcagagcgcgatatcgcccaggcgcaaaacgacgccaccctacgattgcagaaatcccaacagcaggcggaccgtctgatccagcaggccgaggccgccagccgcgaaacccgcgcccaggcggaagtggcgacgcagaccatcagcaagctggctcaggcccgcgccgacggcagcgatgccgggatgctgtctcgcctgtggcgggaaaaaatctccgcggtactctcccacgccggcgccgtggtgaccgtcaatccgcaggacaacagccagttaattttgccgggcccggcgtcgcagtcaggctctaaccagtcgatgcagctttacgggagtattccatga

SEQ ID NO: 98024 - DNA, 1923 bp, Enterobacter aerogenes
atgagccatcaatgcagccacggacacgtccatattcatcctgatttcagccaggccctgctgactccagaggaacgccgccgaatggcgctgcagttaacgctggcgatgtccaccatcggcctgattttactcagcctgctgtggcgctctctcgcaccgcagcagccagcgataagcgatctactggccggcgtcgcctggcttattgtcgccattccggtgttccgcgccggatggcacagcctgcgtcacccggatcttcatggtgttaccgatctgctggtggtgctggcgatgcttggcgcctgggcgctgggggatttggttaccgccgcgctgctaccggtactgatgatcttcggccatattctggaagagcgcagcgtaatgggtacccgccaggcgattgccgggctgaccaaactaactcagagcaaagcgcgacggcttaacaaagacggcacgctggaagagatcaacagccaggcgatccgtcagggcgatgtcgttgagatccgcgcgggcgacaaagttccggcggatggcaaaatcctcagcggttatgccagcctcgacgtcgcctcgattaccggtgaatcagtaccgcaggaagcgggccccggtagcataattttcggcggcgcgatcaatcttaatggtctgctacgcatgcaggtgacgcacaccggcgaacaatcgacgcttggcaaggtgattgcgctgatgaaagacgccgagcaggccaaaccgccgatcacccgcatgctggagcgctatgcctcgcattatctgattctggtgctgttaatcgccgccagcacctggtttttaacctacgatagccaggcaatgctggcggtgctggtcgccgcctgtccgtgcgcgctggtgctctccgccccggcgaccgccatggcgggcgtggcggtcgccgcgcgtcacggcatcctgatccgcaacgccgcttttcttgaagaactggccgatgtggatgcattaattattgataaaaccggtaccctgacgcaggggcgcttgcggctggtcggctcgcgactggccgagggcgaggagtacgatcgcgtcctgcaacttgccgccgcgctgggcgcaaccagcagccacccggtgagtcacgcattggcggaatacgccgatcctgatagcaatattgtcgttgcacaagccgaagaaaaacaggggatgggcatcgtcgcgcagaccgcgaacggcaccgcgctgctgggccgcgccgatctcttcgccgactacgcgattaccacgcttgagctacccgatcacgccgggccgctggtcggcgttgccctcaacggcaggttcctcggctggctgctgctggcggatacgctgcgcccggaagccgcactggcgctgctggaactacaacagctgggcattaacagacaactgctgttaaccggcgatcgtctaccggcggcgaaaatcattgcccaaacgctgggcatccaggacgttatcgcgcaagcgctgccggcaaccaagctgcagcaggtacagaagtcggttgctgaaggctggcgtcctctggtagtcggcgatgggatcaacgatgcgctggcgctgaaggctggcgccgtcggcatggcgatgggagccaacggcgcggatattgcgctggtttccgccgatgtggtgctaaccgccagcgacttaacccgcctgccctgcgccatccgcctgagtcgcaaatgccgacgcacgctgatggtgaacgtgattatcggtatcggctggactatcgccattgtcgccgccgccgcgctcggctggctgggcggcgctggcgcgctgattgccgccctgctgcataatatgagcaccctgatggttctcggcaataccgggcgcttactgcagtttgatgaaaccaggcgttaa

SEQ ID NO: 98025 - DNA, 795 bp, Enterobacter aerogenes
atgggcctgttaaaccgaataaaaatgctgtggcgagccgccgtcggctcgtcttattcctggcctgcaatggatatcgtcctgcccggcgaccgttatttacacctcgtcggcagcatccatatgggcacccgcgacatggcgccgccgccggctaagctactgaaaaaaatacgtcaggccgacgccttaatcgtcgaagcggacatcaccggtaatgaaacgcctttcagtaatctcccctcttatccaccgttggctgaacgtctgagcgaaacacaattagcagaattacgctcacgcgccggcgagctgggcttgtcggtcgatcttttcgatagtcagccgctatggcaggtggcaatggtgctacaagccactcaggcgcaaaagctgggattacggccagattacggtattgattaccagttgctgatggctgcccgcgagagcaacataagagtgatggagctggaaggcgccgaccgccaaatcgcgctcctgcgcgatctacccgacggcggtaaggcgctgctggaagatacgctgagccactggcgcaccaacgcccgtttactgcaggtcatgatcggctggtggctggagcaaccaccgtcgcgcggcgcggaaacgctgccgacgaccttcagccaatctttatatgatgtactgatgcatcagcgcaacatagcctggcgcgatacgctgcttggcctgccgccggggcgctatgtggtcgccgtcggcgcgctgcatctgtatggcgaagggaacctgccggatatgttgacgtaa

SEQ ID NO: 98026 - DNA, 369 bp, Enterobacter aerogenes
atgcgtatagggacagatattgtcgaaatagcaagaataaaaaaagccattgctaatgataagtctggttttcttcagcgagtatttacgaataatgaaataaaagaaattgatattaccgatataaattacgagcgagcttcaggctattgggctgcgaaggagtcgctggtaaaagccattggttatggatttcgtcatggaatacgcttccatgatattgaagttgttcacgacgaatatggaaaacctgagtttatattatccggtaaggctaaagatattctcgatgaacagcacataatgaatatatcattgagtatttcacactgccagacatatgcaatagccgcaactattatctattaa

SEQ ID NO: 98027 - DNA, 483 bp, Enterobacter aerogenes
atggtccagtgggcgaggaaaaagcttgttgattacaagtacctccacaatgcaaaagagtcaggacttggtatctggaagctcacaccagatggcatcaaaaaagcagaatcactttccacccgattgaatatcgattatccagatgatgttccggaaaccttttacgaaggtgccgtaaaacaaatcaaagttaacaaatacgaacgtagtaaaacggcaagagacaaatgcatagatcattacgggtgtcagtgcagcgtgtgcaatatggattttgaggaaacgtatggtgaaaccgggaaggactatattcacgtccaccacattaccccgctgtctgatattggagagcgctacaaactggatcccgtaaaagatcttcgtcctgtctgccccaattgccatgccatgatccacagacaaaacccctcacttactattgaggcattgaaagccttaatgaagaaagcacaaaaatag

SEQ ID NO: 98028 - DNA, 3510 bp, Enterobacter aerogenes
atgaacaaatccaacttcgatttcctgaaaggcgtaaacgacttcacttacgccattgcctgcgcggcggaaaacaactaccccgacgacccgaatacgacactggtaaaaatgcgtatgtttggcgaagcgacggccaaacacctggggctattactggatattcctccctgcgaaaaccagcacgacctgctgcgtgaactgggcaaaattgccttcattgatgacagcattctgtccgttttccataagctgcgccgtatcggcaatcaggccgttcacgaataccataacgatctcgatgatgcccagatgtgtctgcgcctcggattccgtcttgccgtttggtactaccggctggtgaccaaagattatgatttcccggtgccaacgtttgtgatgcctgagcacggcgaggatcgctaccacgccgaagttatcactctcaaacagcagctggagcagcaggtacaggaaaaagtacacagccaggcagagctggaagctcagcagcaacgcttaattgcactcaatggctatattgccgttcttgaaggtaagcaacaggaaaccgaagcccagaccaaagcccgtgtggctgccctggaagcacagctcgccgccaaaaacgccgagttagcaaaacagaccgaacaggaacgtaagacctatcacaaagagatcaccgaccaggctatcaagcgcacgctgaatctcagcgaagaagagagtcgcttcctgattgacgcccagttgcgtaaagcgggctggcaggccgatagcaaaacgttacgctttgccaaaggcgctcgaccggaacccggcgtcaacaaagcgatagccgaatggccgacgggtacagatgaaacgggtaaaacaggctttgccgattatgtgctgttcgttggccttaggcccattgccgtcgttgaagcaaaacgcaaaaataccgatgtgcccagcaagctcaacgaatcttaccgctacagcaaatacttcgataacgccttcttacgcgacacgctgctggagcactacgctcccgacgaagtacacgtagccgtaccggagtatgaaatcagctggcaggacaccagcggtaaacagcgctttaaaatccctttctgctactccaccaacgggcgtgaataccgcgcggcgatgaagaccaaaagcggtatctggtatcgcgacgtccgccacaccaccaacatgtcaaaagcgctgccggaatggcatcgcccgcaagagctgctggatatgctgggcagcgacccgcagaaacaaaaccagtggtttgctgaaaaccccggaatgagcgagctgggtctgcgttattaccaggaagatgccgtccgcgcggtggaaaaggctatcgttaacggtcagcaagaaatcctgctggcgatggcgaccggtaccggtaaaacccgtaccgccatcgccctgatgttccgcctgatccagtcgcagcgtttcaaacgcgttctgtttctggtcgaccgtcgctcgcttggcgaacaggcgctggggtcgtttgaagacacgcgcattaacggcgacacctttaacagcatttttgatatcaaagggttgaccgataaattccccgaagacagcaccaaaattcacgtcgccacggtgcagtcgctggtcaagcgcacgctgcaatccgatgagccaatgccggttggccgctacgactgtatcgtcgtcgatgaagcacaccgcggctacattctcgataaagagcaaaccgagggcgagttgcagttccgcagccagctggattacgtttccgcctaccgtcgcattctcgaccatttcgatgcggtaaaaatcgccctgaccgccacgccagcgctgcatacagtggagattttcggcgaaccggtttaccgctacacctaccgtacggcggtgatcgatggctacctgatcgatcaggatccccctattcagatcgtcacccgcaatgcgcaggatggggtctatctttccgagggtgaacaggtggaacgcctgaacccacagggcgagctgatcaacgacacaatggctgacgatcaggattttgaggtcgccgactttaaccgcagtctggtgatcccggcgtttaaccgcgcggtatgtggcgaacttaccaaatacctggatcccactgagcagcaaaaaacgctggtgttctgcgtcaccaacgcccatgccgacatggtggttgacgagctgcgcaccgcgtttaagaaaaagtacccgcagctggaacacgacgcgatcatcaagatcactggtgatgccgataaagacgcgaagaaagtgcaaagcatgatcgtccgtttcaacaaagagcggctgcccaatatcgtggtcaccgttgacctgctgaccaccggcgtggatatcccgtctatctgcaatattgtgtttctgcgcaaagtcaaaagccgcattctctacgagcagatgaaaggccgcgccacacgtctgtgcccgtcggtggggaaaaccagttttaagattttcgactgcgtggatatctacagctcgctggaaagcgtcgacaccatgcgcccggtggttgtgcgtccgcaggtggaactgcaaacgctggtcaatgaaattaccgactcagaaacctacaaaaccatcgaagcggatggccgcagttttgccgaacacagccatgagcagctggtcgctaagctgcaacggattatcggtcttgccacctataatcgcgaccgtagcgaaacggtggataagcaggtccgccgtctggacgagctgtgcctggatgccgcgggtgtcaacttcggcgggctggcttcgcgcctgcgggaaaaagggccgcactggagcgccgagattttcaataagcttcccggctttattgcccgcctcgaaaggctgaaaaccgatatcaacgccctgcgcgaggcccccattttcctcgatatcgacgatgaggtggtaagcgtcaaatcgctgtacggcgattacgacacgccgcaggatttcctcgaagccttcgatgcgctggtgcagcacgccccgaacgcccagcccgcgctgcgggcggtgatcaatcgcccgcgcgacctcacccgtaaagggttggtggaattgcaggagtggtttgaccgccagcattttgaagagtcgtccctgcgcagcgcgtggaaagcgacacgcaatcaggatatcgccgccaggctgattggtcatatccgtcgtgcggcggtaggcgatgcactcaaaccgttcgacgagcgtgtcgaccacgcgctggcgcgcatcaaaggcgagaacgactggagcgatgagcagctaagctggctcgaccgtttagcgcaggcgctgaaagagaaagtggtgcttgacgacgatgtcttcaaaaccggcaatttccatcgccgcggcggtaagccaatgttacagcgcacctttgacgacgacctcgacagcgtgctggataagttcagcgattacatctgggatgagctcgcctga

SEQ ID NO: 98029 - DNA, 1590 bp, Enterobacter aerogenes
atgaacaataacgatctggtcgccaagctgtggaaactgtgcgacaacctgcgcgacggcggcgtctcctatcaaaactacgtcaatgaactcgcctcgctgctgtttttgaaaatgtgcaaagagaccggccaggaagcagactacctgccggaaggctatcgctgggacgacctgaaatcgcgcattggccaggatcagatgcagttctaccgtaacctgctggttcagctaggctctgatgagaaaaaactggtgcaggcggtattccataatgtcagcaccaccattgagcagcccaaacagctgactgagctggtcagctatatggatgcgctggactggtacaatggcaatcacggtaagtcccgcgacgacttcggcgatatgtacgaagggctgctgcagaagaacgccaacgaaaccaaatccggggcgggccagtactttaccccgcgtccgctgatcaaaaccattatccatctgctgaagccgcagccgcgtgaagtggtacaagacccggctgcgggtacggcgggctttttgattgaagccgaccgttacgtgaaatcacagactcacgatctggatgaccttgacggcgatacccaggatttccagatccaccgcgcgtttatcggcctcgaactggtgcccggcacccgtcgtctggcgctgatgaactgtctgctgcacgatattgaaggcaacctcgaccacggcggcgccatccgtctgggcaacacgctgggcagcgacggcgagaatttaccgcaggccgatatcgtcgccaccaacccaccgtttggcagcgccgcgggcaccaacattacccgcaccttcgtgcacccaaccagcaacaaacaactgtgctttatgcagcatattattgaaaccctgcgccccggcggccgtgcggcggtggtggtgccggataacgtcttgtttgaaggcggcaagggtaccgatattcgtcgcgacctgatggacaaatgccatctgcacactatcctgcgtctgccgaccggtatcttttacgctcagggcgtcaaaaccaacgtgctgttctttaccaaaggtacggccgccaatccgaaccaggataaaaactgcaccgacgacgtgtgggtgtacgacctgcggaccaatatgccgagcttcggcaaacgcacgccgtttaccgagcagcacctgcagccgtttgaaaccgtctacggtgaagatccgcacggcttaagcccgcgtaccgaaggcgagtggagctttaacgccgaagagagcgaagtcgccgacagcgaagagaacaaaaacactgaccagcaccaggccaccagccgctggcgcaagttcagccgcgagtggatccgcacggcaaaatccgattcgctggatatctcctggctgaaggataaggacagcattgacgccgacagcctgccggagccggacgtgttagccgcagaagcgatgggcgagctggtgcaggcgctgggtgagctggatgcgctgatgcgcgagctgggcgcgggcgatgaagcggatgcgcagcgtcagttgctggaagaagcgtttggtgaggtgaaggcatga

SEQ ID NO: 98030 - DNA, 1407 bp, Enterobacter aerogenes
atgagtggggggaaattgcctgaggggtgggctacaactccagtatctacagtcgcaaccctaatccgaggagtcacatataaaaaagagcaagcactcaattatctacaagatgattatttgcctattatacgtgcaaacaatattcaaaatggcaagtttgatactacagacttagtttttgtgcctaaaaatcttgttaaagaaagtcagaaaatatctcctgaagatattgtaattgcgatgtcttcagggagtaaatctgtagtcggtaaatccgcacatcaacgtctaccatttgaatgtagtttcggcgcattttgcggggcattgcgccctgagaaattcatatctccaaattacattgctcatttcacaaaatcatccttttatcggaacaaaatttcatcactttctgctggtgcaaatattaataatattaaaccagcaagctttgatttaataaatataccaatcccgtcacttgctgaacaaaaaatcatctccgaaaaactcgatacgctgctggcgcaggtagacagcaccaaagcacgtcttgagcaaaccccacaaattctgaaacgttttcgtcaggcggtgttggggacagcggtcaatgggaatttaactaaacattggcgagattttaataatattcaaaactggactaacactaactgggagggtattttaaaaaacaagaaagattcatttaagagagggccatttggtagcgccttaaaaaaatccatgtttgtgagtgaaggatataaagtatatgagcaatattgtccaataaatgatgattgctcgtacgctcgctactttattactgaagataaattcaatgaaatgaaatcctttgaagtcttagatggagatttcctaataagctgttctggcgtcagcttagggagaattacacaagtaccacaaaatagtgcaaagggaattattaaccaagctttacttagagttagaattaacaatgaagtatatctagatagtttctttaaattacttttccgctcccctatgtttcaaaaaaaattattcgataacagcactggctctgccatacctaatctcaaaggggttaaggaattaaaagcaatggaaattcctttgctttctttagaagaacaacacgaaatcgtccgccgcgtcgaacaactcttcgcctacgctgacaccattgaaaaacaggtcaacagcgcactaatccgcgtcaacagcctcacccagtcgatcctggcaaaagccttccgcggcgaacttaccgcccagtggcgtgccgaaaaccctgaactcatcagcggtgaaaacagcgccgccgcgctactggaaaaaattaaggccgaacgcgccgtcagcggcggtaaaaaaacctcgcgtaaaaaagcctga

SEQ ID NO: 98031 - DNA, 339 bp, Enterobacter aerogenes
atgactaccgtccattctattgcagatccgtgcgatccagaagtctccccaacaaataaccgtcaccttaccgtgagttatgcgacgcgccacccggattacacccgcatccccgccctcaccatgaagggccagtggctggaagccgccggtttcgccaccggtaccgaggtagatgtgaaggtgatgaacggctgtattgtgctaacggcaaaaccgccgcagtcggaagactctacgctgcttcagtcttttcatcgggtgggtaagctgtccgcccgtaagcagcggcaggtgcaggactttatcgacgtgatttcagataaacgttccgcctga

SEQ ID NO: 98032 - DNA, 528 bp, Enterobacter aerogenes
atggatcgccagacactcccgactaaaattatcgactacagtcagcgcccggaaacgtcgtccgttaaacaggttatccgacacgaaatccatactccagcactgatcgacaccggtcaggacaggacgttgctgacgatgtgctgcactaacatgcctgcgcgggcgttttctccgcaagttcaggccttccagacaataaatccggtgtgttttcttgtggttaatctgccagccttcccgccgcaactggatatgaatacgcgggcaaccgtaccgtatccgggtttccgctatttcccggatacgcagggttatcgcccgatcgtcacgctggctctgccagtggtagacagttctgctctgcatcagcaacccgcatccccggcggacactgatacgataggcctcctgcagaaaatgcaccgcctggcgcttctgagccggcctcagaacttttgtttcagtacctcctgcagcatctccttgtccagactcaggtctgccaccagtttcttcagccactga

SEQ ID NO: 98033 - DNA, 690 bp, Enterobacter aerogenes
atgagtgctttttgggaagggcttctgtcatctagcatttctttagctgttattggctttgtctgtaaaacatttttaaaacatattgataaaagagaattggaatcctttaaaaataaactgaaatatgaaagcgatataaagataaaggaagaagaacgtaactatgatattcgaaaggcaagggatcttgaggttggtcgttggggactaactttacttagcgctgcgaatggttttttaggtcgattgtgttatatcaaagatcagagggggctttcatcgaatcaatatattattgatagcacaagattctatttgtgtcagtaccttttctgggctcagctttttagaaagaatagagactcttctgttttttccccaacaaatgatgagatgcttattaccgagctgattaaaaatatttcaatcactttacgagagaatacactcggtttgccttgtattcgatctcttgaacaacagtacattggcgatagtctaaatattaacggtgagtgtatgacctacaaggaatttatagacgtcaacgtgttgagtcaatattcagcattaaatgattttgttgattctattctgaacgataacaataaagagtttatcaatataatcattgtatcctttcaagatttgaaatctcgatttgaggctacattgcaaaaaaaatga

SEQ ID NO: 98034 - DNA, 2850 bp, Enterobacter aerogenes
atgattactaacgatgtagttattagcgcttataattgccttaagtcatatgcttactatgaaaaccttaatttctttttgaaagctgaagtggctcgctttgaaagtttcaattttctatcaaaagttgaacgagatgttgagcttttgccaaagaaaattgatagtcatttagattttaaacaaagaagtggagctctcttcttaagtaataataaaacagcagatgattataaagtttgtgcagtgaattatttaataactgctccgttggaaatatatattatcgaaaccttatggtctatttttgttgggtctatgcttgatgataatttctcagactcagttttcggaaatagaatttctaaatcaataaagaaatactcaagaaaaagcgatgatagcaaaaaaataaatgctaaaaacatattcgaaagatatattgataactataatcgatggagagatggcggaattaataaagctattgaggttatagaaaaagaacgcaatgatgttgcaattctatcacttgacctcaaaggtttttattacaatattgacattgattttgatgccattgacgatattattgaaaaatgtcaacttgcagagattaaagagctatctttatttttgaatgaaaaattaaagttgatgcatgaaacttatagaaataaaatatcaccttttattgaggaaactcatccggaatcaggtttaaaggggattccaattggttttacatcctcggcgatattggctaactggtatctggctgattttgatagagatattaaatataagattaacccttcttactatggccgctatgtagatgatattctatttgtcttttcttcgcctaaaattgaaatagaagatagaggtgatgaggttgttaattttattaacagaagtttaagcgactttataattcctactgacgatcatgaaggcttcaaattgacgtcagcgtatcatgagttacccattcaaaaagataagcttatctttcactattttaataaagatcatagccttgctgggttgcaggtttttaagcaagaaattgaaaatagaagtagtgcttttcgttttttgccagaagagcatatttcaagtgatctagataaatttgcatatgatattttgtttgatggttctgttaataaattcaggagtatagtaggtctggcggaaaatgaaacagagctttctaagtatatatcctctcatattttagctcatagattgtgtaatttaccttctaacgaacataccttaaagcaaattacattattctttaaaggtgaaaatgggttaaggttttgtcgattgtgggagaaggttctttcatataccttaattacgaggagatatggcttttcaataatgttttataagcaagttattgagttaataagtaaggttaaatggtatagaaaagatgatggtaatgtaagcgatagaaataatgaagttagtggcttggtagctgataagttaaagcagggaattcagcaatatatagatatttcactgtgcttaaatctcgcattgctagatttagatattttgcttggggatgaaaagccacgaaatagaagtttggaaggattgtgggatttaataaatcagcatgatgacatgcccttgatgataaaaagatttaggacgagtaatatgattcgtcataatctagtttcttggcctttagctaattacaccagttataacggtgatcttacagaagaaaatttatatagtaaattgcatggcgtttcacttttaaaaagaaagattaataaaaccccaagatatatccatgccgatgaagaacaactatttgaattaatcgatgctttgcataccaatactttgaatgactttacagaggaaaataaatatcatgagaaaagttgctctgtagaaagtataaaagacaataaagcactggaaataacgatcgatgttgacgatgctaaacataatgacacagtgaaaattgctcttgcaaatatgaaggtcgaatacaaagatattgagagtgcatgtagaaaagatcagtcgccaaatttaagctatgagcgacagaaaaatctttatcgtattcttaattccgctaccgatgaaaaggttcaaatattacttcttcctgagttatcgatacctgtttcatggttgccatttatggctgcacattcaagaagaaagcaaattgctttaatatttggtcttgagcactgggtggtgaatgaccgtgcgaataatattttggttgagatgttaccttatacttcccattttaagcataagtccagtatgttgatattcagagttaaaaatcactatgcaccaagtgaaattaagatgctgacctcattgaggctggatgtttcgtctcctgttcctgatgagcaaaaatatcatttaataaaatggaaaaacatatcgttttcaacgtataactgctttgagttagcaaacattgaacatcgggcacttttccgctcaaagcttgatatattatttgctagtgtgtggaataaagatattaactattatcaacatatcactgaatcagccgctagagatttacactgctatgttgcgcaatcaaatacatcacattatggtggttcatgtgttcttcagcctactagtagtacaatttccaataaaatatatgttaaaggtggagagaatcattgtattttaacagccacgttgaatatctatgcgttacgtgaggctcaatatcgctcatttaggatagattcggattttatcaaagataatcctccaggatttgattatgacgaacttttagctcggggtggaaaatga

SEQ ID NO: 98035 - DNA, 1398 bp, Enterobacter aerogenes; identical to SEQ ID NO: 89557

SEQ ID NO: 98036 - DNA, 1038 bp, Enterobacter aerogenes
atgaccgttcgaaaattaagtgatgggcaatgggtcgctgacttttatacagtcaatcgcagcgatggaaagcagggtaaaagagtccgtaaaaaattctctactaaaggggaagctcttgcattcgaaaacttcacaatgcaaaaggttgataactccccctggctaggtgatggcaaagatcgccgtcgtctttccgacctcgttcacctttggtttgaccgtcacggaattaccctaaaagatggcgagaaaagaaagaaatccatgctatgggcggcggagtgcatgggctccccacttgctagcgaatttagcgcccagctatttaccgcataccgcgcaaaaaggcttgaagggcatttcgctcgcacaaagagaattagccaagtatcgccacggacgatgaaccttgaacacgcttactttttagctgtctttaatgaacttaaacgattaggtgagtgggcaccacccaaccccctagaaaatgtcaggcaatttcgtactgaagaaagcgagatgtcatatctcacagctgagcagattgaatcgctgttaaaagagtgccgcaacagttctgctgaagacctagagataatcgttaaaatttgcctggcaactggagcgagatggagtgaagcagaaagcctaaagcgttctcaggtttcctcggggaagatcacttatatcaagactaagggtaaaaaaaatcgaacaatacccatatcggccgagctaatgggggaacttcccaaaaagaatggtgcgctatttaccccgtgctactacgcctttagaaatgccctggatcgcgcagggatagagcttcctccaggccagttaactcatgtcttgcggcatacgttcgccagccactttatgatgaacggcgggaacatcctcgtattgcaaaagatactggggcacaccgatataaaaatgacaatgagatatgcacacttcgcccccaaccatcttgaggatgcagtcagactcaaccctttagattgtcgcaaaagtgtcgcatcaacttag

SEQ ID NO: 98037 - DNA, 585 bp, Enterobacter aerogenes
atgaagctacaaattgatttttcacaaggcggaaatgacaccttagatcgcgtcattgaggcgtatggattcagaactaaagtcgctcttgcagaacatctagggatagcgagtagtagccttgctaatcgatataagagggactttttcccggcagatatcgtggttcgctgcatggctgagacgggcgctacgcttgagtggctggttaccgggaatgggccaaagtttgacggcgaagacctcgacattctgagaattgccagacaaaaaattgtcgacggtcagctttatgactcaggggttcttatgttggataaagctacatttttgccaggaaaagcagtaccaacgaagcctctttgtatcattgaaagctcaacgacgtatgttatcgagagggagttttcagaggtgtttgatggtgaatggcttgtcgatattgaaggtaaaacaagcgtaaggacactgacccggatcccagtaaagaaagttcgtgttagcggcgctggcgcggcttttgactgttccattgatgacataagcgttatcgggcgtgtggtgctaacaataatcagcggatga

SEQ ID NO: 98038 - DNA, 222 bp, Enterobacter aerogenes
atgcgaccaaacattacaatcgtcatccctgagccttacctgccacttgatgagtattgccgccgtactggcactaacaaagaaacagctaagaacctgattgaatacggaaagttgccaatcaagccaaagggtaaacagactaagggcctggttgaagtgaacatggctgctctgactattcaagctctgagtgaatgcgacatttcacttaacgtgtaa

SEQ ID NO: 98039 - DNA, 219 bp, Enterobacter aerogenes
gtggatagagagttgagcgagcacgttatgattgagcgagtcgagatgattgcccgtcttacagttgagggcacttgcagggaaagagatcgtgaaatagcgttaggattaattgctgaaattgcgaagggggttcccttaaaaaacaatgggtttaccgtgattttttctgcatcgcatgtgaaggataaggtaggtagtagctgtgaatgtgactaa

SEQ ID NO: 98040 - DNA, 204 bp, Enterobacter aerogenes
atggactggattacacatatcatcactttttttgtggggcttggcgctggttggtcgattcggattgtgtattcgtcgcgtaagcaagttggtgacaccactgcaaactcacacaatcataatgtaacgcagacgggtaacagtgttacgaacggcagcattgtcggcggtgatcaggatagttcacacattaaaaggggttag

SEQ ID NO: 98041 - DNA, 567 bp, Enterobacter aerogenes
gtgtcgatcgaacagtcgggtaacgctgtaaccaatggcaacattattgcaggtgaccagaataatcaggtcattcatcaatacgctgcaaagggaactaatcgtgagatacaggacctttacgagcgtttgagaaggggagactcgagtgattcgaactcggatttttgtgctgaacttgagcattatatgtcccttcaacctgaaatagatgttcgggggctagatgcaaagttgattgaaagcaacagaaaagacttgttgtttttagctaagcagatgaaggaaaaggctgcaaaagcaatcatgcgtcgtcaaacctctcgaacagctcagaggatatttgtaataatcttagaccagatccattatgattttataatgaaggtaacaccactaatagaagcagatagtcctagagtgattgtagatgaaaaaattagttcaataattgacgagctctatacctcattaggtgaaaatcttctggagttaactccaaaagatcttcttggactattgttttttcttggtggtaattgtcatataaggtgggataaatgttaa

SEQ ID NO: 98042 - DNA, 501 bp, Enterobacter aerogenes
atgttaatttaccatccagcatatgatgcgtatcattgtctttttagaatgattgcgttaattgatcatgtaaatgaaattgaagttgataaagccaggatattagatttttatctgatatttccttctttggtatctgaaataagaatgcctcataattacagtggagttaaaaaagaggcaaaaaaatattccaatgtttatcggaatccaattaatatctcatcaacctttagagatatgcatgaaattcaaatggcagctattaggtgtttggcagctactgggttaattgaagtaacgcctctcgaaagagatcttatcaagcggaccgataaatctatacctgatgggttgcttatatccatgtgtgattttctgaatgctaaagaagaaatttatactttcatcataagtaaattgtcgcagttccctttgacagggaaggatggacttaaagatagaacgaatttaatggagtttagatatgacttttcttaa

SEQ ID NO: 98043 - DNA, 1938 bp, Enterobacter aerogenes
atgacttttcttaatccatctttttctgtaagtaaattgaaagtgtttcaacatgggcgcgaagcatttagttgtgactttcataaaggtgtaaatgttatcagggggcgtaatagttctggcaaaacgactataatggatttgcttgcgttttctattggggctgagaatattcgatggaaaccccaagctcttctttgcactttgacaatggtagaggttcttttaaacgataaacctgcatgttttaaacgagaaataagcaaagaatccatgcggccgttaagtattttttgggggagaatggaggatgctcttcaatcttcacctagtcagtgggagacttaccctttcaagcgttcagaaaaatcgctgagtttctcacaagtgattttgaatgcattggatatgccattagctcaaggggagggtgcttcaattttaactatgcatcagattctccgcgtattatatgcagaccaaccttcggttcatagcccaatctttagaaatgatagttttgacaaggctttgactagggaaactgtcggcgattatttatgtggtatatttgatgatgttctttatagctcattaatcaggcttaaacaggtagattctgaactttcgactaaaatcacggagctaaaaagcatatttacagttcttggtcgttctggtcagtcagaaaatattcattttattgagcagcgaatttctgatttggaaaaagaaaaaaatgacatttaccacaagctaaatgaattaaaaggtcgtgctgtatctgatggggataataaaaaatcagatagagagaaaacgaataatattcgtaagcgactgaataaggcaaaggaagcagaagttaaaaataccgataacattaattctttggaaatggaagtcgctgattcagaaatgtttattaatgagttggaatctaggtatcaggcgcttaatgagtcaggtaaggctagggagtattttagtaatgtacaatttcaattctgcccaagctgtttaagtgaattgcataattccgatgagggcgggtgtacattgtgcaaaagtcatgctccagaaggaagcgaagctccacagctattaagaatgaaaaatgaaatatctgtgcagttaaaagagtcaagatatttacttgagcataatgttgaaaagctaaaagaacttaagcttcaggctccaattctcaagaaagatgttcagactcttattcgtgagtacgaggctgtttcaacagtgtgggaaaatgctttcgaaatagagtttgaagcgttaactaaagctcttggtcgagttgaagaggagattaatcaagcgtatgagtcgcaaaagctaagtgatgttatttcagaccttcaaaaaaatcgcgattcattgcaatcagaaaaagaacgcttggaatcacttgttgactctttacaaagcaaagaggaaagcagaaagaaagacatttctcaaactgttgagtctatcatgtctagactgctaaaacttgacctgccattgcagactgagtttattgatccaaggcaaattaattttagcttcgtagataatgaggtatacgttaatgggtctaaaaatttctcagagagttcggctgtggtgcttaggcacatcttccatttggcgcttcttactgcaagccttgaaaagtcttatatgagattgcctcgtttcttgatgctagatggcattgacgatggaggtatggagaaagaacgtagccataatctgcaaaaaattattgttcaagaagcagaaacatatgagtatgattttcagttgatttatgcaacttcagaaattaatcctacatacgacaatacagatttgattgttggaagatactttaatcctgaagatcgctctctcaatgtgagttatgtagctacagataatggaagattaatttaa

SEQ ID NO: 98044 - DNA, 1044 bp, Enterobacter aerogenes
atgagtaaatacaaaggccgcaagccacagccacaaaagcgcccgcgcaacatgaaagacagcgcgccccaaaaaatggaggcgtttacctttggtgaaccgagcgccgtgctcgaccgccgcgatattctggattacgtggaatgcgtcaataatggccgctggttcgaaccgccggtcagctttaacgggctggcgaaaagcctgcgcgccgccgttcatcacagctcgccaatttacgttaagcgcaacattctggcctcaacgtttattccgcacccgctactgtcacaacaggacttcagccgcttcgcgcttgattttctggtgtttggcaacgcgtttttagagctccgaaagagtgtcaccggtcgcccgctgaagctggaagcgtcaccggctaaatacacgcggcgtggtattgaggatgatgtctactggtgggtgccgtcattcgaccagccgcacccgttcgcaccgggatccgtattccacctgctggagcctgacatcaaccaggagttgtacggcatgccggaatatctcagcgcgctaaactccgcatggctgaatgaagcggcgacgctatttcgtcgcaagtattaccagaacggagctcatgcgggttacatcatgtatgtgacggacgccgcgcaaagcggtaccgatgttgaggcgctgcgcgatgcgatgcgcagctcaaaagggctcggcaacttcaaaaatctgtttttctacgcaccgcacggaaaaccggacggcataaaaattgtcccgctcagtgaggtggcaacgaaagacgatttcttcaacatcaaaaaagtcagcgccgccgacctgctcgacgctcaccgcatcccgttccagctgatgggcggcaagccggaaaacgtcggttcgctcggcgatatcgagaaggtggcaaaggtgtttgtccgtaacgagctcatcccgttacaagaccggatgcgcgaggtcaacgcttgggccggtcaggaggtgatccggttcaaaagttacaccctcgacaccgaaagtgactga

SEQ ID NO: 98045 - DNA, 1770 bp, Enterobacter aerogenes
atgacaatcaccaccgacaccactttgttaaacgacccgcgacgccaggcggctttactgtactggcaggggttctccgtgccgcaaattgccgaaatgttgcagaccaaacgcccgacggtgcagagctggaaacagcgcgaccagtgggacgaaacggcaccgctgaaccgggtcgaaagcaccttagaggcccggctgattcagctctacgcaaagcccaacctgacgccccacgatttcaaggtggcggattttctggcccggcagatggagcgctttgcacgcattaatcgctatggccagactggaaacgaggttgacctgaatcccaacgtggccaaccgcaacaaaggtgaccgcaaaaagccgacaaagaactttttcagcgacgaggctatcgagaaactggaagagattttctttgcagagtcttttgagtatcagctccgctggcaccgcgccgggcttgagcaccgcattcgcgacattctgaaatcgcgccagattggggcgacgttctacttttcccgcgaggcgctgctgcatgcgctgaaaaccggccataaccagattttcctgtcagcgagtaagacgcaggcgtatgtattccgcgagtacatcattcagtttgcccgccgggtcgatgtcgacctgaccggtgacccgattgtcataggcaacaacggcgcaaagctgatttttctcggcaccaactcaaacaccgcgcagagccacaacggcgacctgtatgtcgacgaaattttctggatccccaacttccagaaattgcgcaaagtgtcgtcgggcatggcctcacaaagccacctgcgcagcacctatttttcaacaccctccaccctggcgcacggcgcttatccgttctggtcgggggaattgttcaaccgtggccgcgcccgcgccagcgagcgggtcgacatcgatatcagtcatgacgcgctcgccgctggcgtggcgtgtcctgacggtcagtggcggcagattgtcaccattgaggatgcgctcgccgggggatgtacgctgttcaatctggagcaactccagcgcgaaaacagcgtcgacgacttccgcaatctgtttatgtgcgagttcgttgacgacaaagcgtcggtgtttccgttcgaggatttgcaacgctgcatggtcgacagtctggaagagtgggaagactttgcgccgttcgccgacaacccgttcggctcccgcccggtctgggtgggatacgacccttcgcacagcggcgacagcgccgggtgtgtggtgctcgcgccgccggttgtcgccgggggcaagtttcgcattctggagcgccatcagtggaaaggcatggacttcgcgactcaggccgaatccatccgccagctcaccgaaaaatacaacgtcgagtacatcggtatcgatgcgaccggcctcggtattggcgtcttccagctggttcgctcgttttatcccgccgcccgcgatatccgctacacgccggaaatgaaaaccgcaatggtgctgaaagcaaaagacgttatccgccgtggctgtctcgaatatgacgtcagcgccaccgacatcaccacctcgtttatggcaatccgtaagaccatgaccagcagcgggcgcagcgccacctatgaggccagccgcaccgaggaagccagtcacgcggacgttgcctgggcgaccatgcatgcgctgttaaacgaaccgcttaccgctggcagcggccaggtaacatcatccattctggagttcaactga

SEQ ID NO: 98046 - DNA, 855 bp, Enterobacter aerogenes
atggcaaaaaaagtttcaaaatggtttcgcatcggcgtcgaaggcgatacctgtgacggccgcgttatcagcgcgacggatattcaggaaatggccgagacctttgacccccgcgtctacggttgccgcattaacctcgaacacctgaaaggcatcctgccggatggcccgttcagtcgttacggcgatgtggtcgagctgaagtctgaaaagattgacgacgattcggtactgaaaggcaagctggcgctgttcgccaaaatcaccccgaccgatgacctgatcgcaatgaataaaaaattgcagaaggtctacacctcaatggaaattcagccgaatttcgccaatagcggtaaatgctacctggtcggcctcgccgtgaccgatgacccggccagcctcggcaccgaatacctcgaattttgccggggtgccaaatttaaccccctcaaccgcttcaaagccgagccgggcaacctgatttccgtcgccaccctcgccgagctggagtttgaagaccaggcggaaaatgtctttaccgccctgagcgacaaagtgaaagcgatcttcagccgcaaacaggccagcgatgacgcccgttttcaggatgtgcatgaagccgtgacggccgtcagtgaacatgtgcaggaaaacctaaccgccactgagcagcgtcttgccacgctggaaaatgcctttgcgacgctgaaacaggacgtcaccacgaaggccgaccagaccagccaggcattcagcaagttaaaaacgtcgctggataaaaccgaaagcaccacgcagccacgccgcaagctctccaccggtggcggtggtgatgagctgctgaccgactgctaa

SEQ ID NO: 98047 - DNA, 1059 bp, Enterobacter aerogenes
atgcgtcaggaaacccgttttaaattcaatgcctacctgtcccgcgttgccgagctgaacggcatcgacacggacgacgtgagtaaaaaattcaacgtcgagccgtccgtcacgcaaaccatgatgaacaccgtgcagatgtcctcggcctttttgcagaaaattaatatcgtgccggtggatgagctgaagggtgaaaaaattggcgtcggagtcaatggcaccatcgccagcaccacggacaccaacagcggcaaggagcgtaaaaccgccgactttaccgcgctggagtccaacaagtacgagtgcgatcaggtcaacttcgactttcacttcaaatataaaaagctggatttgtgggcgcgcttccaggacttccagcgccgtattcgtgatgccatcatccagcggcaggcgctcgatttcatcatggccgggttcaatggcgttgagcgcgccgaaacctctgaccgcgccactcatccgatgttgcaggacgtcgccgtcggctggccgcagaaataccgcaatgaagcgccgacccgcgtgatgagcaaaatcgtcgacgaggaaggagacgtcgtttccgctgtgatccgcgtgggtaaaaacggcgattacgttaacctcgatgcgctggtcatggatgccaccgacaacctgattgacgagatttatcaggaagattcggagctcgtcgcaattgtgggccgtaagctgctggccgacaaatatttcccgatcgtcaacaaagaccagccgaacagcgaagcgctcgcggctgacatcatcatcagccagaaacgcatcggcaacctgcccgccgtccgtgtgccgtacttcccggcgaacgcgattatggtgacgcgtctcgataacctgtccatctatttcatggacgaaagccaccgccgatccatcatcgaaaacccgaaacttgaccaggtggaaaactatgaatcgatgaacatcgattatgtggtcgaaacctacgccgccgggtgcttcattgaaaatatcaagctgggcgatttctctgccgcgcaaccggagggctaa

SEQ ID NO: 98048 - DNA, 744 bp, Enterobacter aerogenes
atgacgagccccgcacaacgtcacatgatgcgggtctcggccattgaaaccgcgcagcgggaaaacaacccgctgcggcatgccactgcctatgagcagatgctggttaagctggccgcagaccaacgcacgttaaaagccatctttggtaaagagctgaaagccacgaaaaagcgcgagctgctgccgttctatctgccgtgggttagtggcgtgctggaacagggtaaaggcgcgcaggatgacatcgtgatgaccgtcatgctgtggcgtcttgatgtcggcgatatcagcggcgcgatggatattgcccgctacgcgtttaagtacggtctgaccatgcctggtaaacaccgccgcccgccgcagtacatgtttaccgaagaggtggcgctcgccgccatgcgtgcccatgccgccggtgaaccggtcgtcgtcagccagctgctcgacacgctggcgctgaccgccgccgccgatatgcctgatgaagtgcgcgcaaaactgcacaaaatcaccggccaggtgctgcgggacaacaaacagcccgccgacgcgctggcccacctcaggcgagcgatgcagctcgattgccaggcaggcgtcaaaaaagacattgaacggcttgagcgagagctgaagcccaaaccggcaacagtcgttaaagccccggtaagagcgccgcgcgccgtgaaaaccacggcaccggctaaacgtggccgaccgaaaaagaccgccggttaa

SEQ ID NO: 98049 - DNA, 507 bp, Enterobacter aerogenes
atgacgacgctgattattaaaaagaacgatgagccgcagccgggtggcgtggtggtaatcccgccacctgccagcgatgagccggtgataaaaaatacgtttttctttcctgacatcgacccgaaacgcgtgcgtgaagggatgcgacttgagcagaccgtcgccccggcccggcttcgtgaggccatcaaaaccggtatcgccgaaaccaatgccgagctgtttttgtggcgggaacagcagattgccgggggttttagcaagcttgccgacgtgccggctgacgatctcgacggagagagtgtgcgcgttttctattacctgcgcgccgtcacctcaatggcgaccgccacgctctatgagcgttatcgcggtgtggatgccagcgccaaaggtgacaagaaagctgacagcatcgataccactgtcgacgagctgtggcgggacatgcgctgggccgtatcacgcgtccaggacaaaccccgctgcatcgtgagccaaatctga

SEQ ID NO: 98050 - DNA, 204 bp, Enterobacter aerogenes
atgcaggccatcgcgcaacagggcgacacgctcgacatgatttgcgcccggtattacgggcgcactgagggggtcttcgagtcggtgctcgccgcaaatccggggttagccgagctcggcgcagtattgccgcatggcactgtgatcgagctgcctgatgtgaagtcatcccccgtaacagaaaccataaacctctgggagtaa

SEQ ID NO: 98051 - DNA, 291 bp, Enterobacter aerogenes
atgacggaaggggaaaaaagcgtcatttcgctttttatcatcggcgcgctgattgtcgtcggtaaagtgctggccggtggtgaaccgatcaccgcacgtctttttattggtcgcacgttgctgggtggctttgtttcgatggtggccggtgttgccctggtacagtttccagacctgccaaccgcggccgtgtgcggatttggctccatgctgggtatcgccggttatcaggcggtagagcttgctatccagcgcaaggttaaaaaaggggaaaacgatggcagtcattaa

SEQ ID NO: 98052 - DNA, 498 bp, Enterobacter aerogenes
atggcagtcattaagacacatcccaacgttgcggcattcctcgacacgctggcgttttcggaagggacagcaacgcatccgctgacccgaaacaacggttacgacgttatcgtcacgggtatcgatggcaagccggagatttttaccgattatcgcgatcacccgttcgccggtggacgcccggcgaaggtcttcaatcgtcgcggggaaaaatccacggcatccgggcgttaccagcagctttatctgttctggccgcattatcagaaacagctcgctttgccggatttcagcccggcatcgcaggacaggctcgccattcagctgattcgtgagcgcggcgcgctggaagatttgcagcaggggcgcatcgagcgcgcgatctcccgctgtcgcaatatctgggcttcattgccgggcgcagggtatggtcagcgcgagcacagcctcgacaaactggtatccgtgtggcgcaaggccggagggatatccgcatga

SEQ ID NO: 98053 - DNA, 432 bp, Enterobacter aerogenes
atgaaaatagtcattatcctgctggcgctggcctgtgcgggtctgctgtggatgcgacacgataacagcaatttgcgcgcctcttttgaacgtgcgaaccgggtcgccggtacgcagaaaaccacgatcaccatgctgaaaaatcagctcaacgttgccgcagagcagtcgcagcgtaaagagctggcgcaggttgccatgagggataagctcaccgccgctaacctgctggccttcaggcgtgaacaaactatcacgaggttactcaatgaaaatgacgcgtttcgccgctggtatcgcgctgatttacctgatgctgtgcgccggttgcaccagcgcaccgcctgcaccaacgccgccgccggtgattgtttacaacgcctgcccgaaggtcagcccctgcccgatgccgggaagcgacccgctgactaa

SEQ ID NO: 98054 - DNA, 468 bp, Enterobacter aerogenes
atgttaaagcccaacagtctgcgaaaagccttaactgatgcggtgccggtattgcgtactaaccccgatatgctgctcgtctttatcgacaacgggaataatgtggcaacgctggcgcgctccttgtcgttcgaaaaacgctacacgctcaacgtcgtggttaaggattttaccgatgatattgacctgctgtttgtgccgattatggcctggctgcgcgtcaatcagccggacatcatgacaaccgatgagggcagaaaaaaggggtttatctggtatgccgacatcaacaacgacagcagcctcgatgtcagcatcagcctgttgctgaccgaacgcacgctagtcaaagaggtcgacggcgcaatgtacgttgagaacatcccggagccgccaccgccggagccggtgacatgccctgtcgagatgtggagtaatggcgaacgggtgagtaaatgggatgaatga

SEQ ID NO: 98055 - DNA, 456 bp, Enterobacter aerogenes
atgaatgacttcaaaccttttgaggacaggctcgccggattgatagcggccctttcccccgccgggcgtcgccggttaaccgccgacattgcgaagaaactgcgccagcggcaacaacagcgcattaaatcgcaaaaagcgccggacggttcgccctttgccccgcgtaagcgcccgcccgtcagggcaaagcaaggccgtattaagcgcgagatgttcgcgaaactgcgtaccagtcgctatatgaaagcaagcggtaacgacagcgcggcggtggtagaatttaccgggaaagtgcagcgcatcgcccgcgtgcatcaactcgggcttaaagataagccatcccccaaaagcgccaccgtagagtacccgcagcgccagctactgggttttgatgatgactctatacaattgattgaaaaggagttattaatatttttgtctaaaaacaaataa

SEQ ID NO: 98056 - DNA, 744 bp, Enterobacter aerogenes
atggataagaaatttagtttgctgaggcataaaataaaagaatcacaaagtgcggtaatgaataaggttattagcaaccataaaactgaaatatgtattctttgtggtagcgataatgaaattacaaaggaacacgtgttgcctcaatggtcatttgagggaaggccagagaaattcctgataaatactaaaaacaatcaatcgtctaattacataaagatgactgttccggcatgcaagacatgcaactctgatttgcttggtgcttttgaagattatcttaagcgatttttattggaaaaggacggttcggaattaaataattatgaagtggattgtataatatggtggttgcaatatattgcgtttaaattacagataatggatttgcgttctcaattcttgcgatacaaaggaggtgagtatatcccttttttatctaatatccctgtggcaatgttctggggagagattgatacgaccccaaatgatgtgttcaataccataagaagaagtcgcagggtgctaactaagaaaagaaaggcaaataagtacaattcattattggtttttaacacaacaaataaaagctttcacttttttcacaaggtagatgattttatttttattgaaatgcctcaagttgggaaagcattctttttatttttgaataaagaatttgctgaacataaagacgcacatgcagaatgcatggagataataaaaaaggtatataacgactga

SEQ ID NO: 98057 - DNA, 636 bp, Enterobacter aerogenes
atgaatactatcgcatctatccaggaactcgcccgcgcgatacgcaacatgatccgcaccggcatcgtcgtcgaaactgacctcgacgccgggcgctgtcgcgtacagaccggcggcatttataccgactggctccagtggctgacgcaccgggccgggcgctcgcgcacctggtgggctccctctgttggtgagcaggtgatgattctggccgtgggcggtgagctcgataccgcttttgtgctgccgggtatttattccgacgacaaccccgcgccgtcggtctcggcggatgcctggcacgttcagtttcccgacggtgccgttatgaattatgagccggaaaccggcgcgctgaccgtcaccggcataaaaaccgccgatgtgaccgcatccgactcggttgccgtcagcgtgccggtggtgctggtcaaagcctcgactcgcgtcaccctcgattcaccggaggtgatctgcaccaataagttgacgaccggcacgctggaggtaaagaacggcggaaagatgtccggcgatatcgagcatgacggcggctcattctcttctaacggcaaggtgctccacacccataaacacccaggcgacagcggcggagaaacgggggaaccactatga

SEQ ID NO: 98058 - DNA, 348 bp, Enterobacter aerogenes
atgacagcgcgttatctcggcatgaaccgctcgaccggtgaaagcatttcagacgttgaccatatcagccagagcattggggatattctgcgcacgcccgtcggctcccgcgtcatgcgtcgtgaatacggctcgctgttgtcgcagatgattgaccagcctcagacaccggcgcttgagctgcaaattatggccgcgtgctacatggcgatcctgaagtgggagccgcgcgtcaggctgaccagcatcaccacagcgcggcagtttaacgggcagatggtcgtcgacgtgaccggccaaatcaccgataccggtgagagcctttccttaaccatccctgtgagttga

SEQ ID NO: 98059 - DNA, 909 bp, Enterobacter aerogenes
atggcagttatcgacctgagccagctccccgcgcctgatgtggtggaaacactggattttgaaaccatcctcgccgagcgcaaagcgacgctgatttcactgtatccggaagacgagcaggaagcggtcgccaggacattgacgctggagtcagagccactggtgaaatatctcgaagagaatgcctatcgcgaggtgattttacgccagcgcattaacgaggcggcgaaagccggaatggtggcctatgccatcaaaaacgacctcgaccagctcgcggcaaataataacgttgaacgcctggtcattacccccggagacgatacccaaatcccgccagtggatgcggtattggaatccgacagtgatttacgccagcgcatcccggcggcatttgagggtatgagtgttgccgggccgaccggtgcctatgaatttcacgccctgagtgccgacggacgtgtcgcggatgcttcggctaatagcccggcgccagcagaggtcactatcgcggtattgtcgcgggaaggtgacggcacggcgtcggatgatttattgatggccgtcagtaccgcgctgaatgatgagagtgtacgaccggtcgctgaccgcctgacagtcgtctcggctgaaatcgtcaattatgcgatcgacgcggtgctgtatgtttaccccggcccggcgaccgagccgattcttgctgccgcaaaagcgcagttaactgcctatatcacggagcagcgccgcctcggtcgtgacatccgaatgtcggcgatttacgccgcgttgcatgtgcagggggtccagcgcgtcgagctgcgcgaaccgctggccgatgtggtgctggataaaacgcaggccgcttattgcactgacgcccgcgtcattatcgggggatcggatgaataa

SEQ ID NO: 98060 - DNA, 618 bp, Enterobacter aerogenes
atgaataattcgctgatggcgaacgggtcatctctgctggaacagcgagccgccgcagcatgcgcctctatcagcgatttatctgtgccgctgcgagatttgtggaatccgtggaaatgtccggtgaaattcctgccctatctggcgtgggcgttttctgtcgaccgctgggatgaagactggagtgaacaggagaagcgccgcgttatcggtgaatccttctggctccatcagcgaaaaggcaccgtcgccgcccttcgccgggtggtggaaaacatggggtacagcctgtccattgaggagtggtggcaggtggctgacccggcaggcacattccgaatcaccgttgatgtgaacgatataggtattacagaggcgctgctaaccgagctggaaaggctgattaatatcacaaagccggtcagtcgccatctttccggcatcaccatgctaacccggacggcgggagacatttattacggcatggcggtgagtgagggagatgttatcagcgtctggcctgcgggctatgagccggatatgagtattttttataacggtcgtcagtattttgacggcgaatgtgtgtttaccgggaatgccagcgatgaaaattaa

SEQ ID NO: 98061 - DNA, 1728 bp, Enterobacter aerogenes
atgaaaattaacgagatttcccagtgggaagaagaaatttatctcctgcgacgaaatgaccgggtgctgggcggtgttgatggtgtcgccaatatgcaggcgcgacagcttgccaaccgcacgcaataccttaaagcgctttcggagcagcagggggaaaatatagatggtgccatcgactcgctgcgcggtgacctgaaaagccctgatgggtggggagagactatttccgccggttatcagagcatggaaagccgctttcaggagcaggcgaccatctttgattttattaaaaacgaaacggatattcagaccctgaaatacgccgccggggtggatgtggacgtgtcccgcgcggttgaggatgccattaaagccggaaagactgcgctttattttccgccggtgccgggtgtctataacatcggtgatgtggacggcgcgcagtccggatttattattcatggtcatgcccgtaaaccctataccgtcagcacagattcttcattcaatggctgcggaacggtcattcgtcttttgcagggggcgacccgtctgatgacctttaatacccgcatgacgtttatcaatgttttgctggatgggcgctcactttcggtcaatctgatgcagggcgccacgcagctcaacgggtgccgctttatcagttgcggtgtatatcgctggtcaacggcatttggcagggcaaataactatatcggtacgctctacgttaaggataccaacgtcagtgagaacgtcaccggcttttataatctgattgattcccgtgttatcgactcgacgataaacaaaaattatggtcgcggtgtcagcttactgagcggtgctaacaataatgttttccttggcgttcgtaatgagtggaatgaaaaggaaaactactactcctacggcggcgggctgaatgaagtttccggggagttgtgcgaccgtgccggactggcggcgtttgtggcttccggtggcgggagctggattgtcagcaaccatgttatccggcgttcggggaaaaatgccgccgcaggctctgacgataactgtcatttccgggtcgagggggcgggctctttcatcatgttgtccaacgtcatgacgctggccggtcgtggtgacagtggagaaggcaacctcagcccggaacggaccttcatcacaaccggtaattccgctgatatgaaagtgattgctgccggatgtgacctttccgggtgtacttcggtttccggcattatccgggaaaaaaccactgccattaaaaacatcagcgggtgtctcggcacccctgatatctgtaattccgggctggcgcagcgtgaagatggccatgaatatatcggtcctccactgaaaaaaggcattctcactgcgaatggatctctggtctacacacatacgcaaaaggctcttgaatcatggcagtcccccgttttcaggatgctgaaaatacaggttcgccgtccgtttgacggcaataccgagtattaccgggtgccgatgagttttaaatacgaaagcactgccgtggcaatgactgtcatttcatctgagcagaaaagcgggccgtccggtgcgtggggatatggcgacggctcatccgttgctgtcagcattagcgtatcggcggatggctcgaccctcagcatcacgctgaccagcaaggataattacgatcgtgaagttaactcatatctggagaactggtaa

SEQ ID NO: 98062 - DNA, 180 bp, Enterobacter aerogenes
atggaaagctttgagagctatgaaaactttaacgactggtacgaggcgttgattaaagtcggggaagcggcggacaggacgttttcctacaaactgatgttcctggaattttacgaccggggcatgacgccggaagaaacgctgactcacattatcgaaaatggcattgtgacggaataa

SEQ ID NO: 98063 - DNA, 1068 bp, Enterobacter aerogenes
atgcctgatttaactttcagcaccattctgaccaccgccggtgcggaaaagctggcgcgactccatgcggcaggtcaggcgctgacccttaccgaaatggcggtgggtgacggcaatggtcagagtcttgccccgaccccggaggcgacggggctggtcagtgagcgttaccggggctttctgaacaaaattcgtgttgccgacagcgccgccagcattatcgaatcggaactgctgatttcagcccagaccggcggattctggactaacgaagccgcgctctatgatgaagacggggtctgtatcgcggttgccagcctgccaccgacctataagccgctgtcatcacagggggccgcgaaacaccagatagtgcggatgaatatagcggtcagcattaccgatgctgtcactatcactgataatccgtcggtggtgattgccacctcggaggacgtcagtcgcgccgaagataacgcaaaagactatgccgatgagcagttgcaggcgctggacgtcgcgacgcaggaggccatccggcaggtgttgcgggacgcctgggagcaggataaccccgtcggtaccacgcgctttttcagccagaacctgaatccgaatgaaaaatggccgtggtcgcattggcagtacaccggagaaaataaatctatccgcatcggtaaggctgacggttcgaacgtcgggcagaccggcggcagcgataacatcacacttcagcaggccaatctgcccgccgttcagattgacgtgagcggcgaaaccagcgaacaggggcagcaggagctgacgacatcgggcaacggaaggcaccggcacagggcaggtgacggggcgccgggggatacctggcaggacgccacacacggaacggataaccagaaatatacggggtggaactataccgactatgcagaagaccatcagcatagcgtcacgatcccgctgcacaaacactcgaccagcggcaaaacagccagcctcggtgagggcaaatcgttcagtgtggtggaatcccacacgctgctgatgtgctggagtcgtgttgcctga

SEQ ID NO: 98064 - DNA, 1182 bp, Enterobacter aerogenes
atgagcgattttcatcacggcgtccaggttgtcgagattaacgacggcacccgcgtcatttccaccgtatcaacggctattatcggcatggtctgcacggccagcgatgccgatgctgccaccttcccactcaataagcccgtactgattaccagcgtgcaaagcgccatcgccaaagcgggtacaaaaggcaccctggccgcatccctccaggcgatcgccgaccagtcgaagccggtaattgtcgttgtgcgcgtagccgaaggtgccggcgacgatgcagaagcgcagactatctctaatatcatcggcggcaccgacgaaaacggcaattacaccgggctgaaagcactgctcacggcggaggccgtaaccggcgttaaaccgcgcatcctcggtgttccggggctcgactcccttgaggttgcaactgctctcgcgccgatttgccagaagctgcgcgcctttggctatatcagcgcatgggattgtaagaacatttccgaggcgatgctctatcgcgagaatttcagccagcgtgagctgatggttatctggccggattttctggcatgggataccacggcgaacgcgaccgagaccgcctgggcgaccgcccgcgcgctgggcctgcgcgccaaaatcgaccaggacaccggctggcataaaaccctgtcaaacgttggcgtgaacggtgtcaccggtatcagcgcgtcggtcttctgggatttgcaggaatccggcaccgatgccgacctgcttaacgaggctggcgtcaccacgctcattcgcaaagatggttttcgattctggggtaaccgctgctgctccgatgacccgctgttcctgtttgagaactacacccgcaccgcgcaggttatcgccgacacaatggccgctggtcacatgtgggcggtcgacaagccgatcactgccacgctgattaaagacatcgttgcgggtatcaatgcgaaattccgcgagatgaaaacggcgggctatatcgtcgatgcgacctgctggtttgatgaatcggccaacgacgcggcgaccctcaaagccgggaaactgtatatcgattacgactatacgccggttccccctctcgaaaacctgacgctacgccagcgcattaccgataaatacctggcgaatctggtgtcatcggttaacagcaattaa

SEQ ID NO: 98065 - DNA, 516 bp, Enterobacter aerogenes
atggcaatgccgcgcaagctcaaatacctgaacacgtttctggatggcatcagctatctcggcgttatcgagtccgtcaccctgccaaagctgacccgtaagctggaaaattaccggggcggcgggatgtcaggctcggcccctgtcgattttggcctcgacgatgacgcgctggcgatggagatttccctcggcggcttccctgatgatgcgatctggtcgctttacggtgccgtcggtaccgggacgctactgcgctatgcaggctcttaccagcgggacgataccggcgaaaccgtggcggtggaagttgagacccgtttcaaggtgaaggaagtcgataacggcgagagcaaacagggcgaggataccagcagcaaattatcgctggtctgcacgtactacaagctgaccatgaacggtaaagagctggtagaaatcgacgtcctcaacatgattgagaaggtgaacggcgtcgaccgactcgaccagcaccgccgcaatatcggcctgtaa

SEQ ID NO: 98066 - DNA, 276 bp, Enterobacter aerogenes
atgagcaaagaaaacatcgtcaccctggaaaaccccatcaaacgcggcgagcaggtcatcgaaaaaatcaccctgatgaagcccaacgccggaaccctgcgcggtgtcagcctggccgacgttgcgcgctctgaagtcgacgctctgattaaagtgctgccgcgtatgaccagcccatcactcaccgagtcggatgtcgtcatgatggatttacccgatttgatggcgctggcaacaaaggtgatcggttttttgtcgccgaatttggcggattaa

SEQ ID NO: 98067 - DNA, 2439 bp, Enterobacter aerogenes
atgagtaacgacgttaaattgcaggtattactcaaggctgttgaccaggcgacccgcccgtttaaatccatccagacagtgagcaaaacgctgtctggtgacatacgggacactcaaaaatcactgcgtgaactgaacggccaggcatcccgtatcgacgggtttcgcaaggccagcgcgcaactcgccgttaccggtcaggagctgaagaaagctaaacaggaagccgccgcactggcgatccagtttagaaatacggaacagccgacgcgcgcgcaggcgcaggcaatggatgccgcccgaaaaagtgccgcagcgctccagctcaaacacaacagcttgcggcaggctgtacagcgccagcggcaggaactcagccaggcgggaattaatacccgcaccctggcggcagacgagcgccggttaaaaaccagcatcagcgaaacgacggcgcagcttaatcgccagcgtgaagcactggcgcgcgtcagcgcgcaacaggcaaagctcaacgcggttaaacagcgatatcaggccggtaaagagctggccggaaatgcggccgcaatgggtgccgccggtgtcggtatggcgacgacaggcacgctggccggtgttgcactaatgaaaccgggttatgattttgcgcagaaaaactccgagttacaggctgtactcggcgtggcgaaagactccgcagaaatgactgcgttgcgaaagcaggcacgactgctgggcgacaatactgccgcctctgccgatgatgctgccgggtcacagataattattgcaaaagccggtggcgatgtggcggcaattctagccgcgacgccagtaactttaaacatggcattggctaaccgacgcacgatggaggaaaacgctcagcttttacttggtaccaaaaacgcatttcagctatcaaatgaccgggtagcccacattggtgatgtgctttcagcaacgatcaataaatcggccgcagattttcaggggttgagcgatgccctgacatacctcgctcctgttgctaggactgctggagtgagcttggagcaagcggcagcaatgaccggggtgcttcatgataacaacatcactggatctatggccggtactggtagcagtgctgtggttagtcgtcttcaggcacctacaggaaatgcgtgggaagcattaaaagaactaggagttaaaacggctgatagtaaaggagatatgcggccaatctttagtattctgaaagaaatagatgccagctttaacagaaataaacttggtagcagccagaggggggaatatctaaaaacaatttttggtgaggaagcccttaagtcgtcaaacgtattgatacaagcagcctcaagtggaaaattggacaagttaaccgcggcctttatggcctcagatggtaagaccgatgagctggttaaggtcatgcaaaataacctcggcggcgactttaaagagtttcagtcggcatatgaggctgtaggtactgacctttttgaccagcaggagtcctccttacgcaaactggtgcaaaccgctactggctacgttctcaaacttgataagtggatccagcgaaataaagagctcgcgcagacgcttggggtgattaccgctgtggcgatcggggtcgtggggatgattggggctattggactgatttcctggccggtgataaccggtgtaaatgccatcatcgccgctgcgacggcactcggtaccgtatttacaacggtggccggaggcatcattaccgctattggtgcgatttcctggccggttgtcgctgttgtggctgcgattgtcgccggggcattgctcatccgtaaatattgggagcccatcagcgcattttttggcggcgtgatggaaggattgcgtacggtctttgcgccagtagcagaactatttgcaccgcttaaaccgatgtttgactggctaggtggaaaacttaaagccgcatgggactggtttaacaatctgattgcgccggttaaatcatcacaggaaacgttaaacagtttccgagatgccggtgtgttgtttggtcagcgcctggctgacgctcttactttaccgcttacagcattcaataagctgcgcagcggtattgattgggtacttgagaagctcggcataatcaacaaagagtccagtacgcttgaccagactgccgcgaaagcaaacgcagccacgcagggtaacacttatatcccggctaccagtacttatagcggctatcaggcataccaacctgtcaccgcacccgccgggcgttcttacatcgaccagagtaaaagcgagtatcacatttccgttgatggtagcgggagcggcacgcagctcgatcgtcaactacaggatgcgctcgaaaagtttgagcgtgacaagcgtgctcgtcagcgggccagcatgatccacgactga

SEQ ID NO: 98068 - DNA, 480 bp, Enterobacter aerogenes
atgatgcttgcactcggtatgtttgtttttatgcgccagacgttgccacaccagacgatgcaacgcgatgccgaatatctgtggccgtcaaactcacgcgtaggtaaacgggattctttccagtatctggggccgggggaagaaagaattaccctggccggtgtgttatacccggagctcaccggtggaaagttgacgatgacagctattcgtttaatggctgacgaagggcgcgcctggtcgttgctggatggcaccggcactatttacggtatgtacgtcatcaataatatcagcgagacagggagcctgttttttgctgacggcacggcgagaaaaattgatttcacgctgacgctcacccgcgtggatgaatcactcgcggcgctgtatggcgatattggcgaacaggccaatgcacttattggcaaggcgggtaatatggcttcgtcagtggccggcatggtggggattagctga

SEQ ID NO: 98069 - DNA, 1161 bp, Enterobacter aerogenes
atgctggatatgatgaatctcaatgcgggtggcgtcctgacgcccgattttatgctgatgctcgacagcaaagatattaccggcaatatcagtaaccgcttaatgagtctgacgatgaccgataaccgcggatttgaggcagaccagcttgatatcgagctcgatgacgctgacgggcttgtcgagttgccgttacgtggtgctgtgctgacactttatctgggatggaaagggtttgcgttaattaacaagggctctttcactgtcgatgaggttgagcatcatggtgcaccggatagcgtgacaatccgtgcccgtagtgccgattttcggggaacgttaaattccaggcgagaagagtcatggcatgacaagactttaggcgaaattgtggcggcgatagcgacgcgtaacaaactgacatcgagagtcatacctgaactggcgggaattaaaatcccgcatatcgatcagtcacaggaatcggatgctaaatttttgactcgtctcgccgagcgaaacggcggtgaggtttcggtaaaagcgggaaagttgctttttctgaaagctggtcgtgggttaacagccagcgggaaggctattccgcaagtcactatcacccgcagcgatggggacaggcatcagttttcgattgccgaccgtggggcatataccggtgtaacggcaaaatggttgcacaccaaagacccgaaaccacaaaagcgaaaggtgacgttaaagcggaaaccgaaagaacagcatttacgtgcactacagcatcccaaagccaaaccggtaacgaagaaaaaagcggtgaagacgccggaagccaaggaaggtgaatacatggtcggcgaggatgacaacgtgttcgccctgacgacaattttttcaaccaaagcgcaggcgatgcgagctgcccaggcaaaatgggacaaactgcaacgtggcgttgctgagttttcaatcaggctggcgatggggcgggctgatctttaccctgagacgccggtacaggttaaagggtttaagcgcgtcatagacgagcaatcttggacgatcactaaagttatgcactacctgagtaaaagcggctttacgacgagcctagagcttgaggtgaaattgtcggatgttgagtacgaatctgaaagcagttga

SEQ ID NO: 98070 - DNA, 408 bp, Enterobacter aerogenes
atgacagctatcaaatctatatttttaagcaccgcacttttagtttcttttagtgcgttggctagtgatgctgatatcagcacgttgaaaaaggaattaaatgtctttcaacctacagatattaccaagaaaaacaatgacataactgtagttataccagcaaaaaacatcactcgtgaagcctatgaagcgatcataactaatgggttatgcacaccgatatggacaaaagataccccttcttcattccttaatggtatcaatacctttaccgttgttaaccaatttaaagcttttggctatacactagattccccattgtcaacttgcaaagaaatgggcaattttatgccagagccagcaaaagtattaatgtattcaaaaacaaaaagttacactagtagctag

SEQ ID NO: 98071 - DNA, 1287 bp, Enterobacter aerogenes
atgcaactcaccaatgcagagctcgcacaagtcgagagaattaaaaacaaaattcctcttattgctgcgcaagatcccgaatacaaagtctttggcgcaagcaaatggaaatatcaatggccagaccccgtcaatgagcaatacgtttctaagtgggaaaaacagcatcgtgtggcgctgccgcgagaataccgtatctttcttcgttatatcgcaaacggcggcccagggtttgcctatgggctttatccccttagaaataccaggatctatggtgacatacaaagagagagtccaattcctctatatatgacgcaagcgcaggttgacacgctaaacgcgcaacgggaatcggatgacgaatgcctattttatgatggctcactggtcattatgactgaaggctgcacctacgatatcgcattagtcgttaacggaaaatatcgtggacgcttaatccaaacagatagcgatgaagaaactccattccggtttattcatgatattaatttccttgactggtatgagcgttggctggatgactttattggcgggatgagcatgggagggttcattagtagcgtagctggaagccaaaagcaattgagagtgtggtttcactctgcaacgatcccccagttacgcaaggcaattgtattttcattatgccgttttccgcatattgacgctgaaacgcaggccctttgggaaagcatctgtcgtactgacagcgactttattttatgcgaacaggcactgatacgtttaatagcggcccatgccgcctgcgtcgcggacatcatgcgcctgtacttcaacagcccaggatcgctgcaaaaaatcgcactcaataatctcatttttgctcttcaggcaggagtcgatttagacgaatatgttgaaccattgctattactcattccgcaacttgaagacaacggcctttttgaggccgtcgcgataatacgacaaaccagccataaccgatatgcgacttttcttcccctccttaataaagtggcaaaacaacaccagcgctatatcctacatgcgatgcgtcagtcacctgattttaaaatataccaaaaaaactatgtcgagcttatgctccctgtatttgcaagcaatgaaattgcgagggtgagtcaggcaatacagttcctttttgaagtggaagatgatcgtatcccaccgttaatcaatcagacaatagagcgcttcccggaactaacgttactatgtgagaattactatcgccacatgggaaatcactcaagacatcaataa

SEQ ID NO: 98072 - DNA, 567 bp, Enterobacter aerogenes
atgaagcgttcaattattgctgctgctgtattttcaaccgtgctgatgagtgttaatgcttttgccgcggcgccaagtgaagaacaggggcaattagttattattggcaaggttattaattcttcctgtcgttttcaaaccgattatagcagtacgattcaactggctgatgttgatgccacccgttttgccggcatggcgggcggtgaagtcttatccggtaatttcgctaccagcagtgatccattaactattgtttgcccggcaggcacggtattgaaatcgattgatattcgcggtggtacctatactgccggtggggtactcaatcctatctctgatattggttcagcccagggtgtcggctttaaattaaaactgggtgattcggagattaatgataattccatgtatgacgtcagtaatttgccgggagcggtgactactgatgacaatggtgtctatacaatgcacttctctgcgcaatacgcccgaattgatgccgccactccggtgaccgccggcgacgttcgctcggtgttaacgattgccgtctcggcggagtaa

SEQ ID NO: 98073 - DNA, 624 bp, Enterobacter aerogenes
atggctcaaggcacgctttatattgtttccgcccctagcggcgcgggtaaatccagcctgattcaggctttattgaaaacccaaccgttgtacgactcccaggtttctgtgtcgcataccacgcgcaatccgcgcccgggtgaagttcacggtgaacactatttctttgtcgatcatgataaattcaggtcgatgattagcgaagacgctttccttgagcacgctgaggtttttggcaactattacggtacctctcgtgaagctattgagcaggttctggcgaccggcgtcgatgttttcctcgatatcgactggcagggcgcccagcaaattcgtaataaaatgcccggcgcgcgcagtatctttattctgccgccgtcaaaagacgagcttgaccgccgcctgcgcggccgcggtcaggacagcgaggaagtcatcgcaaaacgtatggcgcaggcagttgcagaaatgagccattacgcggaatatgattaccttattgtgaatgatgattttgataccgctttaggcgatctgaaaaacattatccgcgctgaacgtctgcgcatgagccgccaaaagcagcgacatggcgctttaatcaccaaactattggcagactga

SEQ ID NO: 98074 - DNA, 1017 bp, Enterobacter aerogenes
atggcgacatcgcgacgggaattactcaagataggcgggctggcaaccgcatcactacttattagtcaaaaaagcttcgcagcatgggccccctctgaacgctatcccgaccccagcatcatcgccgtcgatgacagctttcgacgctacatgctcgccagcgcgaaggtcgaacgtatcgccagcggcctgcgttgggcggaagggccggtctggtttggcgacatgcggatgctgttatggagcgacattccaaataacgccgtcatgcgttgggatgaagccagcggggaaaccagcgtcttccgctatccagccaactatagtaacggccacgcgcgcgacaggcaggggcgtttaattagctgcgagcacgatacccgtcgtattacgcgtaccgagtacgatggctccatcaccgtgctggccgacaactatcagggcaagccccttaattcgccaaacgatatcatcgtgaagtcagacggcactatctggttcaccgacccgccatttggcatcagcggcttttatgaaggccataaggcgactccggaactaccgcaaaacgtctactgtctggagccggaaagccgcaagctgagcgtggtgctgggcgatgtgaaagggccaaacggtctgtgcttctccgcggatgaaaaaatcctctacgtggtggaaagccgggcgacgccgaaccgcttaattctggcgtgggacgtagaaggtaatacgctgaaaaataaacgcgtgtatctcgactgcggcaacggtaccgccgatgggatcgcctgcgatgcagacggcaacctgtggtgcgggtggggaacgggcaatgaagagctcgacggcgtgcgggtctttaaccctcagggtaagcatatcggtaccatcaagctgccggaacgctgcgcgaacttatgctttggcggtgaacagcgcaatcggctgtttatggcctccagcacctcaatctactcgctgtacgtcaatgcccagggcgctaaactggtatag

SEQ ID NO: 98075 - DNA, 1002 bp, Enterobacter aerogenes
atgaaaaaaatctctcttttaatgatattactcgctggcaccatagcaaatattccggttgccaaagcagattatttcttttttatcagcacaaccacgcaaacctatgacttctcctcaaccagtattcccaataccgttggcgcaaccactgcatggttagggacgacagtttatccgacctcatttcaaattggccaggataaactaaactcagtaggcagttatattaaattgaatgtcggcaccacgcttttaggagatggtgtgacctggactatcagcaatcctgctatcggcattcaatataaattgtcaacttctcccgttatatccggactcgactctgcctcaagtgttgcaccttcatacaagttaacgatgacaggctatcctactggaggacaagcaataaccgtaaatggtaagcttaatcttgcgtatcgtctggtaagactaaaagagcaaatccctgcggggaaaattaccggcccgagcgtatccgcaacattttataatacttatgacggagcgacaaaaacggacgtgctttatagcggcgcggccacccagcctacctatacgccctgcaccatcgatgcgccaacggaaattaaattacccactctttattttgatgatttggtaaatggcgcacagggggcctctcaaacttacagtataaaactcaaaaactgtccgggagcaatgaccagcatttcatatatgcttgccccaatctatggtggatttggcggtagtaataatggcacgttttataccgcgaccggcgatggctacgcaaaatatgtctacttacagttacaaaatgctgatggaactggccggacaataaatgaggaaataaccttagacaactacaccggcaatggcgattacacaattcctgattttaaagtcgcttattacatcaaggatgtaactaaagctacagaggggaatgtgcaatcagcacttgtaatagatgttacttacaattaa

SEQ ID NO: 98076 - DNA, 708 bp, Enterobacter aerogenes
atgaaaggattatgtactgctctggcggtgatcactacgctgctggcatccgtttgtcaggctcaggagccgccgacgcagattatttatcggtttgatgatcatcgttatcttgagctgaaaggctgggactgcgaaggagaactttggtatacggatacccaaaagaaaattcgttcacagattttttcgcaattttatcgtttatttacccgaaaatatattcacccttctgaacgttatattgcaatcaccggctggggggcggatggctttcgtgtatcgaaagactatgggaaaacctgggccacggtgcgttttgcccctgggcctaatgaaccgaatggtaacgattatgcaccttatgatgacgtgctttctttcaccgtcgttaacgatcaagggtttctgcagactaaacacaggttgtatatgtcatcgaagccgtttgaagatccgcgaattttgcctggtgggccaggaattgagtacaccgtagatgatggtatgggccaaaaggtaagcaataagttggaaccccgttctcctgggtgggcttggggaatggtctatatgactaagcaggggttggaacatagcacgcagcaatttaagacgaactggcaaggtttacccgacagagtacccgaagtgaaaggctacaccggctgggatcgtatgcgttgtgatatggatgcagggagatag

SEQ ID NO: 98077 - DNA, 2136 bp, Enterobacter aerogenes
atggctggcgagaaaaagaagccgtattgcccgcgtattgtgtctgagaatgatgtgggagtgcataaatcgctggggctggaggcgcagacctgcagggttggcattccccgaccgatgccggggatagtgattttggtccatggcgtgaacgacgtcggcgaggcgtaccagaatcaggagaaggggattattgccggactgaagaaacggcttaatcggccggatttttacacccacgaatggaaagactaccgaatcaccgttcccggccgttcacccatcatcccgttctattgggggtataagcctgtcactcatgcggattatgtggcagatcagaaacgctatcgtaatgaagtaggaaagctgagggaccaggcccatctgccgttcgacgcctatcaggaagataatgaggctaaaaaagccagcctggggaatgacggaaaaggtgcatttaagtaccagaacgacaactttggtaatgcgctggaagcgaactttgccaaagggggcgggacctttgcgaatgcgactaccacgatcccggatatgttagggccgggggcaggaggtttaggcgtggccgctgcaggctttgcctcattacacttaaatggtggcgatttcactcatcccatttatgaaaacccgcaccgtatctatcagttttttgcggctcagcggctggccgatttgattattcagataagggcagaggataaaaccaaagatgatgtgattaacgtggtcgctcatagccaggggacgatcatcaccatgctggcaaacatgttggttaaacaggctggctacgatcccgttaactgcgtcattcttaatcattccccctattcacaggaatcccgcaacgctgaaaatattcagccaggatatcaacagaccgatgcggccaggcaaaagacattcaaaaatttctgcaacctgatgtatacgcaatggaaaggggggggaaaattaaccgagagcgaattactggccctggaggcctcctgtaccctgcgtaaaccctctgataatccactgagatccgatgaccggtattgccgaagtaatgacggtaaggtgtataactatttttgccccaatgatggcgttgtgtcgctggaaaatgttcaggggatcggctggcgtggtattccgcagaaactagccaatgagatacctaacctgtatcaacgcgtgttttatcagcatggtgtggtgggaggcgccccgaactctaagccatttgaattaccgccgcgaaaagaaggggatgcaaaatatgcctttttaacaaatacccgctacaaggcacgcgatgttgtggttaacggcgaggaattaccggaaccttttatttttaaactccagggagaggataaccatccggataatgatccaaaaaccagtgacaagccgtatacgtattatatcgatcctgatagtcctgatgcttacatatcctattcagccaaagccagtacgattaaacgcaccgattctgcaatgtatatgctcgacaattatcagcgtcttagatggaaaccggggcacgtattaacttccgacgaacttaagatggcaagtgttgacaggaagcacacggtcattcatggggaggttcgtggttcaaaagagtacccggtgctctctataacctggttgaaaacgcgtgaagagctggaaaaagagtggcagaaaaccgacccgataagctacagccagcactcttccattgtcatgagtgagtttgcgccgtcacatgcgatggcgttcgatttggcaatcggccagtgtaaatcgtttgactacaaagcaggtaaattctgggaaagtctgctgcaccgcgcggactggcgcgatccgttgaatgacctgcccgctgctacagaatattttcgctcaggaaatatttctgatgtcgctacaaaaaactacatgaataaacccgatgaagtactgccgcaaggggattacggcgtggtgaatgattatgccggtaagcgacctcaaacccgcaggccgaaggatattgatatggggagtgtcagatcgaaagactttcaggaaagaaagtttttgcagtgggaaatgccaaaacctaaaagcgacggccagctggcctga

SEQ ID NO: 98078 - DNA, 411 bp, Enterobacter aerogenes
atgtataaccgtagcggcacgcaagcctacgcacaggtcagtctggaaagcagcgcgatgagcgccagtccgcaccagttaatcgtaatgttgttcgacggggcgcttaacgccctgcttcgcgcacgcatcctgatgaatcagggggatatcgccggtaaaggccaggcgctgtcgaaggcaatcaacatcatcgacaacgggttgaatagcggcctcgaccaccagcaaggcggtgaaatcgccgataatctggcggcgctgtacgattatatgaagcgacgcctgatgcaggccaacctgcataatgacgaagcggcgatcgtcgaagtggtcaagctgctggagaatatcgccgatgcctggcggcaaattgggccaaactatcaacctgctcagggtacattgtga

SEQ ID NO: 98079 - DNA, 801 bp, Enterobacter aerogenes
atgaaaatcatacttaatcatcatattgttttcgatttcgacgctggaaccgttacctctgcagaatctcaggatgaccccatacaaatatctaacccagcgaaaaggctgctctatttattgctttctcatcccggagaggttgtaagccgggagatgttatttaaaaaggtctgggatgactttgggatggtttcaagcaataataatcttaaccaatgtattagcaagctgcgtcgaattctacgtaattttaatcaggacaatgaaataattatcactgtccccaaagtcggttttatgttgcaccgacaagccgtcgttgaagaacttaccgaaaatagttcgccggtcgctaatgagagtctcctcgccacattaccgtcgactcaaatcgcgacggtccggccgacaagacagtttccgcacaggtacttattctatgggctgtttaccgccacagtatttgcgctaataataggcgtatcaataatatggtttaatttatcatatcaacacagtgaattatatattggtcaggccggaaactgtaacgtcaagacagaggaaaacatccccaatgtgatcacgaaccctgctactaaaaacgcgctactgcgctccgtccagcgtctcaatgtagactgtcgccgtgaacaatatatcttactgatgcgtagcgagccttcgcatagcagaaattgggatatatcacgctaccatctcttagtttgcgaacagatagcagaaagcgtccctgatatttgctgggcgccacaactggtagccaccattaattaa

SEQ ID NO: 98080 - DNA, 537 bp, Enterobacter aerogenes
atgtttaagaaaaatgttttagccattctggccggttctctgctgctttccgcaaacgcgatggcggcatcagacaataccatttccttccagggcgaagtcagcgacgaaacctgttctgtcgctatcaatggtaatcaaacttctccagtcgttctgctgcctaccgtcagcagcactgaacttgccgccagcggcgataccgcaggccaggcgactttcgatattggcctgacgggttgtactggcaacaccgccgccgaaacgaaaatctccaccgtatttgtcggtaaccaggtcaccaccaatggcaacctcggcaataccggtaccgccagcaatgttgaagtgcagattctggataccgccgggacagcgattaacctgtctgaaggcttcaatggcgaaggcgacctgaccctggcggcaggcgaaaccgaagctagcgcaacttataccgcgcaatactacgctaacggcaaggcaaccgccggtaccgttgaagcgaccatgcagtacgccgtttcttaccagtaa

SEQ ID NO: 98081 - DNA, 762 bp, Enterobacter aerogenes
atggtaaaggaccttctccgctatggcattcggtatctggcaggcatagcgctttttttactaccgctgagcctctcatgggcgagcgtgacgattttaggcagccgcataatttatccatcagatgtgacctccgtcgacgtgcagctcaaaaacaatgatgcattcccttacgtcgttcaaacctggtttgataatggcgatattgatgccgacccgcaggcggtgggtaccgttccctttctggcaacgccgccggtttttcgtattcagccaaaatcaggtcagattgttcgtattgtctccagccaaaacaaagcgctgccgcaggatcgcgaatccgtcttttggttcaacgcgctacaggtgcctccagctaacgtcagcggtgataaaaaacaaaacaaaatgctggtgatgttgcgtacgcgtatcaaattgttttatcgcccggcgaaattaggcgcccccggtaatcttgccaaaaagctgcaaataaaagcggtctccggcgccaaaaaaggcagcggaattaccgtcattaatccgcacccctggtttgcctctattagcaatctgactacaagcgtcaacggtaaaacctatacgcttaaagccgacatggttgacccgctcagcgaacaaacattttggttgccggacaatatcaccatcaaacggacaaacggcacggtaaaagtcactctggttaacgatcagggcgcaaggattagcgagcaatatcatgttacgtacccctga

SEQ ID NO: 98082 - DNA, 2553 bp, Enterobacter aerogenes
atgttacgtacccctgagttccccccgcaaaaactggcggtactgattggattattctgtgttaatccagttttagccgaagagttctacttcgatcctaatttattccagggatcgtcctacgggcaaaacatagaaaaattcaatcagccgcacaccgccccaggcctctatatggtggacgttttcgtcaacaataccctggtaaaatctggcgttcagattcaatttacctcgccagaggaaaaagctaatgctgaaccctgtctccctttggcggtaatgaaagccgcccaggtaaaatcgttgccaacaactgacgacagctcatgtcgactgctgaaacaatggagcccgcaggccgagtgggcgtttgaagcgtccactttgcgcctggcgctcaccatccctatgacagaactgaaccgcgtgccacgcggttatatcccgccctcggaatgggatagcggcgcgctggcgctttttctccgccataacaccagctatacggtgacggagaatacggataacgactcccgctatcaatatctgtggagcggtattaacgccggtaccaacctcggattatggcaagttcgccaccagggcaatatgcgttatgccgatagcgacgatagcggcagcgaatatcactacgatagcgttcgcacttgggtacagcgccctatccagcagatcaatagcatcatcagtatcggggataactataccgactccagcctgttcggcagtctctcattcaatggcgtgaagcttgccaccgatgaacgaatgtggccgcagggcaagcggggctacgcgcctgaggtgcgcggcgtggcggcaagcagcgcccgtgtggtagtgaaacagttggataaagtgatctacgaaaccaacgttccgcctgggtcgttcgttattgatgatttatacaatacgcgcaaccagggggatttacaggttgaagtgattgaagccagtggcaaaacgtccacatttacggttccctattccgcggtgcctgattccgtccgccctggtaattggcattactcattcgctctggggcgcgtgcgtcagtactacagcgtcaataacgacttttttgaagggacgcttcagcacgggataaacaataacgtcactatcaatcttggctcacgagtcgctgaagactatcaggcctggctggcaggcggcgtctgggcaacctgggtcggcgccttcggcctgaattccacctggtcaaatgcgctcgttgaaaatgatacccgccatcaaggctggcgcgcggagttgagctacagcaaaactttctcgaccggcaccaacctggtgttggcggcgtaccgctattccaccagcggctttcgcgaccttcaggatgtgctaggggttcgtcgccagcaggaaaccggcgaggattactactccgatactctacagcagcgtaatcgcctgtcggccaccatcagccagccgctggctggcttcggtatactcaatatgagcgccagtaccgctgattattacaataatcagtcgcggatcacagagctgcaactgggctacagcaatcagtggaaacagatcagctacggcatcaacctggcccgccagcgcaccacctgggactacgatcgcaactatcatggtattaacgccgaaccagacagtagttcgcaggagaaatacaccgaaacgaccgtgtcgtttaacgtttccattccattagattggggggaaaaccgaacttcggtcgcgatgaactataaccagacgcacgaaagccgctcttcaacggtttccatgaccggcaccagcggtgataacagtaacttgtcatggtcggtttatggcggctatgaacgctaccgcaatggcgatagcggctcatcgtcaaccttcggcggcaacgcccagcaaaatacccggataggcgcgctacgcgccagctacgatcagggagataactatcgccagagcgcgctgggcgcatcgggaacgattgttgttcaccccggagggataaccgtaggcccttacgccagcgataccttcgccctgattcacgcggaaggcgctgagggagcggtggtacaaaacggccagggcgcagtcattgatagctttggttatgccatcttgccgtcgctttccccgtatcgcgccaacaacgtcgctctggatacgcaaaaaatgaacagcaacgctgaattaaccggcggtagccaacgcgtcgtcccctacgctggcgccatcgcacgcgttaattttgccaccctttccgggaaagctgtgctgatcaacgttaaaacccgcgatgggcgtctgccgccgatgggcgccgatgtgattaatggcgaaggcgcggtcattgggatggtcggccagggcggacagatttacgcccgtatcgccatggcttcgggcacgctgttggtgcgttggggagataacaatgcccacacctgtcgcgtgagctaccaaatcgatttaaaaactactgacgatcttctgtatctggacaagatctgtgaaaaggattaa

SEQ ID NO: 98083 - DNA, 1320 bp, Enterobacter aerogenes
atgcgtttggctattcatttatttttgctcattgctggtatcactacggcagggacagcctcggcttcatgcatcagggtgaccagctcgtcgtcattgtccgcagccgcgaaagcagcaggttataccgcggcaagctggtctggcggctgcgatacctgctccggcaacctcggtttaccggcggtgataagcatcaatagcggcactaactttcagccggcagggacgctactcgccagctcggtaggcaattttctaacggcctcaacgaataaaacctattcaagcaatcaaattctctaccgctgcgcccttgctgatgcaggcagcctctatgagatgtattccacaaacggcgacagcacctatgcagggaaatacatggtgtcagacgttgacaacgcctactacgacccggccaaaaacgtagcggtgagaataaccaacctcagtaccggcgaatactacagccgttactggaaagagcggcagctcaaggcagatagctggtatcaggacgatcaatatatttatatccccgccagcgcattcagtaacgtactgtatgaaatgctgaaaactaatgatacggcctactacgtttattccagcgtaaccaataaagacacctatagccaaccgcgcggctatatcgcgtttaaagggcctggcctcaacacaaattcgctggtcgcaggtatggatcatgcctcctactattatggttggtatgaaaactggcccggtgcctggagcacctatagcaatgtgacctatatacgcggagcaatgtgccaaataaaagactatccatccgtggtttcgctaccgccggttgcggttggcgtactcacggcgggtggtagcagccagaggtccttcagcgtcagtctggagtgtgaatccggcgccaaatccagcactgccaccaatgccgccaatgtcgcgatgggatttttagtcaaccaaccaaccgctgtcgccgcggcgcaatcgttagggctggtcacctccggcggaggattaacgtggttgcttgatacaaactatgggaacaacggcgtcgcttcaggggtcgggatccggatttataatcagtcaggaaatgcgatcaatctgttgccggacaggcttagcaccgggacaggaaatacccgcggctggtacgcttatcaggatttaacatcgttagtttcctccggcagtaccaatatttacagcggcgattttaccgcctcactggaggcgattagcggtcaaaccattactgcagggacggtaaatgcgcagcttcaggcagtggtcagctttcagtaa

SEQ ID NO: 98084 - DNA, 735 bp, Enterobacter aerogenes
atgcgcagcttcaggcagtggtcagctttcagtaaagcgctggtactggcattgctggcagcggcgggaacgacccgccctgcgctggcgatagtcaacgttgaaaaaacccgcgtcattttcgccgccggcgaaatgtcgcaagcaatcacgttatctaatgacggcgagacgcctatgcttctacaaacctggagcgacaatggcgatatcggctctacgccggatagccgtgacacgcctgttgtcgtactgcctccggtgttcaaaatgcaacccggcgaactgcgttcgctgcgcttaatgcttacttcacggcaaaatttagccgcggaccgcgaaagcctgttctggctcaatctctatcaaatcccccccaacacaaaaaccgctgacgccggatcgcgtcaggttatcctgccgctacggttacgcttaaaggtctttgttcgcccggcaaatctgaaagcgccaacggcggaagcggaacaacagctgaaatttagcgtggaaggaaaaaccatcactatagacaatcccacgccgtggtttatgagcttgagcatctggccggggagtcaaaaatccattgataacctgcttatcccgccaaaatcaggccaaaagatagcgtctaaccaactgctacagcgcggcgacaccatacattattcggtaatcggcgacgatggaaacgccaggaattacccagcaacaccgcaattcaggcattaa

SEQ ID NO: 98085 - DNA, 585 bp, Enterobacter aerogenes
atgaaaaaggtcatgatgttagttgttgtttctgccgtattagccggatgttcagcaaaacctttagcaacaggtgctgaatctgttcgcctcactaatcgtgatcctaaagggtgtgaattcttagggactgtgcagggatatcagggcggtttctggtctggttctttcactgtaaatgagaagttagaagagggggctttgaatagtgccagaaacgccgtatacgcattaggaggggataccctgtcattagtcactaaccgttctagtgcatctggtagcctcattggtgagcgtaaaacagatgtttcattgattggttcagctttcaagtgtggagaggttaaacagcacgctcaatcagcaaagcatcctgttttggtttgggatggtatgaaaatacaaaacacggcgaatggtttagtcattgatggtaaaccagcagcattagatgaagataattctgatgcatcgacttattcacaaggcttgtatacgtttgtgctatacaagagatcagggaaagtagctgttatgcgtgatggaagattagaggggtatgctagcaaaggtgcattctga

SEQ ID NO: 98086 - DNA, 1908 bp, Enterobacter aerogenes
atgctcagaaggttccggttagagcggaagtctgattatgagaagctggtgattgctcaacgtctggcagatatgcttgaaaatttcttgatcggcaggcttacacctcttgcaatcggtgccgaacagggaagcattgaggagtgggacgatgtggtgattatgtactcaacagaccactacgagcatttacagattaaacgtcagtcaactgacttttgtactaaaaatcctgatcagactaaacagcccaaaaggaaacccagaaacggctctgtagacaccgaaccaaccccctctgttctagacactgcattctcgagcctagcccgcaacgctgcatcgggtaaacttgacgaaacaccagaccgcaagttcaaactaatcctcgtcggtctacacctttttataaaaaacagtctctccgttaatcacctcgaagaactttgtgaactttgccgtcgcccagggctgagtcttgatgatcttgccagcagacaggatattccaactcagaatgcgtacttatggctaacgacctggtgtggatttaaagactgggaccagataagagatgtgcttcgccgagttgagatcgtttgtgtaggtaacgatgcaacactaaaagaacgaacgcttcattcgcttgggcgtaactttagcaatccggaacgcacactgcagcgtctgattaactacattgctaccgagacaactgacgtttcggcgataagatgccatgacgttgtcaatgcactgcgaagcgaacttcggcctgataccgtaacttgggctcagtatcagttaagtgacggttcttcagcggccagcggcccttggtcattagctggtacgctcgatcttgccaatactacagtcagtccagcaaaggccattgtcgaacacatgtgggggattaattctgccccccgaacactcagagtgtatgctgcatattcccaacctcccgtagctaatctctctctttcctcagcgattgtgcgtatggctttgcatctgccaaatggcattcaggtcctgatgttaggtgaatccatatggcgaagcagcattgcccaggaaatcggtcacacacttggtggggccgaggatgatttcagcggcttgccatggattgagaatacagaatgtctaacatgcgcgcaggatcatgaattcaatacgttgcgcactgtcagggaagaagctgaagcactcgccagagctatggacgatgtgctatggcagcgtctgcttcagcatgtggcggacaaactcggcactatctccgatccagcactcgccgatgctatggacgcagtctggaattcatggttagttggattcacggctgtacctgaaagccgccgcagatttctggacaggcttttgtatccgaaaacggagaataaaaatgaaaaacatgcgcttcgcttgggaccccgaaccttaagcctgctcgttgatgcagtggaaattttgttgttggtatctgtgggtttttcaactcgcaacaaccactgggaattctttgaggatggagggacagtaatgagtatcgctcttcaatactggtctggcccagctagcggtcgaactggggtccgtgagttgtctgatgatccgttaatcgacgtgatcggtcctgaccctgatcctatcatcatcctgtctggcgtgcgggcaccatcatcaatgttattaaatgcaggaatggctgacgacgctgagacagcgactagcatggcggctgagcgtcagccacatctgctcgtgacccgatctgaaatgtatcgccatttgagtagggggacgcttgagtccgtacgcaaatacttcggccagcaaaggatagaaaggcaacgcgcgcgtgaagcggcaattgataagacgacaaagggagcctga

SEQ ID NO: 98087 - DNA, 600 bp, Enterobacter aerogenes
atgccgacaattcaagaactcattaccgcgataactcagcgcgctgaaggtcgctatgaagttcatgtaccagatatgaacgacatggtttcaccctccattgatttcggcacggctgcagtacggctcaaacgtctcaaactagtcaaagccggttggcggactgtgttgattacagagtgtccatatggtgtggaatatatccagagcgccttccgatgggctgcggatgtccgagacatgctcgcagagccgcaaacggtagatctttatatgtttatgctcatcaaaggtattgaatctgaagatgcatcccgcttcgaaacagacgatcgtttctgcaggaagatagtgctcagagagggggaagatatcgactccttccttgaccggagctttctggcgtcgttaacacccgtgagtgtggggaatgaaatcaacgatccgctgctggcatccctgagctcgttgtgtcaggtgcactcttgggttaaacctcatattgaacaatggcgtgagctgctgctctctgaaaaaacaggcgatgaagtagttcaatccctgaaaactgtgacgtttggagacaagggccgccaatga

SEQ ID NO: 98088 - DNA, 2985 bp, Enterobacter aerogenes
atgaaacagctcaaatctattaccctctccaatatccgccgttatggtgccaacaccaaaatcgaactcagcccgggagcaacaattcttcttgccccaaatggcacagggaaaaccgcgttcttcgaagcgattgaatttagcctaacaggtggtatctcgagactgggggcaaatctttcacccatcatcagggacaatcagtccttggctaaagttattctggatttcggtgatgtaagcgcctctgcccaggtaactccccaaggaaatgtagaaagggcgggtgatctcagccccattttcccggaaacgaacgcggaagatatcccttttttactgagactgacccatttattggatcagcgcgagggagaatggcttgtcaaagcagaggccaaaattgcgggctcgcagctggaacgtttaccaatcggtaaggacggatcccaggtcagcacggctctgggcagtattcgccgagtcctgaatgataagcttaagcatgcaaaggaggcagttgagcttctcgaaacagaatatgcggaatggcaaagcctagtgcttgaacgggatatggccgcaacccaatctcagggcggtctgcgcagtaaagaaagcatcgcagaatccatctcgaacatcgcgaagcaaactcagggctcagaggcattacctgcaggactattggtgccgccagtgggagtggatagcctggaaaccatgcgcgatgcgttagagcaaacagtacaagtcagtctgaaaagactcagggagcaaattgaagggcttgtggaggtggatggactgattggccgtttcattgctgagcagacgcgatcagaacagcttggtcatgaacttatagcggccagacaggctttaacgcaaaaacagcaggaacgagcacttatcgtcgggacacaagagcgacttcagcgtgagttgctgcaggcagaaggcgagcgggatttaatcatccagcagcttaaccggcttgaccgggaggcgcaaaccaaagaggcccttaaacaacgcaagcaggccttggaagtggctgataaagcgttaagcgatgccgaatctctagcctcaaccttccggaatatacatgaagggagtgaacggctcagtgccgagcatgaactcatcaataaacagcgtaaggcactgcagatcattgatactgagcttttggccgctcgacagctcatcaggcgctgggaggataaccttcagcaccttatctccattacctcagccattacacaggaagaatcacaagaaaaattactgcaggagcgagttgggcaagcaactgtattaaagaccaacgctgaagcagagctactgacgttgaagcaggctcacgaaacgttaacgtcaacggctgataccataaggcaatctgttgcatccattgcggcatatttgcctaaagatcgaggggactgtcctgtctgtggcgtagatcacggtgctgcaagtctccatgaaagaattaccaaatcattggaggctatcgatccgaaagttgtcgaggctgaacgacgcgttaagattgcattggatcagttacgccagtacgcggaggcagttactaatgccaaagctgaactagatacgtgccagcgtaacatgactgagttgagctcccgacaatctcttttaacatccgaaatcaaccaaatcaaaacggacatacttttagaaggtgatacgattgaattagcaaaagcagctattcagcgtcgtgacgagtcaaatgcttcagccaagcttcagctcgacgaaaaacagcataaccttgcatctcctcctacacctgaaatgcttgaagcgtcaaaagcaactcaccaatcggcgatccattctgtggatacggctcgggaggctcgagcgggggccctggcaagccttgagcaatcaacagccgcattagcagcaatcattgcagatgcgcgtcccttgaggacactggatgaattgtcggcggcgcaaagcaaaaatatagcccagctcagtgaactcgaaacgaaagctgcggcagagcaatctgctttaaaccgacaacaaattcagttaaccgaaactaatgaccgactgactggcgtcgaagaacagtttactgacgcccaggctaagctggcagcgatccgcttctcatggcgacagctgtctttctccggcgatcccgcggtcgacgtggcgaagagtaaagagactcaattacaatcatctgttgccgagctatcacgccaaacagaacagttacaaacgctcaaagtcgaaattggagcctggtttaagctggagcagaaacgtatagcgcaaggcatcatagatcgtcgtcgtggctccttatcagaggaagagtttgttgccagcctgcggcagcgcattgaaaacgaaaattcgagccgaatgcagttgttgcaattatctcaagcaatggagacgctcaataccaaactgtctgccgaaatatcgaatgtgcaaaaacatgtactgtcggtcattccaaggtggcagtcgctcctgaagcgcgtcgtcagagagcagcgttttacgggtaccaaactaggttttcgcagtatttacaaaaaggggcatgctgaagtgtccgtgcctttacatggaggagttgctccggtcccggcgattgcaagcgaagctcagttgacagatctgcagttgacatttctgctttcaatggcgcttgaacatcagtggtcctcatggcgcggcctgctgctggacgatcctacgcagcatcatgatctagtccacgccgcgtccgtattcgacttgctgcgtgattacatcgttgaccatggttttcaggttgtcatcgcaacgcatgatgcccttcaggcgcgttatttcatgcgcaaactgcaaaatgatggcattgatgcacgtttgtggtcactcgttccaacacctgaaggggtgacggcatctgagatgcggataacaaggtaa

SEQ ID NO: 98089 - DNA, 918 bp, Enterobacter aerogenes
atggaatctgctcgagacaaacgcaccggagaaaaagtggatgctgaagagctctggttgttggatatcgttgataccagtggttatatctgctggggatgcggaatcgaaatgtatccttccgcctggcaaaaaggcagtaagaaaagaccgtcgtttaataaaatgccaggaaaagaacacattaactgcgatgctgatgctgagagcactgttgttaagcagggcaagaagaaaagtgtccgccatctcttggacagtgcaccgggcttgatgccagcagggttaaagttggttgaaaaacgtccagttgttgatcctgacgcaacgggtagtgaaaacaattcgagcacaacacgttctgcatcatcaacatccaggaaagacaatgcaccaacacggcaatcgcgtcgtccggttaatgctattcgtcagatttgtagagcgtttattcacttcccgtatgatcgaggtatgtcacttcatataccggatattgatgccgatacttacatgactgtctttaaaaaacttaaagatccgattcagccctatccggaactgcgagttttctactcacagttgttgtggcagaaatttgagcaagatgagaatcggattgtcattccgctttcgggagaatgggttaaagatgaatctggaaagctcaagccttctcgaagttacaaactccatgtggaatggagcggctggtcccaagctaaacgcacagcacttagaaacgagttggagaccgccctggaagaagcgaaggatgcggggaagaaaaagctaaaagacagggctcagattttcttcatcggtaagcaaagtactgaggaccatgaggtcttctacgtagccgattacaggctgatttgtgcgatcattgggcatatcacttatccgagaatttaa

SEQ ID NO: 98090 - DNA, 1362 bp, Enterobacter aerogenes
atgactcagagtaaaataaacacctgggatgagagacgaggctccaataatcctcgagaggaagagatccgatctgaagctcagcgcgacctttcccggttgattcactcttctcctttccgacgtttgcaatccaaaacgcaagttcttggtctgggagaaagtgacttctaccgcacacgactgacccactcaatggaagtcgcgcaaatcggttcaggtcttcttgctaagcttaaaatcaaatataaaggtaaagaggaagagcagtatttaccagataaggatctgatgcaggcaatatgcctcgcgcatgatattggccatcccccatttggtcacggcggtgaggtagctcttaactactgcatgctgaatcatggtggctttgaaggaaatggtcagacgctgcgcattctctcgaaactagataagtacactcaggaacacggcttagatcctacccgcagacttctgctgggcgtgctgaaatatccggttaattactcagctctcatgggtaaaaaagccagtagtcagccccctgccaaagagccgaactggctctttaagtcatcggattttaaacctccaaaatgctacttagattcagagagagacatcgtagaatttgctctctcaccatttactaaagaggatcgggagctgtttacttcctttaaacttggtaaaacagaatccgatcataaaatagcttcttataaagcgctcgatacaaccatcatggatcttgccgatgagatttcctattcactgcacgacttggaagacgctatttctctcggaatggtgacacgagcgatgtggatggagcattttagtggacatgaaaaattatttactgattgccacggcattacattctccggaacatgcgaatctgtctcggacagcctatttggtgaaagttacaggcgaaaagagtgcatcggcatgctggttcacctgatgatcacaagcgttgagctcaatgtaaaagatggagcattcgaatgtggcatgctcaaatataatgcggtccttccggaagcagtcgaagcactacggttgaaaattttcatgctggtcaaggacaaagtgattaagcatgaaaatgtacagttacttgaatttaaaggacaaaaattgattgtcgagctgttcagtgtgcttgctagcgatccgtgtcggtttttacctacctcaacaagagaagtttacgagcgccagagtagcttaggtcagcaggaaggaatgcgagtcatttgcgactatgtttccgggatgacggatgactatgcgaccaagctttatgagaaaatccttattccacgtaaagggtctatttttgaccacctctga

SEQ ID NO: 98091 - DNA, 360 bp, Enterobacter aerogenes
atgaaatttaaatatatgctggtatccgcactgcttacattgtcagcccaggcgctggcagagccagcgccgcccatcaaagtagagaccagtaatcaggttcatcctgccggaacacgctatgtcacggtcgtagtcacctcgctggatgacagtatcaaagttgaaaatatagatgtgaaccggggtaactgtcgtattgataaccagaagtacctatattccagcaataaggaaactattctgcccgcctccttgcgctacggggagtccgtcaaagtaaatttttataataactgcgttgcttcagaagtcgtcgtcaccactgataaggggggatggcgttacacctaccactga

SEQ ID NO: 98092 - DNA, 1164 bp, Enterobacter aerogenes
atggctatttgtaaaagaaataactgtacgctctcaattggtgaattacctgatgagcgtaaattccgcttatgttctgtacattatcagggtaagctttctaaagcagctaaaagagcgcaaaggtggaatctgacgtgtcagtacccgccctgtggtattagcctgtctggtactcgcaatcaacggtattgttgtattgggcatcgtaataaagatagaaggctcatagatgacgatgccattgtcagtctggtaaaacattcttactggatcaacgtagagtccaagctaaagaataatcccctcgggctgggaagtatcaccagccctgatgacattgctgatctcatccggttgtaccagcgcaaagcagactaccagaaagcttacaatactctaaatgggcaaagggttattgattcacaggggcaggttattaaacgcctgataccctggctggagctggagttatgtcacatatatccgaattccaaagggggggccaatacagcggataacatcattattgcccctgcgttgattaacaggatgatgaaggacactattcccgtgagcaaaacccgaggaacgttcagcggcataaaagcggcaggttctcccctgcctgtaaaatcgacgttattaaaggcgctcactatgcaatatggtcaggataaaatacaggaagcgctagcctctgtaaaacatgtgacctttgcagatctgagtgtaccacgcaggctgtttggtacggacatttatgcttacccaccattactgaaacttttaaacgatcaggcaatgcgcttgggtctctggcgtttgagggagtccattaattctattgaaagcagtcactggctgtctgcaggtcctgcaaatgagttatttgctgctgctgcttttcatgccatgttaaatggggataaggatgacttaattgaggtattttcaagtctgcacgaagacataattgaacgagccaggaacaaagaaaaattaaaccataattattatcaaaacattctggaacggtatgtatcccgctatttccaaatagacttacacaatcaggagtcgtgtattttattttacaattcatttttcacagtgccgcctttggacaaacatggggttttaatcataccacatcacttctaa

SEQ ID NO: 98093 - DNA, 234 bp, Enterobacter aerogenes
atgaacactcaacacattaaaatcctgcgtatgtctagtgttgtcaacaagataggcgtagcccgttctaccatctacgactggattaaccccaagtcaccacgatacgacgccacattccctaaacaacgtcgcctaggcatgcaatctgtcggctggcttgagtctgaactggatgattggttgctgaaacgtcatctggcatcatcaactactattgccgaacgaccataa

SEQ ID NO: 98094 - DNA, 723 bp, Enterobacter aerogenes
atgacagacgatagtgttctggatggcatttttgattcactaaagagcgaagctgagcgttttatatcgtgctacagcggtagtgatgatgatgatgtcagtagttacaatgaactccgtgaccggtgcgagagaaaagcaaaagaaaaaattaataaattcaaggaggaaggctgccacatcatggatgatgattttgaatgcatgctttacgatgctaatttttctgcacaatggaatggaaagtttggaacgtatcttgccattgcattcttcttttaccactgggggcagtattgttattcctctgggcaccggcgtgaaggattgctatttatggcaagagcagctggttgtggtggagtctggcagggggctgggctatacgctgaccgtgtagagactgctgaattggcgttaaagaaaaagcaagatcatggaaagaagggaggagaggctacaggctcggctttagcacccgcacgggatgagttgaagcggttgcttaaaataaactgcccggcagaaggatggaaaactaaaactgcagcaatcggtgccgttgtagatcaacttgaggtttttgttaaaaaacaaaaaataaatttgaaaaccgataatcttgataatgccatattaacatggtgtaagagatatgatgatttacgagacgtattggagagttctttaaaaaagaacatgaaaaataaccgcgtggattga

SEQ ID NO: 98095 - DNA, 873 bp, Enterobacter aerogenes
atgaatgttaaagattgtcttcgaaaggttgtcgtttatcttactgaaaaattatctacccattatagcaaaatactatacaagtcatattacgaccatacgtttaagaaaagaggtttccctgctttattagtaatggttgctgatgtgcgatttttaattatattgttggtagtgattccatctctatggataccatatcaaaaattgcaatctagtttaggttcactttatttatcgttatgtgcagcgtcgatattttatttggtttttaatttatacccagatatcttgtcaaaatttcaacctgcgcagcattgctatgataaaatattaatgatcggcgttagaaggaaaagtatccttaaaatacttcatgatgaacattctcatgactggtttggtgaggctaacagatatctatcaaaagataggtaccttaaaaatttatcaagtttaagacgtatcgtagttgagaaaggcaacggattgtcattctcaacggatgagaaaggtaatttttttgattattgcttgagtgttgctgaagaaaatattaaagatattaagtttataaaatccattccaaatattaataaattggatttgtatgattccttggtttatttggagggggaaatgaatagatatgtaaaggctgctacggacaaagatgaactattcattgatagttacattgtggcctatttaatacatgccgttgataaattgaactattattcacagaaagaacttcctcgttatgtaggagatagatttagattgaaatttactcccacagaagaagaagaggatttggctaaagaactaacgactagatttcatgatatgatgactaataaattgacatag

SEQ ID NO: 98096 - DNA, 1350 bp, Enterobacter aerogenes
atgtcaataatccttccatggcgccttggtatatatgcggcaagcccggcagtaaaactaccgagtggtttttgtatttacgcagaaggaagtcgaaggatttatgtttcttccgtagatgctgatttcaataacgcaggggttgttatcaggaaagcacagggggcctcaggcatatttaaaattaccagccgccataccttcaaagatattatttttgatggcagggataaaacggtcgggatgataaatgctgactctcaacctgcaaaccttacttttattaactgtgcatcctaccgctggttgcggggatttggcagaacatcgggatatattggaacgctccgtgcggtgaactgtaccgccaacaataactatgatggtttctttaacacgatcgattcctggtatgcaaactgtggggccaatgcgaataccaactatggctggaacttccagactggtgcaaacaataacagcctggtgaattgccgtcctgaatggaatttgaaagaaggagttatggtctatggcgctaaagtcattgccattaccggagatacgattgaccgaaacggcctggcgggaatatcaattaaaaatggcggtattgttcttcttaatggcgtcagattccagaggaatggcgcgcaagcagcgagtgggtcatcagacaattgccacattctcatggaaggcgaagggtcaacgctgattgcgtccggactcagctctgttccaggtgttgatgacgatgggcagggtaatttatctccacaatacggactcgttaccactggcggaagtgcaaacatgaaaatcattatcggtgatagtgatatgagtggagctactgtttcggtaacaagaagcatcgtgactgcatccgttcgtaaatacagaaataatattggtctgtccgatgtcagcaccgaagggcttacacagatacgtgatggggtgccatgtattggcgacccggttattaaggcaaatctgccggcgcgtggaacgcttaacttcacactgaagctgctcaatgttggcatggggacgtacagtgagccgttgaccagaaccattgaattccagtcgagaaatgaaagtcaaaacgcaggagagtcttatttcctgaaagtaaggatttcacggctcactacaactgatgctgttatttctccccttggtgcagatgtaggcagcgccagtaactgggggatgattgatgcatcaccttccgcagttggcattgcaatttcagtatcagcagacggtacaactatcaacggaacgctaaccggtatagataacggcgtgcgatatgtaagcatttttctgaggccataa

SEQ ID NO: 98097 - DNA, 171 bp, Enterobacter aerogenes
atggatgaacaaattgaaatttccgagtttgacgcctggtatcagcaactcatttctgtacttgccagtgatgggcggcgggcaccgaacaagcaggcatggatgggactgtatgagcagggtttgacacctgaagaggcggcaccacttgggccttatgtagaattctga

SEQ ID NO: 98098 - DNA, 204 bp, Enterobacter aerogenes
atggctactaaaaaatttattgaactggaggtcggggacgtcatcgtccccgttccgggaatggagatcactgtaactgaagcaccagtgctaaccaaaacagatgatggtgaaaattacacactgaaagggatacgggatggtaatgaagttgggctggcagggttctataattcgctgatacagttgaccccccgccagtaa

SEQ ID NO: 98099 - DNA, 2235 bp, Enterobacter aerogenes
atgaccacatataaaaccggaaatcctctgggttcgtccgcggcaaaggatttatttgataatgctgaaaacctggactttgcggtaaacagcttaactcaggctatctggatcgaccgcctggggaaaccgcgaaagtcgtggtttggaatggagtcagcgtttcttgcccagctcgccagccaggaggcgcgctttgatgctttcattgagcgatctggctaccaggttatcggtgattatgtcgatggtcccctgactatcaccgattacaaccagctcattcgctataacaatgagctgtggaagctgacggccgctaccgatttaccgtacaccactgcgggaacaactgatgaaacatggaatgcgagtgactctttgcatttcgtttctgtcggggatgccgctcttcgccaaaacctgggttcagacgaagaagggttgggtgctgatttagtcaacacggttcttgatatttctgtcggtaagtacatccaaaatgcctcgccgaggatctcagattacaaagtcacaaaaggcgctgatgcgactctggcttttgcgaaagcatttgctaaagccgcagaaactactggcgttgtaattgtcgatgttagctgcttactgacatcaacagttgtgccggaaaatataactgtacgaattagtgactatgtcactgtaactcatcctgacaacgcgccagggcatatgtttattttgtctgatggcgctgtcattaaagggaataataaaaaagggcgcttgcgggggaactccgcgaatcagtcatcgatacgccgctgtatcagcgctgtaggcgtgacggatgccggtgttgatggcatcgatattcgcgatttcaacagctacggtgcgtattttgagaactgcgaagataccttctgcagaaggtcaaccatacgtgatattaccggcggcccggtcgaaacagccgcaggtcagtacattaccaactgcattggtcacgagtccgagtataacgatatccgggatactgacagcaatggcatcaaattccgggctgatgccagcgggctgacgcgcggctgtagttcgtttcacgacaaagtataccgggctggatttattggcattgcgcacagcaagatacaggaccacacgacaagttatgcatactgtgaaaactgtgttgataacggtctggatatgaatggctgccagaactgcactttcagtaatagcacgtcagttgggtgtcaggatggcttctatatgggagagaatggaatcaataactgccatgtcgtcgattgcgcagccagaaactgcagacgctcaggagttggcagccttggctcccttgtcatgtgttcggtaattaacccatccattgatggatgcggtagcggaatatattgttctggatttaatgggttcaaaatacgcggcggtgagattattaactgcgtcaaaaacacatatgtcgataatgaggataaaaataaccccaacaaaatgagtacgggaataggaattgatattcagtctgacctttccagccttcctgcatgtaccactcctgatattgacggggtgacgttcctgaataacgcagggcatgacatcgctttcggtggcggccggctccagtcgatcgccgttactgccggggggagtggctacacctctgcgccaacggtcacgatttcaggtggtggcggaaccggggctttagcgacagctactgtttcgggtggcgtagtgacaaagatatccgttttgtatcgaggctttggctatacatcagcaccaacggtaaccatttcaggtggtggcggcagtggtgcgacggcaaccgggactgtgagcagcggcggcgtaataggtcagctccagcttgggcgatgcacattcaaggacagcggtggagacggcaaaatatactacggtactgcaactctcgcagacagccagataggtaacagcatggggtatatcgtctccagaacgcagacgtacaatctggctggcgatggtactacagttgagtttacgctttcactgccagaggaggttgctgacgtaaattaccgcattgtctcggtggctccggactggctaacgaccgttagatatctggataacacaaaaggcacttcatatttcggcgtcacatttggcagcgctccgccatccggaacacgtcgcctgaatgtaacttttgaacgactgcgcccggcccactga

SEQ ID NO: 98100 - DNA, 3048 bp, Enterobacter aerogenes
gtgattagaatctacccctccaggcttcccggagagccgcttgagacgcatgaacacagggcgatgtcactgcatgcgtggatggttgaaaatattgagaactacagtgaacgtgacaaacaccctgtagcggttgaggtggacggagccagcatccctcctgagcaatggccattatgctacatcagacctgaaagcgatgtgcgattctatcccgttccttatggaactggacttgagatagcagcatgggcggcggtagccgttgcagtggcttctgctgcctatactcttttcatgatgtccagtctcgataccgggggatactcttcctcgacagggaaaggtctcgatctcaatccggcaagagcgaacacggcaaaactgggagatccaatccgtgaggtttttggccggcgccgcatttacccggattatgtagtccagccggttacccggtttgaccctgtcgatccgacgatcatgcgggttcatatgctggtttgcctggggatggggcgcttctcattctccaatggtgatttgcgtgtgggtgacacgccagcatcaacgcttgatggattcgactatatccattatccaccaggtagcgatgtatccggagatgaacgtagtgagaactggtttaactcgacagaagtaggtggaacatcttcaggttccggactggatatggcgcaaacctcacccgattctgatgatgtcctggctgatagcatgaccgtatcgggtgcgacggtaacgtttaccggacttgagtcaggagatgatgattcagctgataactcgctgccggaaagttgggttgcaggtactatcgttgaattaaaagcgccgactaacttcctgatttcagcttcttccggatacagtgttttctcaagtaatttgcttcctgaaatcgttccggtcgtcggcatgccagtaacgatgagtttcaacagtgtcgattatgatctgtttatcgcttcttatacccctggacagagcgctgttcccggcgaaggaggcagcgccgcaaaggttcaggcaagtgctgcgccaactacttatgatttttccctggggagtacaactttcacgctgacatggcagggggtgacatatccgatttcactggttgccaactatgtcaatatgtctggccttcttgccgttattactgaggggctgacggggtccgggctggtggccagagataacggtggaacgatactgatcacggaagagtcgagcccatatcaggggggtgaaattacctcctcctctttgccttcttcagtattcggaactgctccgacatttacgcccggtacagcttcaacaggtggtagtcctgcagtcacagcaaatgtcacgcttgcttatgatagtgcgacaggcactgcctttgccgggatgcctgaaggtactcagcgactggcccttgctcatcggggaaatgagtatcagatcatatcgacagatggctcaacggcgaccgtgggccgtctcgtgaatggtgtgatcgacgcctcatggcccggattcctgccaagaacgatgattgactatgaagcaaccggcattaatgacagtgagtcatggatggggcctttcctttgctgtcctgagaacgaagtggttgacgcatttgaggttaacttttcgtttccatcaggcatctgcggattcaacagtaagggtaaaaagaaaacccgtcacgtcgagtgggagattcagtatcgcgcttatggctcaggtgccgggtgggaaagcaaaacaggcgtttatgccatgaaaaacataaacggcctcggatttactgaacggattaacttacccggtcctggccttgtagaagttcgttgccgtcggcgtaacgagcaggggagtaataatgcgcgcgacaacatgtactggcaggcattgcgtggtcgtctgttaacccgcccatcctcttatgctggtgtgaccctgatgggggtaacggtcgaaactggcgggaagttggcggcacagtctgatcgccgggtgaacgtcgtggctacacgtgtttatgattcaggaacaccgcgaacgatttccggtgctctgctgcacgtagggaattcgcttgggcttcaaatggacacggagtcaatcaacgaactggaatctgtgttctggacaccaggcaacgagtatttcgattttgccaccggagacagcatctccgctcttgaaatgctgcagaaaattgcgaatgccgggaaatcctatttcctgctcagtgatgggctggcgtccgtcggacgggaaggcgtcaagccctggacggggatcattactccgcatgagatggcagaggatctacagaccgggttcaccacaccatcagatgacgattacgatggggtggatgtgacctatatcaatggaactacctgggccgaggaaactgtccagtgtcgcacggctgataacctgacgcctgtaaaaatcgaggactataaactagatggcgttctgaatagggatcatgcatatcaaatcggtatgcggaggctgatgaaataccgccatcaacggttgacgttccagacaacgaccgaactggatgcgctctgttataacgtcggggaccgcattatttttacggatgatatacccggcagcaaaacgatatcctgtctggtagaaacgctgtctaccacggacggaaagaccacttttacgacatccgaaccgctggactggtcttttgctaacccgcgagtcctgctccggtatcaggatggttcggcgtcgtcgctgatggttgcgaccagagtgggagattatcaactgtcagttccttaccttcctgaatttgacggtattgatttatcgacgccgtcagttgagccggtacggctgattttttgtgaatcttcacaggctggatacgatgccattatttctgaaatcgcacctcagtcagacggaacatgccaggttacagcacaagagtaccgtgcatcgttctacgactttgacaatgccacttaccccggcgatgtagcataa

SEQ ID NO: 98101 - DNA, 384 bp, Enterobacter aerogenes
atgtcattcaatcctgaaaaataccgttcagtcacctggctgaagggcggcagggtatacccgcaactcgactgctttggcattgtgaacgagattcgccgtgatttggcgatgcctgaatggcctgattttgccggagtgaccaaagacggtggtggtctcgatcgggaggccagaaaactgatgctttccctgcagcgatgtgagccctgcgagggcgctggtgtggcctgctactccggttcgtccgtaacacatgtggggatcgtagtcagtattggcggtcagttacacgtcgccgaatgcaacccgggaacgaatgtcacgtttctttcgttgccgcgatttaagcggcgctttgtcaaagtggagttctggcagtga

SEQ ID NO: 98102 - DNA, 483 bp, Enterobacter aerogenes
atgaccattcttaatcgactctacgcaagcagcgggcctgaagtcattattgagacactgcagatcaacgttggcgatgaagtttactatctctgcaaagggtatgagaacattaccgccacgactgagcacggtgacaccattacctttacggcatgcgcaattgatgtagcacttcccgcgaggaatagcgacggtactcaggatttaaagtttgcaatctgtaacgttaatggtgaggtttccaccgctatcagaaaagcgctggataatctgagttctgcatctcttacgtatcgcaattacgtatcaacagacctctctgcgcccgcttcggtgccttatacgcttaccattaagcccgggtcgtggacggcaacgcaggcccagataacagcaggctacatgaacgttctcgacaccgcatggccccgtaatcgttacaccctgaattatttccccggtctgcgttacgccaactaa

SEQ ID NO: 98103 - DNA, 465 bp, Enterobacter aerogenes
atggcagatatcctctacccacacgactatctcccaatgccactgcaggaaggctatgggttccagccaatcagccctttgaaacgaactcaactcaccacaggccgggcgaggcagcgccgggcgtatacatcaacaccaacgcaggccagcgtctcatggtttatggagactgacggtcaggctcagctatttgaagcctggtatagagaaaaaataacggatggcgctgactggttttttatgaagctacagactccactgggagtggagttttataaatgccggttcattgatatctacgagggaccaacgttggtggcgccaatttactggaagttcactgcgacgctcgaactctggaaacgaccagtgctgcctgatggctgggttgattttcccgattatattatcaatagcgatatcattgatttagcagtaaacagggagtggcctgaagaatga

SEQ ID NO: 98104 - DNA, 180 bp, Enterobacter aerogenes
atgatatggttaatcactccatttatacgtgttatcattatttttatgagaagaatcatttattcagaactcccgttgaggcggtcatgcgaaggcgtgaccgctccagtatttactgtggagttctatcatgaaatcaaaaaagcgcgcggtgcgtcggcatcacaccgcaagacttaa

SEQ ID NO: 98105 - DNA, 135 bp, Enterobacter aerogenes
atgggttggcctgaagccgtagtggaagcgctgcgcatcctaaaaacaatgcctaagtggatgtcaggcatggttcttgttgtagcgatattgctttctgcgggttatctcattgagaaaataacaaggagatag

SEQ ID NO: 98106 - DNA, 423 bp, Enterobacter aerogenes
atgacaactatcgcgtacgatggtaggtatgttgcctctgatagcctgattaccaatgatggcgtagtttacgggcatgctaataaaatccatcaggttaccggcggaatattgctaactgctggcgactgtgacgactggatattggctgttgagtggttcaacaatgggcgagatccggcaaacaaacctgaactggaatgctttatttcgttatttgttccggataacggggagcctgttgagtatggcaagcgtcttatccccacatttgcacctatcccatgggctgcaggaacagggagggactttgcaaagtccgcaatgttgctaggtaaagatgcacatgaggccgtcgcttttgcgtgctccttggatatttactctggtggtgaggttcaatctatcagggtgagggactga

SEQ ID NO: 98107 - DNA, 321 bp, Enterobacter aerogenes
atggtcgtaaaggtattcagtagtgaacttcaaccggatagtgagtctgcatatcgtcagtggcttagcgataatcctgatggatatgtcatcaacgccttaaaaaccgccagtggtaaggcaagcaaaagtgatgagcgctttaccaggattcatcaggctaattgtaaaagcatcaacccactacttgcacttacggaaaagaaaggcttcacaactggtagataccagaagctttgcgcagctacctttgaattggctgagagagaagcaagatctattactgggctagccagagtggcgatatgcccatgcatctga

SEQ ID NO: 98108 - DNA, 462 bp, Enterobacter aerogenes
atgggccgattaaccgcaatcatctgtgctgtcgtcatctgcctcctggcttccatgttatgggcgattaatcactaccgcgacaacgccatcacctacagagaccagcgcgataaggccgctgaacaactcaacctggctaacgccaccatcaaagacatgaagaccaggcatcgagatgttgctgcactggatgctaaatacaccggagaactggctgatgccaaagctactatcgatcagcttgagcgtgatgttgcttctggcaagcgccggatgcagctcaacgcaaaatgtaccgcgagcggagcgtccggcaccggcggcatgggcgatgcttccagtccccgacttactgactccgctgaacgggattatttcaccctcagagagcgaatcgccaccatcaccgggcaagtgaactacttgcaggactacattcgaacgcagtgtttgcagtaa

SEQ ID NO: 98109 - DNA, 504 bp, Enterobacter aerogenes
atgaacccgacgctcaggaataaactgattggcgcaatcgccggcggttccggtgccatcgctattgcttctgtcatgcttggtaatgctgatgggttggaagggcgtcgctattacgcttaccaggatgtcgtcggcgtctggactgtttgcgatggccacactggcgccgatattcgccgtggtcaccgatactctgataaagagtgcgacaacctgctgaaggcagatctgcgaaaggttgctaacgccatcgacccgctaatcaaggttcgcatccctgagcctacccgtgccgcactttactcctttacttataacgttggctctggtgccttcgccagttccacgctgctgaagaagttgaactccggtgatgtgccgggggcatgcaaagaactgcagcgctggacatatgccggtgggaagcagtggaagggtctgatctctcgacgtgagatagagcgccaagtctgcgagtggggccaaaaatgggccgattaa

SEQ ID NO: 98110 - DNA, 225 bp, Enterobacter aerogenes
atgtatcgcatggaaaagataaccactggtgctgcgtatggcgcttcagccgggagcatcctgaacggcatgcttaatgcctacagtcccgagcagtggaatgccatcggcgtgctggtgggcattgtcattgccgtactaacgtatctgacgaatttgtatttcaaaatccgcgaagacaaccgacgaagcaggagtagagatgaacccgacgctcaggaataa

SEQ ID NO: 98111 - DNA, 645 bp, Enterobacter aerogenes
atggatagcaatgcggacttcaataggcggctctattgtcgaataagacatatcccaatcattggagcagttttccgcattgttaatgcttatgcgtatcagggcgataaaagctgcaataagaagatcgccccatttcgcaagtggtgggaaagaattttcaagaaggctgtatatatcttttttttaatagagttagttgtgctttattatggtggcgatgtttctaaggttccatgggaagcagctgattctattctttctgttttcccaagtgtattagggtttggaattggcgtttttgctcttcttttcgttatgcccgaaagctttcttgtttttatgtccactaacagagaaaaactaacatttggcccagagattgtaccagttgatatcgcctatccgcttgtggttttcactcttgcactttgttggtctgtgattaataaagctttcattaatgattttttctcatttgtaagtatgttctttttcttttatggaatggcgatggcatttgaactgatttcatttctctttaactcttcgttattaattcaaaagatatcttacgaggaatatttgaagaaaaaacacactgataaggaaattaatagggttgatcgatggaataggaaatag

SEQ ID NO: 98112 - DNA, 972 bp, Enterobacter aerogenes
atggctatttataaattttacaatattcaacttctacctattgataagagtgttactgaagttggggtagatggctattgtcgccttttcgaaggggtgcaatcacttattaatgaatgtaagcagaataatagaaaactcagttctatcgcaatgaaaatgcgtggtgaaatgtatttcgctcctttttctgtgactatttacaaatttgatgaagttcagaacgaatctgttatttatggttcttttttaaagtttgatgatgtcaatgttttggtagatactaatagcggccaaaccgaatatagatcgaaaggtaacaccagtagcagacgatacgatttagagttttttttcgacccaaaaactcatacccttgcaatccatgatacaaaaggtttaccagctcgaactcctctcatcgatgctttaaatgatatacttggtattcaagctacaaggctttttaaaaaacacagtttagaaatagaagaacttacatcggcagattcaataacagagtttcttgaattgccaaaaaaaggttacaaaaaatatgatggggttgttacattttccaattcggatgcttatgatcagataatagagggtgaactgaaacgtcgagaagaagagttgaaggataaacgggtttcaaaatggtccgctagttataaaagctttaataaagcggttatgactgacttaccggatgatgcaaaaattcaaatggcattggctactaagtatggcaatgcggaggtttcatacttagatgaacatggtgacagacaaaaataccaaatggaggattatccagtaagagagcagttaacagttaaggagtataaaggtgtaaaagggaaagctctggcagtattaaatttaattaaaaaagccttggcaaaaaccagagttactcctgggactatcaatagtaataaaaaattcttagatgaaattggagattaa

SEQ ID NO: 98113 - DNA, 816 bp, Enterobacter aerogenes
atgaaactcgaagcatccttaaaacatttcagccctcagggcatgcatatcagcgacgacgtgaaaagcacatcaccagatcgcctgaccggaacagatgttatggcggccatcggtaccaccagcagtcgtgcgcgcttcggcctggccgctttcttcggaaaggctggtatcagcaagacagatgagcagttggccgtccaggcgctagcgtggtttgcgattgaaaccgcaccgaagcacgtacgcaaaaccgcgggtaaagagctggggcgctgttgcctgattttggcgcagtttgcttttgcggagtattctcggtccgcggaaacaacgggagcctgcagggtatgcaatggcaccggacagattgaaaccactaccatagaacgcaaagtttctaatccgtggggcaaagcaccatattgggctaaaaaatcccgtgctgtctgtccttccgactgggataagtggactgaagtaaccgctgtcttcagcgctaagtgtaaagcttgtgacggtaaggggaagataaacgcacgctgccgctgcggtggttctggccgggttctcgaccgcaaagcgacaaaaaagcagggaactccggtatataaaatctgtgagcgctgttcggggaagggcttttcaacgatgccgtctacggctgcttataaagcgattctgacgcttatcccagaccttcacatcagaacatggacacgcaactggaaacctctctgcgatgcgctggtggaccaatgctggaaggaagaggagagggccgataaagagtttcaacgagcaacagcttattga

SEQ ID NO: 98114 - DNA, 303 bp, Enterobacter aerogenes
gtgagtatggcgaaccttcgcaaagcggcccgaggccacgaatgcacagtacggattccaaggtattgcaatggcaatctggaaaccagtgttctggcgcattaccgcttggcgggtacctgtggaactggatgcaagccggacgatacacagggagcgattgcctgtagtgcttgccacgatctcattgatggcagaaagaaaaccaccgattacacccgcgacgaactgcgccttttgcatgccgaaggcgtgctcagaactttggctatatggaaacaacaggggttactgaaagcatga

SEQ ID NO: 98115 - DNA, 222 bp, Enterobacter aerogenes
atggacaaacaaaccaaagaaaaaattagtaatcgcatgtcgcaggtaggcattggcgaaaagctcggtgtgtcttctcaggctgtaggtaaatggctgagaaaagggaacattccaccaaggcgcgttattcctctttgccagatccttgactgggaagtaacccctcatgaggtagaccctatgtcttacccaaacccgactgacggcctgccgaaatag

SEQ ID NO: 98116 - DNA, 204 bp, Enterobacter aerogenes
atggaccctaacgatgaagatgcaaactcttcaagtagtgttccgcgggttttggatgagaaagaagaaactctcctttctctcttcaaccaattaccagaggctgaaaagcttcgtctgatcctgcacaccaaagcagtgcttcatgaaatggaccatctaaagaatgatgttttcgacatcatgaacgatttgaaaaagtaa

SEQ ID NO: 98117 - DNA, 345 bp, Enterobacter aerogenes
atgagcaaatcacttaacgcacgatgcatacgccgctggaaagttgaattcaaagggcgctgcgattcgaaagtgaatccgtactggcgcaagcgtgatctgcgcgggtatatccgcgaagctgcgcttaccaccgcttatagcatggtcgagagcatggctgaacgtaacgccaaggttgactatgacggcacgactgatggctggtcccctgagttctcggcatggtatgacgaacgccgggaacagtacctcaaagaagcgcgtgattacctggacgaagaagccacaaatgacgagatcgatgaagaaatccagaacgagctggaggcctggaatgactga

SEQ ID NO: 98118 - DNA, 291 bp, Enterobacter aerogenes
atgcagtccaggcacagatggttagtgttggcggccgttccactgttcgccatcggcggcgttcaggcgcactctgccggtaatatccaattttttggcaatgttgttactgaaagctgctggaacgaaacggaaagtagcgagattttgtgccagcgcgccgatcgtatcgaacgccacgtgatcgtggaaaatatcacgacatcgctggcctcggcttacgcaacggtagagaaaagctatctcgatgctgacaagcagctcaccctgctacgggtggtctatgattaa

SEQ ID NO: 98119 - DNA, 399 bp, Enterobacter aerogenes
atgaatagtgtttttgataaagatgaagttattagattttttctacttcagagtgagctggttaaagccttatttagaacctatccaatggcaaaagacattgagtggttattagattttcccaaaaatggacatgttcatattaatgggaatgtatggagtttttccaaacatggaaagggaatcaggttctttatagaaggttcacataccggcaaagtggttgatgttcataataatataagttgtcctgaattggttgatacatggcgattactacagtacttttcgcttgatgatgaaaaccagcttgaggcgcttttgaatgagatggttatctcaggtgaattagagaaaatatcggataaattataccggttaaaagaaatcccggcctga

SEQ ID NO: 98120 - DNA, 207 bp, Enterobacter aerogenes
atgaaacggccctcagcccgcgccccggccttccgggaacgtctcagcgattttgaggccaccaacggcggcattttcagcagccatggggaaagaggtgcccggataaggcgcatcgcgccgctatccgggatgatattaacggcggttgccgaagatacgcagcagcatcaggaacaggttgatgaagtccagatacagcgttaa

SEQ ID NO: 98121 - DNA, 897 bp, Enterobacter aerogenes
gtgattgatttcataaattttaacgaccgctataaacaactcagaactttattaccacttgctaaaaatgtagctgaatatttgatagcaggactaaacattcgcatctttgaacccgcaagcgcagttgaggatgttcttatcgtttaccacggtggtggagtcaactcaaatgctggttacgatatccttgctcatcagataagtcatcgtggagctatatgtacatgcctcatagatatccgtggacacgggagctcattgggtaacaaaggtagcgtttctaatccggagcaggtctggcaggatatcgacactgttcttgcacatgttcgcgtaaagttcccctgggccagagttcacttgcttggccattcaagcggaggggggatgttgatcaattattttactcgcttcaccccctctcaacaaagtgacagcctgattttacttgcgcctgagtttgggccttttgcgccagctaaaatttgcagaagaacaatggctccattcgcgtcggtgagcaagtggcctttcgtactaaatgcgctcagtgtgggattactatgcggtaaccgttatgcagtgactcttaattttcccaatgaggttatgctattaagacctgaatttgttcagcgatacagcgtgaatatggcgaatgctttgacgccgcgtcaacctgcaaggcaaattgcagcattgccattacctgtaactgttctgatagctgaaaaggatgagctatttgatgcaagacaaatgtcagagtttgtagaaggatgtggtaacccgaatttacatagtagaattattgagcacagtaagcatttagactgcatcttttatattagtgaagaaattcttcaacatttgaatagatatacgtcaaattaa

SEQ ID NO: 98122 - DNA, 804 bp, Enterobacter aerogenes
atggatatgttgctctttcccggtcaaaaccgccgcgcctggacagaaaccatgatcaatctggaagccagaaaactggttaatactgcaaatatggtagcggctatgcatcttcaggatggatttatccggattcagtttgtggatgaaattcgggagttcatcatgtcgcagtttgaggctgcgcgtcgggcaaaaaccgatgatgacagtatggcctgccttctggcattacgagcagaaaataccagtctccttgaacagtcccgttctctcaaaaccggctatgcgaaactctatgcagaagtgaaggtagtccgggacgagaacaaaattgttggttatattatttcggcagtcgacgtggtcgttgccggggcggctatttttggtgggattgtcatgatgtccactatgacaccggtgggtgtggttgccggtgccgtcattgtcgtaaacggattgaacacaatttcacgggaagctgcgcacagtcttctcggtgataagcagaccgaaggcatatttgctgatggctcgatggagatcgctcaatttctgggattcagtcggcagcaggggctgggtacatataaggctgtcacactcttcagtgaagtctacggcgcatatggcctgcgactgaaaccagaagcacagcggctttggtactggaccagacccgatttcttcaggaaggtgtccagcacgcctcgtccagcgatggcgcttaaaattgcaggatggggagtaaaagccaaagtggctcttgatttactgtctatcgatcctgccgggaaatag

SEQ ID NO: 98123 - DNA, 324 bp, Enterobacter aerogenes
atggctatcagtgaaaaagatctgctcaaggcaggtttcagtaaacacgaagtggataatctacaggggcggcttgcagctgcgggaggcaccatgcagagcctcattggcgcgctttcgcggcgctttcgggtgtcagtgtggatcacaattgcgctggttctggttatgctggtcaccctcatcgctggcaatcggacgcacatcctttccggcggtatgagttccctcattgtcctggtcattgcctgggtaacctttccaccggctcttggctggaaagcatttaggctgcacaagactatttcccggcaggatcgatag

SEQ ID NO: 98124 - DNA, 312 bp, Enterobacter aerogenes
atgtgctttgtgttaattcagagcacattgcgctcccagttaattttgctgcaatatgttttccgtggcgctgggagcgcacagagggcggccagtcgccgccgccctctgtactcccgggctctggccgccaaaatcgccacttcgtggtaccttcgacttatccctgcaggcttcgggtcgggccgaggcagcgtccttgcaaaacacggccctcagcccgcatccatgcgggctgccccggccttccgggaacgtctcagcgattttgaggccaccaacaccggcagtttcagccagcatggtgaataa

SEQ ID NO: 98125 - DNA, 570 bp, Enterobacter aerogenes
atgcgctatgaattcgtagaagtattcaatgacttgattgattgctttttgattgccgatattcatttgcttaagaaatataaggaagaaaaagcgcttcaagacgatctagcatacgagtttcaaaacaataaaagtggcgacgatgcggttcagaatggaataattatccctattgctggggttgaaaactatccatacacgattattttcactttatcgcatgaacctccggagcttttcagaccagaaaatcgcttacaacatcagcgaagtggttatcatttacgtgttgaaaaccaacgaatacagtttttcacttggcgaattttacaaaacctctctgaggcaaccgttaagcaacttctggttcgttatcaagaaccaggaaagccacaaattgaaattgcaaacggaaattatgatgttgagattctggctggtgaagtgctcagagaagattattacgaacccgcttttgagattgttttgcagccatgtaaaaatttcaacatggcatcaaagattgatactagctatctatttaccatagattcagacacttattaa

SEQ ID NO: 98126 - DNA, 924 bp, Enterobacter aerogenes
atgaaaacgattaacggtgttgtacccgtcatgctgaccccttttaccgctgacgaccagattgattatccggcgctggcgaagctgatcgactggtatctggcaaaaggcgtggatgcgctttttgccgtctgccagtccagcgaaatgcaatatctcaacttacaggagcgtgtcgagctggcgcgtttcgtggtgcaacgcgtggcggggcgcattccagtcattgcctcgggccatatcagcgatgatctggcggcgcaaaaagaggagttgctggcaatggcgcagaccggcattgatgcgctggtgctggtcactaatcatctcgatccgcgtaatgagggcagtgaagtctttttcgctaccctgcaatcgctgttggcggctttaccttcttccatgccgctggggctgtatgagtgcccggcgccgtatcgccgcctgcttagcgacgacgagttcgcctggtgcgccaacagcggtcgtttcgtggtgctgaaagatgtgagctgcgatctgcctaccgttgagcgccgcgtgcgtctggcgcagggaaccccgctaaaggtcatcaacgccaatgctgcgatcgcctggccggcgatgctggcgggcgccgaaggtttcagcggcgtgttcaccaacttccatcccgaactgtatagctggctgtggcgggaaggcaaaaatcagcgggcgctggccgatgaactggcgatatttctgtcgctgggcgcggtaaccgaaacgctgggctacccgaaaaacgccaaaatttaccatcagcgcctcgggaccttcgacagtatcgcctgccgggttaataaagacgatgtgctgagcaaattctgggggctgacggtgatcctcgaccagatcagcgccgggactgaactgtggcagcagcggatcgccggctaa

SEQ ID NO: 98127 - DNA, 1212 bp, Enterobacter aerogenes
atgtttttagaagaacgtagaaagcatatcctaaaatatttaaacgatcatgaacgtggttttgttaattattttgctgcttattttagtgtttcaaaagaaaccattcgcagtgatttaaatattcttgcagaaatgggattggtgcaacgttgttatggcggagcgattatttcccggcacaatttaaaggctgagcttatttctgaaaccggtgatagtttcggcgtgctgctgcagccgattaaccatcggaaacctacggcgagcggtcagcagaaaggaaaatcgatgaacggcaaagtgtgtgtattcggctcatttaatgtggatatcgtggcccgagtggagcgttttccgcgcggcggtgaatcgctactggcgctcgccagcagccttgggcccggtggcaagggggcgaatcaggcgacggcggccagtaaagccggcgcgcaggtccattttgtcgctaaggtgggcaaggatcagtttagccacctggcggccgatcatctcactcgttcagaaatacactcctatacgctttatcaatctgagagcgaacctaccggcaatgccattatttatgtttcgcaggaaaatggcgaaaatatgattgctatttactccggcgccaatactacaataactcataatgagattgaggcgattattcctgaacttagcgcctccgacgttttacttgttcagcttgagaataattttgatgccactcattcgctaataaaaatagccagggaactcggtaagacagtcattctcaatccggcgccatactcggcggaaattatcaaaagcattccttatatcgatgtgattacaccgaatgaaaccgaggcttcattattatccggtatcgacattcacgatgttgatactgccaaagaagccgcgctgcgcatcgctgaattaggcgcaaagaaagtgctgattaccatgggatcgcgcggggcgctgctgctggataatcgccagtttagtcaaattcgcgcctttccggcggtcaccgtcgataccaccggcgctggcgatgcgtttaatggcgcgctcgccgcctcgctggctgccggcaacaccctggttcaggctgcgacctgggcctctgctttcgcctctctggccgtcgagctggagggggcttccaacatgcctgactttgcgcaggcaaatgcccgactccgtaccctctaa

SEQ ID NO: 98128 - DNA, 2298 bp, Enterobacter aerogenes
atggatacatgggagtggtatcaccagtatagtaaagagttgcgcgaagcagggcagggatatattccacagataatagatgatttttccgatagcgtgctgcacgtacagctggaaaagtcagacgcgctgttaccagaaatgaaagcattaaatcaggccgcgaaaaatccgtggctggaaatatttattggtcactgggaaatgcgtcatcgcctgactaattatggtgaaggtgaaaaagtactccctgatatcgtggcgctgttcgaaaaggcgcatcgtgaagaagcgatagattgcccgcaatctgtctgcgtgacgcaggatttatccgcttgctatgaaaatatagacggcccggggtgggcttctgagcgaatggcggtgtgtgaagaaacgatgtcgcgcatcgaccccacctggagctgtttccagtgtttatcgacggaatatgccagcgcattaatggattctcagcaatacgagcaggccttagcgtatttggataaacaaattgccgctgtgcaggcctcaggggaggacgatattgaggcgttactctgcacgcgaattgatattctcatattgctacaacgctacgatgaagccaaagcgcttgtcgagccattggcggaagagaatgattactgggggcgcgatcgtatcagctaccagctaaaaaaactttacatcatggcgctaaccgggcaggacgatgaggtgtgggctcagctcccctcctggtcacagataacgccatattcctgggatcaatggctgaagatcattaccgcgttactgcctcgctacccggaacgtaatacctgggcgctggcaaggatcattcaacaggtcatggaacagcgctcgcaggtaggcgcgcaccgtaaagtggttgaactggcgaagctgcagatcaacctggcgttggagcgtgaatcaatttgggtcgccaggctggcgttcaaactggcgcagcggcatatcccaaaactgcgcgctttactgggagttgacctggaatttcttgcgctgtgtgaaaaaatagcgtcaagggaagcggagctccttgccaggccaacgatggtcaccgctgaagaaaatgaacagcctgacccggaaaaagatgttgaaatctaccgtctcaagtatctgcaatcgccagacgatgcggagtcgctggacaatctttgcgcagcattgaccgcttgctatgcgcgagatgaagcaattgaataccttagccgttatgttgcgcgccatctacaggatgacgatacgctgtgcttccgactgctggatttattagctgagaaggatgatttagcggctattgaacaactggcgcgtcagtacgaagaggcgggtatcggccatatggcgctgtggttccgttgcagaattttaagtcagcaggaagactggaacgcgcttgaagcgttgggacagcagctggcgcagcatgccgtcagcaaggagtggcctggcgtctatcgcctgaatgccctggcggcacagaagcaatcggcgtttgacaggcaactgggctatctacagcagttgctggagctacaaacccagcgtgagatggatattaataacaccttgtgggatatcatgtcggttgccagcattctgcagcgctgggatgtagtccgtgaaattgctggcaaactggaaatgaaactgacgccaggcgatggtttcatcgaggaagattggggtattgttcgcctgcatttccgcgaaaattacgagagccgttattattacgcccgacgcactggcccggtgacagccagagttattcagccagcataccgcaccaacctgccgcagcacgccgatgaggtggtggtatttgatgcggaactgatgaacaccccgccagaagatgaacaggagcgcgagaatttcatcccgctatataacgttgtgcattcggcgatcccaaccagctatggtgaatcctggttctgcgatggcgcccggccgcaagaggagcaacttgaagcgttccgcgaggcgctccatgaacggcagtggcactactggtgtaatagcccggatgattatgaaatcatagatagtcatcaagaggatgatggcaaaacgctggctggattttacttcgttgtcagcgcgccgcagtctgtctctaaaatggagatagataaaacgctgagccaactgactgctgactggcagcatccattatgctggttggggctggcgcaggcagcgggaggagatgaggataaacatcgcgctattattgaacgctacgggctgtaa

SEQ ID NO: 98129 - DNA, 1854 bp, Enterobacter aerogenes
atgagtgttgaaaaggcgaaagtcctgcactctgtagatgactcatattctacagaggttaatttaaatgggttaattgaggtattaagtaagcatctttattccactcctatcgttgcggtacgggaattggtacagaacggccacgatgcaattgtccgtagacgtattgaacagccgaatcctcctcaggagaactggattcgggtatccgctgatgtggcaaaggcaaccatcactattgcggataccggcgccgggttaacggaaaatgagattcatggatttctggcgacagtgggcgtgggctatacccgaatgttgcgccagcaggatgatgacaccgggcttatcggtatgttcggcctcggttttctatcagcatttgtagtggcaaaagaggtcaccgttctgaccacctcctggcaaacaccggagaagggttggaaataccactcaagcaatggacagcgttattcggtaacctcctgtgaggcaactcaaccgggtacgcaggtcattctgacgctcaaagaagagtatagccatctcgccagtaataccttgctgcaccgggtgctttcgcgatattgcatactgttgcatgagcctgtttttgtcggcgataccgatgagccggtgaataagcttcttcctccatggcgtgaattggcgcaggaaggcgtcacgatgcatcgggcattggcgcagcggaaaaatctggctttcgcggcgcagtttgaatcgtctttcgagccgatctgcaccatgcccgtcgcgccatttggcgcaagcgatgcggttgggcttttgtggatccaggacggcgcaacatacggcaccagtgataatcgtaatctgtcgctttttttacgtggcatgctgctggatgatgaggcgcgcgaattgctgccgccgtgggctggatttattggcggcgttattgaatcctcaaaacttacgcctaccgccagccgtgaggatctacagcgggatgaaatctggcatgcggtgcgggaggcgttaacggaagcgcttgtctgcggcttagccgatttagcgcaaaatcagccagagatatggcggcgggtactgctgcgacacaacgaagcgcttttaggcgccgcgctttgtgacgatcgcttgttcgatctgctaaaggataaattgcaggtcccgacctctaaaggcgcgctgctggcgaaagatttgcgcatcaacaacagtattcatgtactgttgagccaggatggcggttttgaggagatgttatttcatattctgcagcgtcccgtcgccagaggcgatcgctatgccgttgtcccgtttctacgccgctgggcgatgctctatcattgtaaaattgttgaggtcggtacgcgcacgggtaatgaacaactctttagtctggcggaactggcggatgagcagttcacctgtctggaagcgcatttgtgcgatgatgaacagttagtgatttcacgttttgaaccggcggtattgccactggtggtcacgcccgatcgtgaagctgagttaaaacaaattcttgagcaggatgatgcggataaaagaatgagcacggcggcattaatgctggcccgtcaatttacctcgcaaatccatcaaagcaaaacatcaaacttatatctgaatcttaataatccttgcgtgatgaaaattgtgcaggcattgcaaaataatgtgcagccggtcacggcattacaaatattaaagtcgttaaaggttattctgtgcgccagtggtaataaaagtcagcagtggaatttatatcaggcactggatgactttacgcaaattataccagtattaattaaacaaggagaggcataa

SEQ ID NO: 98130 - DNA, 870 bp, Enterobacter aerogenes
atgaagtacttaggaatgttgattctattttttacgcagtgtgtctgggcctactgccctgagccaggtctacaggtaagcctgcaggggagaatcgagctgcggacgtatcctggcccgccaaattgggaagatatcaaaaacggcgatgagccgctggacagagatgttctggtgctggatagcgcaatgatgtgcgatctcggggagatacagaacgaagtaccggagatagaactcatttatcgccaggggctgaagggttgcacggcggacactcgctggtgcggtaaagcagtgttggtgtccgggctgaccagagagtggcaaagcgccagggaccacacgctggtgcagcttgtcgttagtgatattaacgaggtcagcgaagcgttaacggcggaacaacaaaagagcatgctgcggcagttccaacaatttcagcaggcgctgcgggaaaaaaatgtggcacggcttaagactttttttgtttttcctgtcgagggaatggttgcggatttcataacttttgacgagtggaaggaaccgttttcagaaagattatcggaacgtttttttgagcaatatagaacggcaattatggatagcctgcaggatttcgtgaagctaagaattgatcccgtcacgctgaccataggcgaacacagagataatgcgttatctgttgaggaacagaaacgtcgttatttttcaactgatgaaaaggggctgttttattatctggaaaatggtgtgaaacatgaggtttatggcgtctgcgatcgtatcatttacggtacttttgaagagggaggcttacgtatttatcaaggtactcgtgcaaatcagcaaattccaggattatcatag

SEQ ID NO: 98131 - DNA, 312 bp, Enterobacter aerogenes
atgttgacggtccatcacctcaaccaatcccgctcgcagcgcgtgctgtgggcgttggaagaactgcaattgtcctatcaggtagtctgctaccagcgtgaaaaaaacatgcaggcgccagcggaactgaaaaaaattcacccgttgggtaaatcgccggtgcttgaggatcagggcgtggtgctggcggagtccggcgcgattctggaatatctgcaggagacctacgatgcgctcagcagctcagaccgctggggcgggaagagaaactgcaatatcgcttctggctccattatgccgagggatcgttaa

SEQ ID NO: 98132 - DNA, 174 bp, Enterobacter aerogenes
atgccaactttccaactcataactgaaatctatggtaataaaaattatacttcctggcttcttcatttctttttgtatcaagttcgtgtcatatcaataaaatccgtgacggatatcatctatttcaatcataaaaagataaattattttttaattattaaaatttataaataa

SEQ ID NO: 98133 - DNA, 1083 bp, Enterobacter aerogenes
atgggtaagaaaatcgctattgccacttttcatgcagcacataattatggtgcagttctgcagacttatgctctttataaaactttggaaaaagttgggtgtgatgtatatttgcttgattattctccaagaaatttagttaaaagctatacgctttatccacaacgcaaatattacgaaaattttattagttatactaaagcatgggtgagcttatttttagactataaacggcgtcataatcgtttttctcgttttaatagctttatagatacaaatttcagaatgttacctaatgatttaaaacatatagatgtaattgttgttggaagtgatcaaatttggaatccaaatattaccgatggattggatgaaaattattttggtgcttgtgaatctgttactgcagaaatggtgttctcctatgcagcaagtatgggcgtttcatccttacaagataaagatgagttggaatttgttagattgttgtcaaatttgaaaaaaattggtgtaagggagttttctttaaaagaatacatcggtactttgactgaccgtgaggtctcgatgaatcttgatccaacattattgcttaataagaatgagtggtcgttaactgagagaaaaaacgctcgagagaagtatttattgatttatgaagttaaagaacatccccaaacttccattgttgctgagaaaattgcatcgcgacttggtttgaacgttgttactttggccgctaagacaaattacaaaataagcaagtctgtcctcactgataaatctccagaggaatttcttgaactctttaagtatgctgattttattgtaactacttccttccatggaactgttttttcgattataaatgaaaaggattttgttacgttagagtttgggaatgatatagacttacgttcaaaatatcttttatctcaggtcggtttagaggaccgattagttagtgaagcatctatggttgatggcaaaattttgcatattgaatatcttaatgctaaaaataaattggatgccttgcgtaatcaatcaattgagtatatcagttcttctctggaggattaa

SEQ ID NO: 98134 - DNA, 1173 bp, Enterobacter aerogenes
atgaacaagaaggttatattcgtttttcataaggttgactccgcaagtggtgggaatgcctctatgcttgatgttgtgaggaatattaaaaacaactgctcttttgatattttagcaatcgtacctaaacattataataattctatccgaccgattgctagtgtattgaatgaacttggtataccgtctattgaatcatctatttattcttctcgctatgagtttactggtttaacttttaaaactccctttaggatatttaagtgtgtggtcagaaatataatttcgatagtatcttgtgtgagtttatatagaaaaataaaaagtgaaaaggttgcattaatatatagcaacacttctgatgtttatgttggctctattctggcaaaatttctcggtattaaacacatatggcatttcagagagtttgggattgaagatcaacgaaatcatcatttaatgggagattatgcattttataaatttgcggattctttttctgatgaaataattgtaatatctgaagcgttaaagaaaaaagtcacacgttttatcccttctgctaagattaatatgatatatgatgacttgactatagcaaatagagatttaatagttacaagaaaaggtgcgatttcatatcctaaaatactaatggttggaactctatctccaggtaaagggcaattagaggttatacatgctctgacagctttaaaagagaaaaatatagattttaaacttgggattgcagggcgtgatacgggtgagtatgctttgtttttgaaatctgaggttgcaagattgggacttcagaataatgtggatttccttggtttttctgataatcttgctgttattcgtaatgaatataatattggggtcgttgcttctcatgctgaggcttttggtagggttacaatcgaagcaatgttctccggattaatagttatcggggttaataatggcgcaaataatgagttaatcaataataatgtcacagggtttatttatcaaactgcggatgagctagtttcgactgtcctttccataattaatggagagtatgatatagaggcaatccgcgctaacgctgttgagtatgcatctctttttttaaaaggcaaagctagttctcagataatggaacttgttaataagcatatacaataa

SEQ ID NO: 98135 - DNA, 411 bp, Enterobacter aerogenes
atggaagcggaaagcctgcttctgctcatcagaaagcgacatataatgctgacgggcggcttcgagcagtgtgaaagtaccgatcaggttggtctggataaatgcggccgggccatcaatagagcggtcgacgtggctttctgccgccaggtgcatcacgatatccggctggaaggcattaaactgcgccgtaacagcagccgaatcagtaatatcggtctgggtgaaagagtagcgttcgttgccggccaccggcgccagagactcgaggttaccggcgtaggtcaggcagtccatgacaaggacttcatcccgggtattttcaatgatatgacgaacaacggccgagccgataaaaccggcgccgccggtgacaatgatcttcatatttttctaccgttgcttacttaa

SEQ ID NO: 98136 - DNA, 702 bp, Enterobacter aerogenes
atgggcgtgctttggtcaattataactcctattgttatgctcgcaatttatacatttgtctttagtgttgtatttaaagctaaatggggtgtagacagtggttcgaaaacagagtttgcgctagtattatttgccgggatgataatttttaatttgttctcagagtgtattgctcgttcaacatcgttgataatacaaaatgccaattatgttaaaaaggtcgtatttcctttagagattttagttctagtatgtattggcagcgcattatttaattttatagttagtttttctgtatggataattgcatatactgtattgaatggaattccgccggtaacgtttcttctgttcccggtaattctgttaccatttatattttttgtggcaggaatatgttggctcttaagcgcattaagtgtttttattcgagatattgcacagtttatcaacatcataattacagtgctactctttatgtcgcctgttttttatccagtaacggcgttgccagataactacagacattatctcttcatcaatccgttgacctattttgttgaaacctttaggtcatttatttttttcggtcatggagtagatattttttatcctttttgctttatggcatctttactaatgctgtgggtagggttcttctttttccagaaaacaagaaaaggttttgctgatgtcatctga

SEQ ID NO: 98137 - DNA, 1314 bp, Enterobacter aerogenes
atgtcatctgattatgcaattaaggttgagaatataagtaagtgttatcagatatacgataaaccaatagacagacttaaacaaatgttctctaagttaaaccgtaaatattatagagaattttgggctttacgtgatatctcatttgaagtaaaaaaaggcgaaacagtcggtattgtcggtaaaaatggtagcggcaagtcaacattattacaaataatctgcgggacactaaatccaacatctggcgaagttacggctaatggtcgtatcgcagctttgcttgagctgggttcaggttttaaccctgagttcagcggcagagataatgtatatatgaacgcagcattattggggctaagcaaagcagagatcgaagaaaaatttgatagtattattgactttgcggatattggtcaatttatcgatcaacctgttaaaacatactctagtggtatgatggttcgcttggcatttgccgtacaggcgcagattgaacctgatattttgatagttgatgaagctttggctgttggtgatgcgaaatttcaggcgagatgctttgaacgattaaaacaattgaagcagaatggcaccagcattctattggtaactcactcaactgaacaaattgtgacacactgttcgaaggcagtattaattgacagtggagtggttatggatattggggaacctcgaaaggttactaatcactatctcgatctgctttttggccgtagtgtaaaatctacgacagaccagaaccactcagttgaagcaattcagaatacatacgatattgttactcttagtcaaagtgaagatatttttctggcccgtcccaattcaaataacctaagttatcgatggggggaccaaaaagcaattatcctagattatgtcctttcttcagaaaatatcaattatcctccgacactgagatctggaagtaatattgaactttcgatatccgtgcgttttgtagaagaaatattccgcccaattattggttttacaataaaaaataaagaaggcatcaccgtatatggtactaattcggaattattggagtttgaagatgtaatgtctacaggctcgaaagatagtgtcgagattattaatatgagctttacttgtaaccttgcacctggtgattattttatatctctgggggtagcgagcaaagcatcagaagatgttgagccgcacgaccgacgctatgatgctatccatgtacatgttgagcctgataaaacaatgtttgggttgtcaaatatgaatttaacaatgaataaattttcaggggatgagtaa

SEQ ID NO: 98138 - DNA, 3243 bp, Enterobacter aerogenes
atgtctaccttttttaatactcaaaaatactcactaaatgatgatattaatgtctatcacaataacgaatataaaagtatcaactatagtgatggtgatggtattgaacaaaatatatatgaaattattagtaatgccgatgatttaagtgttctctcaactgagttaagaaatcattgcattgattggccaactatttatcatcttggttccgaaagagctaatattctgagaccatttgaaggtattctaaaaggggccgatgttcttgaaattggtgcaggatgtggggctattactcgctttctcggagaaagcggggcgaatgttttagctgtggaaggatctctcagacgtgcaaaaatcgctcgtgctcgcactaaagatttagagaacgtcaccgttttagcagaaaaatttgctgatttcgatacggagcacaagtttgatgttattactttaattggtgttcttgaatatgctaatttgttcactacaagtgatactccgactaaagctatgctggaggatatatataattatcttaaaccgaatggtaaattaatcattgcaatcgaaaatcaactgggtttgaaatattttgctggcgcaccagaagatcacaagtggaaagtaatgtatggtatcgaaggtcgttatactaaaaatgatccagagaccttcggcaaacacaaaatacaaagtattttgaaaagtgctaaattcaattcgctacaatttttcgcccctttcccggattataaaacagcgaattcaattgtttctgaaagcgcttaccaaaatgcttcattcaatgcagcaacatttgcaatagaaaatacgcttaaagattatcaattgccaaaccatctacttttctctcaggagaaaacatggaaagttctgcatgataaccatcttggactggaacttgcgaattcgtttttaattgttgcaagccctgaggaaaatgcagtacctgttgttgaacctgactatttagcatttcattacagtacagcaaggcttaaaaaattctgtaagcaaagtcattttgtttctgagtattctggtaaaataaaaattaaaacttatcggctctctgagaaatttactgatacagaagtgaattctttattaattaataatataaatgcagagtccgaatatattgcgggtatatcattaaatgaaaaaatttcacagattatatcatgtgattattggttgctagatgattttattgatattctaaaaaaatatctgacatttgtttatagtttaaagaatcaagagttacaagatttcaatcccgaatggttgtctggtacggtttgcggatcattaattgattgtataccgcaaaatatattcctttcagatatgaatcctacatcatggcatttgattgatcaggagtggagttatgaaggtgatatatcattttcttggttattatttagagtgttattgattacagttcagtcaaatacccgatttgggtacaatgaacaaattaatgatctgactcgatgtgaattctttgagttatgttacaagtcgctcggttttgatatcacgatgggtgagcttgaaaaatgtgcagtttttgagtctgaatttcaaagcttggtttccggctgtaataaagaaaagattagtaattggtactcttcgcaaattattaaatctaggaactatattgaggaagttgagagtcttagagatattagaactcactttactgctcagaataagcagattgaaaaattgatactgagtgaatctttgcttagccaggaggtggagcgatataaactcaatgagcaattaattaaagcatcggttagctggaaaattacaaaaccgttaagagtagtaagaggtttgattaaaataccgcggcaaggtaaaatggctgactggattaggcgtaaaaagcatttaagtagttatttgataaaacgtattcaagagggagtgaaaagacatggtcttattaattcaatccctctagctattaaagcttctgcggatttgtcagtaaatcattttaagaaaataaaaaaaagcaaattatatcaacaaaaaataaatgagcttgagcaatttattctcgccgagaaaaattatattgaccttttccatgtgccgatggggtggcatacgccactgttccaaagattccagcatctttccctacaagcatcccgtttaggtggattggcgatttacggtgggcatatccaggtcgataaagaactatttgtttacgaacgtgaggatagtaatgttattgttttcgatgcgctcgatagtctggtaaatgaaaggataaagattgcgctgaaatcaaatacgcttgcccaaaaggtagtaagaatacaatctattgatcttgcaactacaatagaagatatcttggaattccaaaatatggggttcaaagttgtatatgagtatattgacgaaattacagaggaaattgtcggtgattttcctgagacgattataaatcggcataaatggatacttgataatgaatcagtctacgtcgttgcaactgcaactaaattatttgaagaagtatcatgtcatcgttcaatcaatatgttgttatcaaccaatggcgttgatattgaacactggcatgtcactgcaaataatccacctgcagatattaagccattattggaaaataaaaaaactatcattggctatcatggggctttggctaaatggatcgattacgatttattaaataggatcgctgacgttgatggcttgcagctattgttaattggatacgaacatgatagttcgttcagagatagcggcttagcggagagagataatgtttactttcttggaagtaaatcctattttgaactacctcgatatgcgtgttattacgatgttggaattctgccattcaaaaaatataagctaacagaatcagtttcaccggttaagttatttgagtatatggcattgcgaaaaccagttgttacgactgatcttgttgagtgtctgaagtataaaagctgtttgattgccgagtcgacaaattatgataaatttattgccaatatacaaacagctatcaatttgaaaaatgatgaagattatcttaccacattagatgttgaagcattggataactcatggcagtcgaaaacacttgaatatctggaattggccggagtcaatgttaataaaaaaatcgaagggaagtacaaatga

SEQ ID NO: 98139 - DNA, 1320 bp, Enterobacter aerogenes
atgaatcacaagttataccagttagttcgaaaagtttattggaaactacctttcagtgatgagacgaaggaagagattgttgggcgcgtgagaagaactatacgtaacgcaaaacaacagtcgggtagtgttgccggcgattttgtcgatacgactaaagacgattacattcatcaggtactcagctctgcgaaacctgcgtcttctgagtatgtggctgaaagcgaagatcgctttacgcgtaaagaaggcgatgtgaaaattattgcttactatctgactcaattccatcccaatcccgaaaatgatgaatggtggggaaaaggggttactgagtggaacaatgtttgtcgtgctaagccacaatttgttggtcattcccaaccacggttacctggtgagttaggattttacgatttgcgtctgaaggataatatgcttcggcaagtagagctggcaaaaaattatggtgtctacggattctctttttattattactggtttgatggcgcaagattacttgaaaggccattagacttgtttatgaacaatcctgatatcgacttcccattctcgctatgttgggcaaatgaatcatggacccgtcgctttgatggaacgtgtggcgagattttgatgaagcaaagtgatagcgttgatagctataaatccttcattgagagtgttattccctatatgcaagatcgtcgttatatcaaagtagggggtaaaccactgttaaccgtgtatcgtccatccttcattcctgattgtaaaaatgttattcaacattggcggaataaatgtattgaggctggaattggggatatccatattgtaggtgtcaaagagcatacttgggatcataatcttctagctattggttttgatgcgcaaagtgaattccatcctggtactttgttcaaacactgcaatgatataactcatacaataaaatttgttcaaccaaaatttgaaggtctggtcctcgattatgaagatatcgtagttaataaaaaatattttaaatataattacgatcgcctataccgtgctgtgatgcctatgtgggacaatactgctcgtcgcgataataaagggatgattttccataaatcgacgcctgtactttataaaacctggcttcaggatgtaattaatgaggccaatgagcgtactgatactgaggataatttgatctttattaatgcctggaatgagtggggcgagggtgcgtatcttgagcccgatagagagtatggttatgcatatttacgtgctacccgtgatgctgttgaatcctgtcgacataaaaaatag

SEQ ID NO: 98140 - DNA, 678 bp, Enterobacter aerogenes
atggataactaccctgctttttttaaaggttattcttccctcagcatggctagtatagagaaaaaagttgcatcaacagtaaatacagtaatctgtagcagtcattctttgcagaataaatttttaaaactggccaatgttgagctttgtttgaatgcatgtacttccgattttattattaactcatgcagagaagaaattgaatgtggtaagaatattgtatttggatatgttggaacaattgcaagttggtttgattggaactgggttattgaattagcggggcttaatccattatcgaaaattcgtttaattggccctcttaagactctaaagccagttaacctaccgaagaacatcattattgagaaagctatctcccacgatgaggtcccaacggtattatcacaaattgatgtcggaataattcccttccaaataaatgaaatcactaaatttgtcgatcccataaaattttatgagtactcggctaaaaaaataccattactttcaacacagtttggtgaaatgttgtggcattataaaagaattgatgaccataagcctgcttgcccatttaacattccagataatacactttattttgatgaaagaagtcttgaaaatatcacatgggaagatagatttgctgagcttttccctaaaatattaatataa

SEQ ID NO: 98141 - DNA, 1734 bp, Enterobacter aerogenes
atgtctgagatccattcgcccgccgaagctgctagccagcgagctttggaatctatgtatgcttgcctcagtgaaggacgaagcttccggctggaagctggcgctggtgcgggtaaaacatattcccttattaaggcacttcgattcttgattgagcgaaataaggatttatttgaaaaacatagccagcaaattgcctgcattacctttactaacgtggcgaaggatgaaatcgtcgcgcgaacagatcgaagccccatcgttttttgtgataccaatcatgcgttctgttggtcgttaatcagtagctttcaaaaaccgttgagagaactgattgaagcaatgccagagtggagagaaaagctcgaagaggctggtggaagccttggtaatcgtagtgttgagtataatcttggacatcgctccatccgcgaccatcgtataacgattcatcatgacgatgtcctttctttaactatctcactcatggaacacgataagttccgcaaagtgattacagaacgcttcccgatcattctggtcgatgagtaccaggacacagacaaagaatggattgaggcaattaaaagacattttcttgggcaaactggagctcctctatttggttttttcggcgaccattggcaaaaaatctatggtggtggatgtggtaaactggaacatccagatgtggttgagataggtaaggaggccaattttcgttcggataagacaattgtcgatgccctcaatctcatgaggcctgagctaccgcagtgtgtcaaagaccccgaagctgaaggtcaggtacgggttttccatacaaacaattggcaaggggtacgtcaaaaaggtttgcactggggtggagatctccctttagcagaagggcaagctactctggaacgtgtcaaagaaacgttgcaacaagatggttgggatttctctcccgcacataccaaaattctcatgctgactcatcgacttttagccaatcagcaaggttactcaaatatagtagcaacgtttcgatataacgaatcttttacgaaaaaagaaaacgagcatatagccttctttatcgacaagcttgaacctgcctgcgacgcctttgaggctcgtaaatatggtgcgatgtttgaagtttttggtggcgctacaccacaattacgtagccattcagataaggaaagttggcacaatgcaatgatgcagttacttgctatacgcgaaacaggaactatcggtgaagtggttgaattcttgcgtactcatcgtaaacccagacttccagataatgttgaaaaacacgagcaggaattactcaattatgacaggactgctggtgcggaaataccccgaaggctaaaagaactggaaaaattgaaagatattccctattccgaagtaaagtcacttcgccgttatcttgatggtcattctccttttgagactaaacatggtgtgaaaggtgctgaatttgaaaatgtcttagtagttgttggacgagggtggaaccaatataactttggtgaaatgttgggctttgctggagagcaaatgctcccagcaggaaaagaagattcatttgagcgtaaccgaaatttgttttacgttgcctgctccagacctcaaaagcgccttgcaatcttgtttacacaagctttgtctcctgaggcacttgcaactcttgggaattggttcggagctgatactattgtgcctgcaccataa

SEQ ID NO: 98142 - DNA, 2073 bp, Enterobacter aerogenes
atgcgcattcatcaggttcagataaagaatttccgacttttagctgacgtggagcttgtattagaggaacagacgacagtcattgttggtcgaaacaacagtgggaaaacatcgctctcagagataatacgcagatttttaacagacggcagtgcgacttttcaactcgaagacttttccagttcttgctatgaccgtttttgtgatgcactgaaagcgctaaacgaaggggaagaggatcatgttattcgtgatctcgtcccagctattgagcttcgattgaaattccagtacgactccacgcaaccacaattaggcccattgagccccttcgtgattgatttggatccggcgtgtaccgaagcgctcgtggtagtcaggtatgaattgaaagatggccaactggcacggtttctcgaaggacagcccacagaaccactaactcaggagactcggattgccttcttccgggcgttacgggaacgtattcccaacgaattttgcgtaaaaatatgggcagaagatcccaatgatccagaaaatcgtcgcgagttacaatctagcgcactgcgcggtctggtcaagtcgggctttatcaacgctcaacggggactcgatgatgtgacatccagagaatcagatgtactggctaaaacggtagaacatcttttcgcaacagcgtcctcggcctctgcggatacagcagataagcaaattgccgatgcgttgaaaggtgcagttcaagatattcagactcagattgacacaaactttggtagccaactcaaaagcctgattcctgcgctgaaaacgtttggatatcccggactgggagggcaagaattacacaccgaaacattgctcgacgtgcgcaagttactatcaaacttcactaaggttcggtattcgggttatagcggtgtcacactaccggagtcgtacaacggtcttggcactcgtaatttaatatttattctgctgcagttggctggtttctataaggcatttcgcgcggaagttactgagccgggtgtacatctgatctttattgaagagcctgaagcccatctgcacccgcaaatgcaggaggtctttattcgtcaacttgccaagattgtgcaacaactggttgacggcactgaggacaggagcccctggcccgtccagtttgttgtctctacacactcatctcacattgccaacgcagctggtttcgagagcattcgctattttctcggtgctacagtgcagggaactcaggaaggagttcgtacaaccaaaatcaaagacttgcgtaaagggcttaggcatattccaacggaagatagaaatttccttcatcaatacatgacgctgacccgttgcgatctctttttcgcagataaagctattctcgtcgagggattgagcgagcgattattgcttcctgctatcatcaaaaaactagaatcagccgaaccagaaagaccgaagctgtcgaaccagtacgcaacggtgatggaagtcggtggtgcttacgctcatttgttcttcgagttattagcatttcttgaacttcagagcctgatcataactgatctggatgccgttctggctcctcggggtaaagcgtgcgccgttcatcttggcacatattccagcaatgcttgtttgaaagcatggttctctgaagatactcctttcacattagctggtttgattgccaggagtgacgatgataaagctcgtaatggaaatcgtattgcctatcaatgtgcagaagtgacagatggcccctgcggacgcacattcgaagatgcatttatccttgcaaactcggctctattcgggctggtagggagaaatactcaggaacttgaaatagaggcccgtgataaagcggctgagtggaaaaaatcagaatttgcattgaaatacgggattactgagacagaatggaacgcccccaaatacatcgtcgatggaattcgctggttagctggcagcaatgagcctatgacacaagatccagtattggcgcaggttgtagaggccacaactaatattgaagaaggagccagcgctgatgtctga

SEQ ID NO: 98143 - DNA, 2460 bp, Enterobacter aerogenes
atggcgaaacgtaatgacgaaataatccgttctctccctctttcacacatgatttaccgggacaacgagatcaatcgggagaaagctgaaaaactaattgtctatcattatccgttaagtaaaaactatcgctggaatgaatggcaaagccgaattgatgatgagttagccagtcgttattatccttatttgatgaaatctcataaggatcaatttggactatacgttgctttggactcagagcaagacaagccaccaataataaaaaatggtgatgggattattgttgagccaacgcgtgtccattacgaggctatgctgaatccagtatggatccgacttatcatgcgtaaagtctccgcctttggttcacattgcaaaggtagccatacactaggatgcccattactacagactgacgtctggaaaagtaagaatagttgcggtatcaatgcaattagtctggactgtcgcactcaacaaagaagcgataaaaatatcactgaggttatattatttcataaaaatgttccactacgtccagtcgatataaaagacgaatcatttaatattcatcaaccattatggatttatgataaaaataatgttcttgcccgctggaaagcggaaaaaacgacaaaacctaaatctcaaatttaccgggaagtagccaaaaataaagataaacgcaagctacgcccttttctcgatctttcgtcttcaacctcactcaaaaatagctggccttggatccttcaacccgttcaaaatgaatttattgagcaagcaagaaaatttggcttcgggttatctccagtagtacttaagttacgccctttaccgcttaaaacaaaattcaaaacagctgacaaggctaaattcccaagtgtacagcttgacaaagagataaaggttcttgatctacgtttttcgaaaaatgtatccccacaatacattgttaataacattcagtccctgctgaatgaaaaatatcctgatgcacacatgtcattactacctgatatagaaccggatcagattgtgaacatagaaattgatgcatcacagtgtctacttgttttgctggatcagactccgggtatcattgacgatcgctatccattgacacaaatattaagaacaaaagctgcctgccagcatattaatgttaatccttttgatctcacagtcgacccaattacggataacttactaatagaacagtctacccctgacggtgacacgaggcttattcctgccacagattctcgttactatgattatagtatcagtgattttgagaaaaaagcggttcaagaatctttggcacgtaatgttgaaattgtatataaagaattagccctgaagcatttgctgctatgcaatgagaccaaaattagtgtgacgcttccgcagcagaaggatctactcactagtagtctcgccgtaatcactaatggctgtttgtttactgttaaacaagaccgcccaataatattacctttccacccagctatgccagatgctgtttcagcctgtgataatatactctgttcatttgatacctctgtaacagcactactcgctttgcttaacgaaaagtggccttaccattatcgcccccaagatattacacaagggatttggaatgaagcagaaaagttgacccgatttgttaatcggttgacggtgataattcacaaaacggaagaagtgactatcctccttcaggatccacaatatggagcacctcatatgcttccggagaaattaaatgatttaatgactattctggattctcaacggcaacaactccctcttaataaatggttattacctgaaatgaatgaactaatgtttcatatagaccaacttactgaagaaggtgaattatccgatacaaataaaaatacgttacttcgcgaactagagttgttgtgtgacctatggaaatgtgctttaagaaaatattattctgacaatgaattcaatgtcacttatgatgttttaaaaaattatgttttttcccaatggcctgaaaagaaaaatgcgcttatggtggaagtcgctaaaaaatcagtaaaaagagccagtacatcattaatagcatcatggaataaattattatctcgtgtcttcgatttacctttaggcgatcctcgcaactggctcaagaacgtaccaggtattacacgactctggcatgatccagagcaaaattacgtcattgttggcagtctttcctcccctcaacctattattcaacgtcaacccagtattcgccaatggcatgcattgcagggtgaacttaattccgaacttcttgccggactagttgatgttgattgggtcagaatgaatcaactagcgggcaatccctgtgtggctacgcttgtgcgtcgatggaaggaatgtcaggttcagctgggtgatgtgcgtgatgtatcactgacagagtaa

SEQ ID NO: 98144 - DNA, 3900 bp, Enterobacter aerogenes
gtgaatccccctttactgcgttcctataatgccgttatcgaacatacgttatcccaagcaaaaaaatccagaacaacgaaacacattgccggtttttgtcagttacaggggcccacgggcagtggaaaaactagcgctctctaccgttctggcttcgccgataacgtccctccggcgttggagacaataaaaaaatcaggctctcaggccatactggttacccatcgctggaatatactccacgacatttacgaaaaaacaggttcgcatgaagacagcaatggaaaaccatttaacgttagtgtgctttatgcgcaggatgaacaaattgtttctgcaatcgaggttacgccactacctcatgagaaagatatttccgcagattcactccctgatccctttaattccatcaacgaacttgagggaaaaaacttatttgtcgacccagatattgcagacaaactgcgtaagaattgcaggaatatcctatatatcaataaattattgaaaggatacccggcacatttacgtgcagctatcgccagtgaaaaagaggcgttaataaaatcatgtgcggcagttgagatatcgttaattcaaaatatcaaattgctggaaaaagaagccaggaagcaaaaagaaaaatatggtgaagaacatgaactcttgcaggccgccaagcaacgagttgatgacttccgtcgtcatgcctgggtcagacgcattctgcccgccatagcctggcgcgacgaaaaacaacacctgctgattatgacaacccaaaagctcgtttcatcattttacgatgggcggcgcaaagtacgaatgtccagcaaagagctgcgcaattatgtcatttttattgatgaatttgattatcaggctgaggtactacaggaatatctggcgcaagctcaatgggttcaggaaccgcctgaatgcttggggcagttactcgaggggggacgcagattactgcaacgaatgcagtatgttgaaacagcacctgcaccgatgatccgtgaacgtcttgggacatttcttaacgaactggatgacgccttaaaaggaaaaaaaattgatttaacacatgccagatcgctagtaattcctctgcaaagatatctggataataaacccttcggtgaacattatttatttcgctccgatcaactggtaaccagtgagcgccttatcatgcgacaggctgaacatggctacgaaattatcagaccagattcctcatttcaggataacgatcaggctatcgacatcagtaattttttgcgcctgatggaaaagtttattcgaaagttcagtctgatgttaacggacctgacagccagcgaagatgaaacgtatgaatacatcaaaaagttaacccgacttctgttcgacccggttaatgactacagaccgtcatattatggttcaaccctgccaaatatgtctcggtttttgttaccacgtaccgatctgcctgaactgcgggaactaagaaaaagtaatattttgcccaatacacatgccagtatttttgggttaactaactggttgctgaaacaaaatgttgtggataccgatatcgatccattacgaatacagatcaagcgtgcgttcttgccaacaacagcagaaggtttactactgtcactagccagccgtaatctcgtttttgcactgtcggccacatcatatattgaaagagcctgcaaccactttgatgtccggtggataaactcagccttacgctatattgcagaagcacgtaaccctacagttacgaaaagctttctcggaactacttttgaaaaccgacctgattcctggtttaaagaaccgatgccctacgttcagaccgatgatgaccttcagttacaaaataccgcgattgaagaaatcaatagcagcaaggaaagcatcagaaagacacaactgaatactgagatccatgattttaatagaacaaagaacagcccgcattcagccgatcttctcgcttctctgccccccgattttttccagaatgatgatgaaccttcaacagatttcgaatcagagtatcgccagaatattctacttaaactgcttgatgtgctggatctagcaggaaaaaggcctcagcaccgagggcatctggcttttgttaattccatatcttatttaagaaaatggctaaccgctgcaatagcgacacaaagtagagattgcctcacatggttaaagctggatccgcctttatccgacaatcttctgctaaagaattttactgatgtatttatcccgttgactatacataacgagcccgcactaatctgtctgttaaccgcagaatgtcagaaaaaaaagggcttcatggatgcctatcaggctgcatttgcttcccgacgtattgttattgtgctgacacaaactgcctctgccaccaacggtataaatctggatttcagcctgcctgaatccgacaaaaatatggatttgacctgtttatatttactggaatcacggcatttttacttttccgctttccagaccagtgcagatagcaatgatgatatggcacatgcaggcttccagttacgcaatctggaaaagctactacgagcaggggaaatttcacgtaaacagcatcagcgcttcatcctgccactgatgttgaacaggaagaacgaaatctcccggttaaacggagagtataagagaaccagcgattatataaaaaatacggcagccaatgttcaacagcaggttggtcgtattgagagagcctggtgcgaagtacccaacgctgagattcaccttgatgctgaactagcaaaagacctgtcccgctttgcttcattacctatctatacatcaaatcgtcgacagctttcggcactcaatcgtcaattactggatacacttcgggagcgtgatgaactgacacagaataatttcttcagccagctcatgacgccgacacagcctggaaaactagcagtggattatatcgatcagcgactagttccggctattcggttgttacgggaacagtcaacaccaagagatgacatcccattactctggcgacaactcggtaaagcagtacttcaacatgatttagcctggaaaccgggaaaaaacgttttcgacattgatcttgaattatataaatgggcttgctttgaaaaaccgaaattagctaatactgacggcaaaatctggtactccccacagacatggcagttttttgacaaaacagcagaagggctgcgccaatacaaccctcagaaactgtatcagtatatccaacgtcatcctgtcattactgactggttcaaccgtaagggttacagaacgtctattatgcccttcgcgaacgatttggaagagcgttacgcattccatccactagttatacaacgcctactgatgggacgtctgggagaagaagctatccgggcacttctttattcagagagcatcattaccaccagccaagtgagcaatcaccggctttttgagcagtatgatttcagcattaaaaattctgattatcgtgtggatgctaagttttggagacaagatactctcgataaggcagatgaagaatatcaacaatggttggcatctggcgcaaatcaagagcatacccctctgggtctgagtaaaaaactggcacaaattcgcgctatcgagggtaataaaaccaaattggttatcgccaactttgttgctccacatgctgatagtcaattactgggtttctctcaccaattaacccctgttcaaaatccttatgaggcggacattctgattctcggcggatgcgtgaccccagacaccatttcagtggaaacacccggattcgggcaactcaaaaaaatcatcaatcaaaacattatggaaagagcataa

SEQ ID NO: 98145 - DNA, 258 bp, Enterobacter aerogenes
atgtatacaactcgcctgaaaaaggttggcggttccatcatgctggcggttcctcccgccgtgctgaaaacgctggagctgtcgacggacagcgaagtgggcatgaccattgataacggctgcctgattattgaaccacagaaacggccccgttattcgcttgaggaactgctggcacagtgcgatccgtacgccgaaatgagtgaagaggatcgggaatggattgatgcgcctacggtgggcaaggagatcctgtaa

SEQ ID NO: 98146 - DNA, 333 bp, Enterobacter aerogenes
atggacagaggggaaatctggcttgtctcactggatcctacagccggacatgaacaaagcggaaaacgtccggtacttatcgtttctccagcatcatttaataagttcacccggctacccgttgtcgttcccatcactagcggtggaaactttgcccgcgcagccggtttcaccgtctccctggacggtgcgggaacaaaaacaacgggcgttattcgctgcgaccaacccagaacgattgatatgggggcccggaacggtaagtgtctagaatgtatacccgaagctgtcgtaaatgaagtgctggcccgattggaagccattctaagctga

SEQ ID NO: 98147 - DNA, 2172 bp, Enterobacter aerogenes
atgtcatccgataattcattaccaaaacatcatttacataaatctgaattagacattggtcgtctaatcggagaaatattagatcatcggaaacttataataggtgttacatcaatatgtacgcttatagcattgatttacgtattgtttgctactccaatttacagagcaaacgcattagttcaagtagaacaaaaacaaggaaatgcaattctagatagtatcactcaagttttacctggagctcaaccaaaatcagactctgaaatatcgttattgcagtcaaggatgataataggaaaaacggttgatgatctaaatcttcaggcaaatatcaaaagggattatttccccttatttgggaaagggcttgcaaggattttaggagagaaacctggaacagtttttgttagtgattttaaagttatcccagtagatggcaaatacccgacactaaaactaaccgtaatagatgacaaaaaatacattattacggacggtaacaaagatgttactgggatggtcggtgacatggttgtcgagccgggttatacggtcaaagtaaatgaaatggatgccgagccgggtgcatcgtatactattacgtatataacaaaactggaagcaatttcaggtcttacttcgtcattagaaataatggatgaaggtcgagaaacgggaatgctgaatctgacacttattggagaagatcagaatcgtatttctgttatcctcaatgacattgtacaaaattatttagatcagaatattgatcgtcaagccgcacaaagtgcaaaaagccttgaatttcttaaaattcagttaccaaaagttcgagctgatttagataaagcggaaggcacattaaataaatatagacagcaaaaggattctgttgatttatctctggaagctaagtcagttcttgatcaggtagtgaatgtagataatcaattaaatgagttagtattccgtgaagctgaaatttcccagcgttatacaaaagaacatcctatttataaagcgttgattgaaaaaagagaaactcttaatcaggaacgaaaccgcttaaataaacgagtttcttcaatgccagaaactcaacaagaagttctaaggttaagtcgtgatgtcgagtctggtcgtgctatatatatgcaactgctaagccgacagcaagaattaaacattgccaaatccagtgcaatcggaaatgtaagaatagtcgatccagcaataactgagccaaacccagtaaaaccgcaaaagttagttataattgcactcgggtttgttatcggattctttatttctgcttgggttttattattaaagattattttgcgtaaaggtatagagtcaccacaacaactcgaagagttgggcattaatgtttatgcaagtgttcctatttcagaatggtttgaaaagagaaatgataagccgaagactataagaaataaaagttcgtcaaacaacgaaaaaattggattgttagcagtgcaaaacccagcagatttggcaattgaagcgataagaagtctaaggacaagtctgcattttgcaatgatggaagctaaaaatgatatcctgatgatctcaggcgctagtccaaatgcaggtaaaacctttgtcagtagtaatcttgcggcagttatcgcgcaaggtggaaaaaaagttctgtttgttgatgctgatatgcgtaaaggatatgcgcacaaaatttttgaagctaaaaataatgtcggtttatcagattatctttctggagcggtttccaaagagtcaattattcagaaaattagtagcgcaaatattgatttcattagtcgaggtatgattccgccaaatccttcagaattattgatgaataagagatttgacagcttgatggagtggctttcatcatcatatgacttagttgtcatagatactccacctgttttagctgttacagatccgtcaatcatttcaagatgcgtcggaactttgttaatggtcgttagacatgaattgaatactgttcctgaagtagagatggcaattcgtagatttgaaatgaataatattgaagtcaaaggggttattttgaatgctgtagttaaaagtgcagcaaattactattcctatggttatacgaactataattatgattatagtagtaaagaataa

SEQ ID NO: 98148 - DNA, 357 bp, Enterobacter aerogenes
atgaaaaatttgcagattaattcggctggacttggcgccttaataggacactctgctgatctttcggcgattcgggttgctgaaaaaaatggggtatcattagaaggacataaagggaaacagtttagctcggaaatggcgaggcaatatgatctcgtacttgtaatggataagggacatttggagcgtattagtcaaattgctcctgagattagaggcaaaactatgcttttaggtcattggttaaataaaagtgaaatacctgatccatacaagcaaagtgatgaagcttttgactttgtttacaagttaatagaacaaagttgcaaactttggattgagaaaatcataggataa

SEQ ID NO: 98149 - DNA, 399 bp, Enterobacter aerogenes; identical to SEQ ID NO: 98119

SEQ ID NO: 98150 - DNA, 1512 bp, Enterobacter aerogenes
gtgagcgagggcagtatcgttatccgcgacagcgcgaatcagcagcaggacgtgacggggttaagccgggatgcggcgcatgcgaaccagacgctgagtccgatatttgataaggagaaagagcagaaccggctggcgacggcgcagaagataggtgaaatcgggcgccaggtgagtgatgtgctggtgacgcagggcaagctgaacgcgcaggcggcgcagagcgacccggcggcgcgggcagcggcgcgggcgaagctggtagcgggagggaatggcagtccgagcgaggagcaaatcagcgcgcaggtgagccggacggcgacggcggactacgatacgggcggaaagtaccagaaggtggcgcaggcggtaacggcggcgatgcagggtctggcggggggcaacctggcgcaggcggcgagtggcgcagtgagtccgtatgtggcggaaatcattcacagccagacgacggacagcgcgacgggtaaggtgaatgtggaagccaatgcgatggcgcacgcggtgtggggagcgatagcggcggcatcgggaaataacagcgcgctggcgggagccgcgggcgcggtgagcggcgagctgctgggtcgctggatagcggcggaatattatccggacgttaagacagaagagctgtcggatgagcagaagtcgacgataagcgcgctgagcacgctggcggcgggactgatgggtgggcttagcggaggcagcagcgcggatgcggtggcgggtgcgcaggccgggaagaatgcggtggagaataatgcgctgagtgtgaatcagcttgatggttttgcgcaaagagccagaaactgcgagggtgccaactgcgagaacgttgtcagggatatgatcaacctcaacatagagcagcagcaagaaatagcaactctgtgttcaatcaaccctcagcaatgccaacagaagtatggttatttggttgagcagtgggaagtgtttgatgccacaatcaggcgcatggctgctgatggtacgctgacgaatgatttcaggtatgcgctggcaccagtttatacgctgagtcaggaagccggtggcatcatggcgagcgagggctggaaaaaacgctttgaggcgatgggaatcagggaggaattcgcaacggcgatggcggcaactctcccattagctatgagtggaacgaaaggagctaaagcatcaacaacacaagtagttactaagaatgttaatcctggctcattaataagcagacagaatagtaatgaaatgtcaggttctcaagtaaaacgcattgcaaaggatatgaaagcatatggctataaagttgatgagcccgttgatgtcgctattgtaaacggcaaaatgatcattatcgatggtcatcatagagccgaggccgcaagaaaggcaggtattaaagatatccccgtcagagttcaccctgttacaaaagagcaaggtgatcaattactgcgtgaagccgctgaagcaagggtgaggtactga

SEQ ID NO: 98151 - DNA, 501 bp, Enterobacter aerogenes
atgacatttaataaagaacaagactattgggctagttgctattacacggttgaatttttgcttattgaaactcaatctggtctgggaatggtcggcagtgatcctatttttcctcctcatctactacaagcaaatgcagatgacgaaagtgtggggataacgattttagcagcgttatcaaatagccgaactttatctatggaagagtatcgctctttttttgaccttgaaaaaggtaagcaacaatatgccgcctggactgcaatgctcatggaaaaatatggctataagaccaagaaatccctattcaaagatatgaaacattgttctatccattgtgttaatggtgttatcacaatctcaccgtcccgccatgaaaaactggaagcatggggaggaacagggtgtggaggacgtgataaagtcattttatccgtagagagttctcatgctgaaatcggtgctggtctcaggctggcactgagtcgctgtattggttga

SEQ ID NO: 98152 - DNA, 846 bp, Enterobacter aerogenes
atgcagtcgtgcagagctgcaggtggcgactgttcatccgttattgagaaatatcagaagatcagcgatgagagaagtgctgaactggatactaaatgcgttgcagatccggtgatgtgtcaaggctgggataaagaactggctcatggcggcattcaggcagtggagcggccagaatggatgggggatatcttcggtctggacgtcatgcgaagtgacgaagctaaagcctatgtccagtactggaattcagtagatctggcgaagatagacactaacagcgcagactgggcgaagttcgcagtatttatatctgacccggaaatgcaagctgcgctggtatctggtgggctgttaaccaaagatgtagtaaaaatggctgcttcgtttgtgagccgaaactcggcagcagcgacggtcagcgcttcaggaatagggttgaaatggggtcagggtaatatgaagcaaggaatgccgtgggaagattttgtgggaacttcacttcctgcagatgcgagattaccgacaggcttcaagacatttgattattacgatgccgcaagtaaaaccgctgtgagtgcgaaatcgctggatactcaaacaatagcgaaactgaccaagcctaatcaggtttattattcaatcaaaggaaatattgatgcggcagcgaaatttgaaagtgctactctttcaagaagaacgctcgattcttcgatgattaccagtaaggaggttcggttagctgttcctgccaatacgacaaaaactcaatggactgaaatcaacagagctgttgaatatggtaaaagtcagggtgttaaagtgatagtgacacaggtgaaataa

SEQ ID NO: 98153 - DNA, 696 bp, Enterobacter aerogenes
atgcagccgcgtgggctgccgtggccactggttgaccacgcaccccagatggtcgtcgcagaatttgtcaagcgcgcttttacggttgaacttctgggtcagccgcgagaagggccagacggtggccatctgaggccgaaagatatccagttcgctgtcttcgatcctttcctttctcaccgcatagcaaatgctgctgtaggttttaagcagcgcctggttgatacggtcctcaccgccgttggcaaacagctcgccgtccagcgagtagtgctcttcgccaatctccggaaagcgcgctccgcaaccgggaaagtagtagctgaagtaaccgtccgcttccgcaggcgatgtctgagttgtccagttggctgcatggtaaaggcggccaatattggtcagcggcggattacgcgaaccatatacctcatcggctccctcttcattacaacaggtaccgtcaaagaacaggctgatatgcaggctggcggggcagcccggttccgtttttttgtccgattgatgatgggactctttaacatacccctccaggtactgcctggcgtagttgccttcggtctgcgttctgctcgccggcaggcgcccgcgctcgttgtattcggctttgtgctgcacagagttatcggcaggcttttctccctttttatcatccggcccgggaaactttggcggtag

SEQ ID NO: 98154 - DNA, 645 bp, Enterobacter aerogenes
atgggcagtattgagtttgaaaagaataaaaatctcttctatgagaagatttttgttgatgctccctaccagggtggggctaaaaattatgtttcatttgatgagtttgatacatcaaactatcgagattttttcaattcaagaactagcattcgtgagtttgatgtcacttgtggtattgatacatcaacgatagtggaaattttagacattgcaaaaaaatgtccctcagcttgtaatagacaggctatgaagatattttattcattagatatagataagaactctgaattattatcctatcaaaatggaagtagaactttcagacatggcgtcccaggtttatttattgtttgttctgatacacgttttcaggaaggtgcagaggaaaggaatttgggcttcatagagggcggtatttggatattatcgctcgttaatgccctgcattataaaaaactaggggcttgtgttcttaattggtgtgtacgtgctaaacatgatgaattgtttagggagaaatataacatcccctcatattataatataagtgctttcattgcctttggcaaacccgtctatccacaaaaggcaccatattccattcgtcgcagtagcatcgattttcttgatgagattaagtag

SEQ ID NO: 98155 - DNA, 273 bp, Enterobacter aerogenes
gtgtgggtcaattcgcgtaagggccgcatcatcacccgcgcgcaagtcagcgaccggccgaataaaggcgcggtgtacatgacctaccagtggtggatcggcgcctgtaacgagctggtgtcggagaacctgagtccgataaccaaaacgccggagtacaagtactgcgcggttaacgttgagcggattgccgatcagcgcgcggcggaacagtacgtgatcgaggagtacaacaagctgaaagcccgcctgcgcgaaagcgcgatgggttaa

SEQ ID NO: 98156 - DNA, 978 bp, Enterobacter aerogenes
atgatgaccggcgatggcgataaaggttcctacaagcgtaacggtttcgacggcggcacccgtttccgctttgcggctgattactatctgtttgatgatattagctggatcagctactacgaattgggcgtgaatattccggcgctgttcgattgggacaatcactacgcggaaggggcgaacaataccacccgccgtatgctttataccggtctgaagagcgatacctgggggacattaacctacggtcagcagaacagtatttactatgatgtcgtcggcgtgaaaaccgatatctgggactacgatatgatcggtcaggctccgggtaacggtattaacggcgactacgatggttcttatcgttcacgcaatatgttgaaatataagaaaaccgtcggtgatgtcgatctgtacggatcctatctgtttgaagatagcgagtatttgccgggcgatggtctgcgctacaaacgtaaaggcggcgggtctatcggcgtggattaccacatcatgaaggacctgacctggggtaccgcgtggaactacacccgcgccgaaatgcgcgacccgtcaagctccgatagcaaaacctacgaccagaatattgtcggtaccgcgctgagctggactccggataactggaccttctccttcggcggcggctggtatcagaacttcctgactaccaagaaaaccaatgtgcatgattacttcgccggcgatgcctggggtattgaatactttgccggctataaattcccgatcaatcaatacgctgttaaatctattcagccgtactttatgggcgaccgtctggagtacgtgaatggccgcaactaccagcgtattgataacggtttgggtgttagcttccagctggattacggtttccgtgttgattacgagcacgtgtttacctccagcaccgatgatctgggcgatatgaacctggtgcgtctgcgctacgacttctga

SEQ ID NO: 98157 - DNA, 582 bp, Enterobacter aerogenes
atgaattttctcgcgcatttacacctcgcccatcttgcggatagctcgctgccgggcaacctgctggccgattttgtccgcggtaacccgcagggcgagtatcctgcggatgtggttgacggcatttatatgcatcggcgtatagatgtaatgaccgacaatctggcggaagttaaaacggcgcgcgaatggtttcgccccgagacccgccgcgtcgcgccaatttccctcgacgtcatgtgggatcatttcctgtcgcatcactgggcgcagctgtcgccggatctgccgctaaacgagtttgtgcgctacgcccacgcgcaggtagcgcaaattctgccggattcgccgccgcgctttgttaatctcaacgaatatatgtggtccgagcgctggctggaacgttatcaggatatggaattcattcagcgcgtcctgaacggtatggccagtcgccgcccgcgcctcgatgcgctgcgtgattcatggtacgaccttgataaccactatgggcaactggagcagcaattctggcgtttttatccgcgaatgatggagcaggcgaaaaagagaacgctgtaa

SEQ ID NO: 98158 - DNA, 735 bp, Enterobacter aerogenes
atgtcgcaaactgccacactgattctgacccacggtcagattcatacactcgaccgcgcgaacccactggcggaagccgtggccatcgccgatggaaaaattctcgcgaccggaagccacgatcgaatcatgacgttcgccgccgaggggacgcaaattgtcgatcttaaaggccatacggtgatcccaggtcttaacgactcccacctgcacctgattcgtggcggcctgaactataacctcgagctgcgctgggaaggcgtgccatcgctggcggatgcgctgcgtatgctaaaagatcaggccgatcgtacgccgtcgccgcagtgggtgagggtggtcggcggctggagcgaattccagtttgccgaacgccgcatgccgacgctggaagagctgaatgaagcggcgcctgacacgccggtattcgtgctgcatctgtacgatcgcgcgctgcttaaccgcgcggcgctgaaagccgttggctataccaaagagacgccggacccggcgggcggcgagatcgttcgcgataacaacggcaacccgaccggaatgctgatcgccaaacctaatgccatgatcctgtatgcgacgctggccaaaggaccgaagctgccgcttgagctgcaggtcaactccacgcgccagtttatgcgcgaactgaaccgtttaggattaaccagcgccatcgatgccggcggtggtttccagaactacccggaagattactaa

SEQ ID NO: 98159 - DNA, 762 bp, Enterobacter aerogenes
atggccgagcaggcgaccgggcagcgcggcaccgtcggtatgggcatccccggctcgatttcgccgtatagcggggtggtgaaaaacgccaactcgacctggctgaacggccagcccttcgataaagatctcagcctgcgcctcaatcgtgaggtccggcttgccaacgacgccaactgcctggcggtttcggaggcggtcgatggcgcggccgcgggggcgcaaaccgtgttcgcggtaattatcggtaccggctgcggcgcgggggtggcgttgaacgggcgcgcgcatatcggcggcaatggcaccgccggcgaatgggggcacaacccgctgccgtggatggatgatgatgagctgcgctatcgtcagcaagtgccttgttactgcggcaagcaggggtgtattgaaacctttatttccggcaccggtttcgccaccgactatcagcggctgagcggaaacccgttaaccggcagcgagattatgcgcctggtgggtgaaggtgacgaaaaggccgaactggcgctgagccgctacgaacagaggctggcgaaatcgctggcgcatgtggtgaatatcctcgacccggatgtcattgtgttaggcggcgggatgagcaatgtcgaacgcctgtatcaaacggtaccggggctggtgaaacagtgggtgttcggtggagaatgcgaaacgccgatccgccgggcgatgcacggcgattccagcggcgtacgcggcgcggcatggctgtggccgctgtga

SEQ ID NO: 98160 - DNA, 315 bp, Enterobacter aerogenes
atgctggcgggtcacgaagagagcggcggtaccgtggtggaagagaacggtgaaaaattcatgctgttttacggtatgagctctgaatcggcgatgactcgccacgtcggcggcgtcgcgaaatatcgtaccgcggaaggtaaaaccgttaagttgccgctgcgcggcccggttgataataccgcgcgtgatatcctcggcggcctgcgttcagcatgcacctatgttggcgcttcccgcctgaaagagctgaccaaacgtacaacctttatccgcgtacaagaacaagagaaccgcgtgttcaacagcctgtaa

SEQ ID NO: 98161 - DNA, 783 bp, Enterobacter aerogenes
atgcgtattgaagaagatctgaagctaggttttaaagacgttcttatccgcccgaaacgctctaccctcaaaagccgttctgatgttcaactggaacgtgaattcacctttaagcattcaggccagacctggtccggcgtaccgattatcgctgctaacatggataccgtcggtaccttcagcatggcgaaagccttgtccgcttttggaattctgaccgccgtgcacaaacactacagcgttgaagaatggcaggcgtttgtgcagagcgagtccgcagaagtgctgcagcatgtgatggtttccaccggtacctctgacgcggactttgaaaaaactcagcagatcctgacccagaatccacagctgaacttcgtctgcatagacgtggctaacggctactctgaacacttcgttcagtttgtggcgaaagcgcgcgccgcctggccacaaaaaaccattatcgccggcaacgtggtgaccggtgaaatgtgtgaagaactgattctctccggcgctgatatcgttaaagtgggcattggccctggctccgtctgtactacccgcgtgaaaaccggcgttggctacccgcagctgtctgcggtgattgaatgtgccgatgccgcgcacggtctcggcggccagatcatcagcgacggcggctgcaccatgccgggtgatgttgcgaaagcttttggcggcggtgccgattttgtcatgcatcggcgggatgctggcgggtcacgaagagagcggcggtaccgtggtggaagagaacggtga

SEQ ID NO: 98162 - DNA, 933 bp, Enterobacter aerogenes
atgatacctgcagcagaattatatccgcgcgatttgcgcggctacgcgggaaaaccgccgcacgcgcagtggccagaccaggcgcgtatcgcggtgcagtttgtgcttaattacgaagaaggcgccgagaatcacgtcctgcacggcgatgcgggttccgaacagtttctctccgatatcattggcgctgccagctatcccgaccgccatatgtcgatggactcattgtatgaatatggcagccgcgcgggtttctggcgtatccatcatgcctttcaggagcgggggttaccgctgacggtatttggcgtggcgatggcgctggcgcgtcatccggatatcgtcgcggcgatcaaagcggccaactacgatgtggtcagccacgggtggcgttggatccactatcagcatatggcgattgaacaggaacgtgaccatctgcataaagcggtgcaggtgctgaccgacctgtttggcaaaccgcccaccggctggtataccgggcgcgatagccctaacacccggcaactggtggtggaacatggcgggtttgattacgacagcgactattatggcgatgatttgccgttctggacggaagtgccttgcgccgacgggcagcgtaaaccgcatctcatcgtgccttacacgctcgatgctaacgatatgcgctttgccaccgctcaggggtttaataccgctgaacagttttatacctatctgaaagacagctttgatgtgctgtacgcggaaggtgaaacgtcgccgaaaatgatgtctatcggcatgcactgccggttgctgggccgccctggacgctttcgcgctctgcaacgttttctcgattacgtgcagcagcatgagcgcgtgtggatttgtacccgccagcagattgccgaccactggcggcaggtgcatccgtaccagccatag

SEQ ID NO: 98163 - DNA, 741 bp, Enterobacter aerogenes
atgtccaccatctgtatacaagtcatcaatcccaataccgatcccggtatgaggcaaactatcgccgaggcggcccgcgccgcggcgtcgccaggaaccgatattgtcgcggtctgtccaccagacggcgtgccgtcgattgaagggcattttgacgaagccatcgccgccgtcggcgtgctggagcaaataaaagccgggcggcagcagggcgtttccgggcatgttatcgcctgttttggcgatccggggttacttgccgcccgtgaactggcccaggggccggttattggtattgctgaagcggcgatgcatatggcgacgctggtcgctacccgcttctcggtggtcactaccttgccgcgcacgctgattatcgctcgccatctgctacatcagtatggtttccatgagcattgcgccggtctgcatgcgatcgatctaccggtgttggcgctggaagatggcagcggcgtggcgcaggaaaaagtacgcgcccgctgtattcaggcgctacagcaggatggctgcggcgctatcgtgctgggctgcggcggcatggcgaccctggcgcagcaactgacccgggaacttcaggtacccgttattgatggcgtcagcgcggcggtgaagatggtcgaatctctggtgtcgctaggcctgacaaccagcaagcacggcgatttagcttatccggaacgtaaaacgcttagcggtaaatttgccgtgtttaatgattaa

SEQ ID NO: 98164 - DNA, 564 bp, Enterobacter aerogenes
atgccaaatacacaaaacacgcatcagctcaacgccggagacccggcatcaggctacagcccgcgtctttgcaacgaggatctggcgccgacgcgcgagcaaaactggaactggtacaacattttttctttctggatgtcggacgtgcatagcatgggcggctatgtggtggcggcgagtttctttacgctgggtctggcgagctggcaggtacttatctgcctgttggccggaattgttatcgtccagcttggcgccaatctggtggccaaacccagccagattgccggcgtgccctatgcggtcatctgccgtcaggcgttcggcgtcttcggcggccaatattccagcggtgatacgcgggctgattgctttcgcctggtacgggatccaaacttatctggctgcgaacgccttaatgctggtgctgctgaagttctggccctcgctggcggcaatgacgcaaacgtcattgctgggtctttcatcgcttggctggatctgtttcgccaccatgtggctgttgcaggcgatggtgttctggcacggcatgagcgcgattaa

SEQ ID NO: 98165 - DNA, 501 bp, Enterobacter aerogenes
atgataacactcaaccactttaatcagctgccgcaggcgcaagccctgcgactgctcgaaccctgcgtggcgctccccgcctggcgcgaagcgctggcgctggggcgaccctatgccacactgacggccttaacggatcgcgcacaacagctgatgcagcactggggagaggcagatctggcgcgggcgctctgcgcccacccgcggatcggggaaaagccgacgggcggggaagcgcatgccgcgctgtctcgccaggagcaggcggaggttaatgccgacgatgccgctatcgcccgggcgctgaaagaagggaacgcccgttacgaagcccgctttgaccgcgtgtttctgatccgcgccaaagggcgcagcgccgccgagatcctgcaggcgctgacccaacggctgacgcataatgacgcgcaggaaattgaagcggcactggaacaattacgtgaaatcaccttactcagactggcgggagttattagcgcatga

SEQ ID NO: 98166 - DNA, 999 bp, Enterobacter aerogenes
atgaataaacacgtaacgggcggccaggtgctgaatctaccggctggctattttggtatggtgctggggataatcggcatgggcttcgcctggcgttatgccagtaccatctggccggtgagcagtattattggcgatgcgctggtggtgctggcgacaactatctgggcgctattaatgatagtgtttattgcgcgggctattcgtttcccgtggagcgttcggcaggagatgcgtcatccggtagccagcagttttgtcagcctgatcccggcgacaacgctattggtgtcgatcgcttttgctggctggtatcgcccgttgtcgctggcgttatttgctgcgggggttacgctgcagctttgctatgcggcctggcagagcgccgggttgtggcggggtaaacatccgggagaggcgacgacgcccggtttatatctgccgaccgtcgccaacaattttatcagcgccatggcctgcggcgcgctgggatttaatgatgccggactggcgtttctcggcgctggcgtcttttcctggctcagcctggagccggttatcctgcagcggctgcgcagcaacggcgagctaccggcggcgttgcggacgtcgctgggcatccagctggcgccggcgctggtggcctgtagcgcgtggctcagcgtcaatggcggcgacggtgatacgtttgccaaaatgctatttggttatgggctgttgcagttgctatttatgctgcgcctgatgccgtggtatctgcagcagccgtttaatgcgtcattctggagcttctcgttcgggatttccgcactggcgaccaccggcctgcatctgggtcacggccagccgcacggatttttccatactctggcgatccccttatttatttttagtaacctgcttatcggcctgctactgctgcgtacccttcttctgctggtgcggggtaaactgttaattcgcgtagaccgtgccactttattgccaaacaaggattaa

SEQ ID NO: 98167 - DNA, 291 bp, Enterobacter aerogenes
atgaagaaatatcgtctgagcgaccacgtccgcctgtatcactttgaagaagacggagttaaacatagcgtaactctgcggcaaatcgtggcgctgattgatttctcggacgttaaggccggtagcgaaggcggctggcttgatgatgaagccgcgttaagccagggcggcgactgctggatatatgatgccaatagcgtcgtcttcgctggcgcgcgcgttgatgacaacgcccgtctgaccggcacctgcgtgataagccacggggcgacaattaacgacaacgcctag

SEQ ID NO: 98168 - DNA, 774 bp, Enterobacter aerogenes
atgaaaataaaagccctaactctagctttgggaatgctgtgtaccgtatcaagctttgccgccagcgagttgcgctacggcgtggaagcggaatatccgccgttcgaaagccgcaacccggcaggagagctgcagggttttgatattgatctcggcaacgcgatttgtcaggccgcgcagttgaaatgcaactgggtcgaaacctcctttgatgcgctcattccgggactggtggcgaagaaatttgatgcgattaactcggcgatgaacattaccgagcaacgtcgcaagagtattgatttcacccagccgatctaccgtattccttcacagctggtgggcaagtccgacagcggtatgcaggcgacgccggaagggctgaagggcaaaaccatcggcgtgctacagggctcgattcaggagacctttgccaaagaacactgggaaaaacacggcgtcacggtagtttcctacaaagaccagaacatggcatgggccgatctgcttaacggccgtatcgacgcctcgctggtgatgtctgccgccgggcaggccgggttcctcagtaagccgcagggtaaaggattcggttttatcggtaagccggtggctgatgatacgattctgggtagcggtattggctacggcttgcgcaagggtgatgaggcgaccaaaaaacagctcgacgcggcaattgataaagtgcgcgctgacggcactatcacccgtctggcggcgaagtacttccccggtatcgatgtcagtgtgaaataa

SEQ ID NO: 98169 - DNA, 306 bp, Enterobacter aerogenes; identical to SEQ ID NO: 76375

SEQ ID NO: 98170 - DNA, 585 bp, Enterobacter aerogenes; identical to SEQ ID NO: 76377

SEQ ID NO: 98171 - DNA, 150 bp, Enterobacter aerogenes; identical to SEQ ID NO: 76378

SEQ ID NO: 98172 - DNA, 186 bp, Enterobacter aerogenes; identical to SEQ ID NO: 13758

SEQ ID NO: 98173 - DNA, 927 bp, Enterobacter aerogenes; identical to SEQ ID NO: 76379

SEQ ID NO: 98174 - DNA, 630 bp, Enterobacter aerogenes
atgcaaggtgtcgtagtgattaaaaagataatagaggaatatcttaagcaaatacacgcagataaatattcagtaattacgatcaatcatcttgatgaggtatcgattatctcaaatctgccatatcactgggcgcaggattttataaaaaggaaattgcatttacgaagccatatcgtattaaaggcgaaaaataaaataacacctttcaagtggtcctcggtaaatacagctaacgaagacattaaattcatgtctaataaatatggtattcgcaatggagtaagttttgtcataaaaataaattataattctgttatttttactatttattttaatgatgatgatgattttattaaagtgtacgccagtgaaaaacataagatattgtttgatgtactgagcatttttgaacatcattacaaacaaaaaataaaatatacttttacaatacgggaaaaggaggttatgaatttacttaaatttggtaaaacttacacagagattgcactgattcttggtgtaagtgaaagaactgtcagatttcacattaataatgtcctcagaaaactggatgtgacatctgtccgctatgcgatttttaaagctacatccgaaggtttgatctga

SEQ ID NO: 98175 - DNA, 930 bp, Enterobacter aerogenes; identical to SEQ ID NO: 13755

SEQ ID NO: 98176 - DNA, 720 bp, Enterobacter aerogenes; identical to SEQ ID NO: 75894

SEQ ID NO: 98177 - DNA, 1167 bp, Enterobacter aerogenes; identical to SEQ ID NO: 75895

SEQ ID NO: 98178 - DNA, 699 bp, Enterobacter aerogenes
atgatgaatctgaaaaaaataaaattatttgccattgacagtgatggcgttattctgaatgacacgtacagcccggcgatcaaaattttcgtggaatcttttggcgttagctattcaccattaattgagcgcagtgtttggggatcaccacaagtgacagcagggcataacctcgctcttgcctgtaaattaccttattcgggtgaaaaagtcattaaagacttttttaaaaccagagaggaatacctgaaaaaacatcctgttgaagttcttcctgacattgaatcaacgctggctttgctaagtagtactggagcacgtattacctgctacggcggaagaaataaagagtacagcttcgataggtttttaaaaccttttgaaaaatattttgataaggaaatgccctatattgatattaactctttccgcccgggtgtatatgaaatagtcaaagaaaaattcaaccttaattttgatgaggttgtttttattgatgacatcaatcgagttgctgaagtttgcaaagcgttaggtactgggtttatcggggttcctgcatccatggctcataactatcagcgagaagaaatggtcagaacaggtgtaaagtatatggtaaatcgttttactgatattacagataaactcattcatgaagttgacgaacatctggcttcgtcagacctctggaaataa

SEQ ID NO: 98179 - DNA, 1131 bp, Enterobacter aerogenes
atgactagacttgactcgcgtctgcaaggtctgaaagtctcatggtcttgtcctgttcagaatttcgcccctgcacagcatatgagtaaatctttgatctggcgaacagacccttttattcaatatgccctgtatgcagcctgtaacgctgttgaagatgcaggattaaaaaaggggtatggagggctgaagacaggcatcgtactgggcaattctcttgcaggcataagctctttggaaaccctgaataaaagagccttccaagaaggaacagcaacaattgggtcactgtatctcttgtccacaatgggcagcatggcaacaggaaatatagccattgaacttggtatacatggaccaacttatcttacgggtacagcatgctcttccggagcagatgcaattggaacagcaagtcgtcttatcgagagcggagaatgcgatattgttattgccggtggcagtgaagcgccgattacaccactggttgtttcgtctttcacgaaactcggtgctctttcaaaaaatactgatctgccgcatgcgtcacgtccgtttgacaaagaaagggatggttttgtcatctccgaaggtgcggcgatgatggtattagaaaacgaaaaaacagcgatggagcgcggtgccagaatttatgcaacgttatccggatacggatcagccaacgacgcgcatcatattacttcgccagcaccagatggttctgggctatctaaggcaatttatagagcactggaagatgcttcgttatcatcgtgtgatattcagtgtattaatgctcacggcacatcaacaccactgaatgattaccttgagggaaatactttatctgcaatattccctgatcatccttgggtgacatcaacaaaaggtgttaccggacatagtcttgctgcaacaggtgcaatggaagctattttttcagtcttgaatattatacatgatgaaatcactcctgttgctggcttgaaaaatattgatgaagcaataaaaataaatattgtaacggaagttattaaaggtgcaggcattaaaaatgtactcagcacatccctgggatttggtgggcaaaactctgctcttatcttttctaaatacaacaaaaggttataa

SEQ ID NO: 98180 - DNA, 225 bp, Enterobacter aerogenes; identical to SEQ ID NO: 13750

SEQ ID NO: 98181 - DNA, 1035 bp, Enterobacter aerogenes
atgaaatactattcctttgcaaagtttcaaacgccacatgtcctcctgccatataaagaagacatcctgtcaaaactgacagttttatttatcagcaggaggtgtttaataaatattaactcagggggtaccgtgaaaagaataaaagatgctaaattatatacacacaaatttcatgaaagtgagatattcataaaaaatacctcacggatttctgacaatcattttcaagctaacttcaggctaattaaaaatcatgggttttattctgattttctcgcctgtcagtccaagattaatccattttttttactggaatgcgcgaggcaggctgaaacagtattatcgcatacggagtttgctatagcggtagacagtaagtttttgcttgacaggtggtccataacatattacccaacagggtttgatgatacgggaacattaaaagctgatgtctacacaaaagaaccaacaacaaagaaaacaaacaaaaatacgtttaacattgtttttaaactaaaagaaacagttatcggcgtggttaaaattgaggtaaggtacataacaaattcttgctataaacgtattcgaagaatcgctaatgggaacaccttccctaaaatttcaacaccactattacctgctacggtctgtttcacatcgcaggaaaatgtggtgctggcagatctaagtgatgaaggtccatatgttaaagcaactatttatattagtaacgataataaatcacttaatgaccatgagcaagatcatataactggaatgaatctaactgaagctgctaaacaaatatgctatagctacatctccttatacatgaaagaaaaaaacaactgctatattccaataaagctggaagcaaacttttacagttatgtagaaaagcatatacctgcagttttagttataaaaaaggtaacgttacaggacaacctttacttatttgatgttgatataatccagaatgagaaaacactggcaaccgttaatttaaaactaggaggagaatatggataa

SEQ ID NO: 98182 - DNA, 204 bp, Enterobacter aerogenes; identical to SEQ ID NO: 75900

SEQ ID NO: 98183 - DNA, 1272 bp, Enterobacter aerogenes; identical to SEQ ID NO: 4887

SEQ ID NO: 98184 - DNA, 282 bp, Enterobacter aerogenes
atggacacgaaagcgaaacgggggcccgttggaaagctggcgttatgggctttttacgctttttgcgcttactttgtgtgggcgatggtacggtactggtggatagtggggcggattcaaagtgttcccggcgccagcattgatggtgaatggggatcaacggcgggcaaatggattggcgcgctgctgggttttttggtgctgggggcagtggggttaatccttggggcgatagcctggtacacgcgtccccctattcaggtacatgaacagcgcgattaa

SEQ ID NO: 98185 - DNA, 297 bp, Enterobacter aerogenes
atgaatgacagcatcctggttacaagcgaaatccttgcccgttacaaaatttcccgaagcacgctctatttctggagcactccatcccggatgccatcgtacttttctcagccgtttccgaaacccaaaataaatggcagccctaaaagatggcgtttgtcagatcttcttgcctgggaagacaacatgagtatcaaaccagaggctggccaatcaacttctcaagatgacgctgccaaacagctagccaatgacgctgatcatccaaataatcgtggaggttataccgcgccatga

SEQ ID NO: 98186 - DNA, 612 bp, Enterobacter aerogenes
atgaatatgaaaactgaaaaaaacgtgatgatggacagcgatgaagcggccagcatccagactgtaactggttgggtagaccgccacggtcgtttctggggcagtgacgagcaccaggcgcgttggtgcggcgccactcatcgcaagtgcaaaaacaaacctgacgaacactctattcatagcactcatggctattgcgaagaatgccaccgcgaaagccgccaggctaagttcgccacatttgagcgcgcggtatggtccggagagccgctcgttatcttcgacagtgaccagtactttttcgacgttgaatcgctggccgactattgctatgagcactcactgctgccgagcgagttgcagttaatgatctgcgaacctaattacccgcccgagttcgacctggaacagcactgcgaagagatcatgcctgatggcgaagattactattgtttgccgcaaactgtgcgcgatgctgccgaagctctgaataaggctcttaaggaaagtgctccagtatcatggagcgccagcaaccgtgtggcgatcgtctcagacgacatgctcaccgacgagcagaaggccgaaataatggcggagcgcgccgcatga

SEQ ID NO: 98187 - DNA, 177 bp, Enterobacter aerogenes
atgggtctggtgcgttttcgcgaatacacgtcgaacgccaagcgatatgaccattcttacccaagcctagcgaacgagatttccaccagtcataccaagactgatcatgcggctggtcacttcccttttctctcacaaaccaatgattccgcttcgagcgcttacccatttctttag

SEQ ID NO: 98188 - DNA, 543 bp, Enterobacter aerogenes
atgcaatcacttacgtatcaccacaataccggattcgttccggccgcgatgataaatcgcgctcaaacaaaacagggtcacgatcatgagctgatccgcgatgcagtaagagcctgggcgtcggctatcgacaatcaggacgtggtatcagctctgattatcaacgagtaccgggagcagggcggcgattcaatcagctttcctgacgatatcagtcgtgcccgccagaaactttttcgcttcctcgataaccggtttgattcggatcagtaccgcgagaacgttcgccagctgactccggcaatcatggccgtgctgccgctggagtaccgccaccgacttcttccagaagacagtttcatgtcccgcttcgctcgccttgagaaggaaacgagcgaagcgaaagtggccgttgcgatgaacgccccgcgccatcaaaagctgaaggagctgagtgaggggatcgtagagatgttccgtgttgacccggaactgactgcgcctttgatggccatggtcacgtcgatgctgggggttatgtga

SEQ ID NO: 98189 - DNA, 750 bp, Enterobacter aerogenes
atgatccccgagattagttcgttaatcacctctggcgcgctgtttgtctccaaccattcaggcggaaaggatagccaggcgatgctcatcaatctgcttgaggtcatcccgccgaagcagatcgtcgtcgtgcatgcgtcgcttggtgcgatggaatggccaggggcactggagttagccaagaagcaggcagaggccgcggaattaccgttcatcgtcgcccgggcacgcaagaccctgctggagatggtagagcgtcgattcgagaaccgcccggaggtcccgagctggccttctgccagtacacggcagtgtaccagcgaccttaaacgcggacctatccagcgtgaagtcaggcgctatgcgaaagctaatggtttcaaactgatcgttaactgcctcggtctgcgtgcgcaggaatcgccaggacgcgctaaacgacaggtattcagacgcaatgacaccgactctaattccgtcctgacctggtacgaatggcttccagttcacgaactgaaagccgacgaagtattcgccaccattcgcgaggatggccagaagccacattatgcctatgagctgggaaatgagcgcctcagctgtgtgttctgcatcatggcgagccgcaacgatctgaagaacggcgcaacgcatcaccctgaactgctggagcagtatgcggagctggagacacgcactggctacaccatgcacatgaatagaattccgatcaaggagcttgcagcatga

SEQ ID NO: 98190 - DNA, 255 bp, Enterobacter aerogenes
atgggactgaaattacgattagaatggtttaataagcaaacagatttattagttggcaaagagtactctaaggattttggtgatgatggttcggttatcgaaagcctaggtattcctttaaaggataatatcaataatggtggttttgatttagaagagagttggattccattattgcaacctcattttaaaaataaaattgaaactgataagaatctataccagatttcatttgattatcgtgacagttggtaa

SEQ ID NO: 98191 - DNA, 690 bp, Enterobacter aerogenes
atgaacacccaataccttgagtatgttcgccaccagctgatagtggccaccgccgatctgagcggtgcgacgaaagggcaactggtagcctttgcagagaacgcacaattcacagcgacagcgcgcagccgcggcagaaagaaagtcgccgatccggtctccggccgcatggtaaacccatccaccccgccaattccagggcagcagtcccgtgcaaaaggctccgcaattgccctggtgcggcccgtggaatattcaactgcatcctggcgccgcgcggttctatcgctggaagagcatcagaaatcctggctactgtggaactacagcgacaatatccgttgggagcatcaggagacgatcacctggtgggcgtgggagcaattcagccagaagctggccggcgtgcgcattgcaaagaaaacggtcgatcgtctgcgtcagcttatctggctggcagcgcaggacgtcaaagctgaactgacagggcgcaacacatacgaataccaaatgcttgcctccctgatcggagtgactacgaagaactggtcagaaacgtttacggagcggtgggaggagatgaaaagcactttgcggcgccttgatagcgattcgttattacaggttgcgcgaacacgttcacaacaaaaggcgacaaatttagatgtaagtcttgcaaaactggattga

SEQ ID NO: 98192 - DNA, 675 bp, Enterobacter aerogenes
atggacattgtgaacttaattgaattgcttaaaccagcagatcatttagtgactgtaaagcttatgaatgattccgaaccgttggatgaagttggtaaatttctaatatctatattgccagcaatagtatcattagtagcattgtatttttcatatatacagtttaagcaaaatttagctaatcaaactgaaagttttaaaataaatgccgaccaccaaattaaaattgctgaattgaatgctaagttgaatactgaagtggaacttataaagtcaagatgcgattcaattcgtcaattatgtgttgaatgtatgactcacgcatctgatctatctgatttatgtgataagctaaaagagtatgaaaatagttttggaaacgtgtttaaatctacctcatcctataaagaggggcatgcagagagggcatctagacgagatgaaaaattcaacaaacttttcgcatcacaaactttactctacacatacatagatgctgataaggacccttctttttactcagcaataaacaatctgtgtaattatgagaagatatcaaagtcttccggtgctgaaatcggagcagcaagaggcaccttactagctgaatgccggatatatttaaaaaaacgggatgaagaaatatctaaattaattaggttatcatcacaataa

SEQ ID NO: 98193 - DNA, 276 bp, Enterobacter aerogenes
atgacgctggagatgatcgtcggccttgctgcattggttatctctgctattgctggcgcttttggcctgggacatattcgcggtaccaacaaagcagaagcgaaagccgagcagcaacgtattgaagataatgccgccagcagcatcgccggcgctgaacggaaagcggaagttaccaaagaggccagcgatgtacagcagactgttagccatatgcctgatgacgatgttgatcgcgagctgcgcgaaaactttacccgccccagtggtggttga

SEQ ID NO: 98194 - DNA, 528 bp, Enterobacter aerogenes
atggatcaatacgtctcgctaatatcttcattaatcggagtgcttggtactctaggtggcgcctggattgctaatttatatagtgaaaagcgttttacagctcaagctgttcttgataaaagcattcaaaatacaaagttaattactagtaaagctgaagatctctatcttctattaaccatttggcaaaagtttgttttcaattatcagagttaccaggtgtctcttgttaagggagaaataacaaaagaccagtttcatgattttttatctagaactagtgctaaagagacccatgatcgacttgatactttgctaccgatttatttccctgagttaacgcattatatgaaaaaattaagagaagatattgcgttaggaaataaagcttttgactcttatgacaagcaggaattaagtaaatcagaggcgtacaaattggtttatgagtcgatgatgaacactgctgattcatttgaagaattaaaggaggcattaagtgcccgagtacatgaatttattaaataa

SEQ ID NO: 98195 - DNA, 237 bp, Enterobacter aerogenes
gtgcccgagtacatgaatttattaaataatactcatttatctgctttcaactatgggtgtgacacagacatggtaaaagaggcgatttattttatcccaagcagcgaacccaaatatcaaatcttcatccagcagaatggaagaatcggcacagattgcatagttgtagctaaaactatcaaagtgggacaggaagcgaccgaagcgctggcgctgtttgataccaccactgagtaa

SEQ ID NO: 98196 - DNA, 288 bp, Enterobacter aerogenes
atggataagatttttttaaatgtgaaggatggacaagatattgcttttatcggtaaagaagttgctcaccagcatgagcctgaaaaagacgtagcttttcgagtatatgagacggagaaaggtcattgggtcgtgacgatcacgtctaacgaaaacttattgctaaaacatgaagttatcaataataagtctgttgaaaagcttgttaagacccttggatacactgattgtgctaaatccatatactctaaactcggtgttgatactacgctaaacttaaacatctaa

SEQ ID NO: 98197 - DNA, 363 bp, Enterobacter aerogenes
atgtcttcggtttccaattggtcttataccgcgacagcgacaatctggcggcgcatacgcgatgctgacggtagtgataccgacggcggaggtcagccgtatggatgggagccgccgatcgctattctctgcgactaccagggcgggctctcagcgaaaatcggtgaccttggccgggagatcgtggttaaaaacacgatatggacagagtatgcaacggcgcgggaaggcgattacatcctgattggcgcatcaaccgatgcggcgccaccggatgaagctgatgagatacggcagatcgtccagttcgccgacaccttcgagcgactggcggacgatttcgcactgattacgggagtctga

SEQ ID NO: 98198 - DNA, 369 bp, Enterobacter aerogenes
atgggcgtaaaagtgagaggaatccgccaggccaaggccaacctcgatcgcatcatcaaagacgtccaggggcgtaaggccgtgcgcgcaatccagtcggcgatgcttattggtagcgcacaggcggcgctttataccccaatcgacacttcgacgctgcttaacagccagtaccgggaaatcattgctcggggtgttcgtgttactggacgcgtcggctatacagcaaactatgcggtgtttgttcatgacccggcagtgcagcagaccttcaggcgttcaacggcgagaaaagagttcttaacgaagggcttcgaagatacccgtagccagatagacgctgcggttaagaaggagctttcgctatga

SEQ ID NO: 98199 - DNA, 384 bp, Enterobacter aerogenes
atgacacctccgatgtatatgcgcctgaaggatctgtttgagagcgaaggtctgactgctggctttaaggttcaatggcggcagtggcgcgacaccgggaaagatgttgaccagttcatcgtattccggccttccggcggtacggatattacttatgacctcggcggcgactggtatgtgatggtcgacgtaatctcttcgaaagctgatcccgatgctgctgactccgcggttaatgccatcgttgaatatattagtgcgcaatccggggctgatgattgcgtaggagcgcttaggcttgtcggcaatgtcccggcagctataccaaccgaagagggccggttagtaacccggctgcttgtttcatgtacatacggcgagtga

SEQ ID NO: 98200 - DNA, 765 bp, Enterobacter aerogenes
atgcagggctgccagaatgataccggtaagctaatcggtaaggttgcggtgctacgtatggcctatggctgtgctgacacccttccggcgctttcagaatggaagcgtctcggggctatgaccacaaaaggttttgactactccatgaataccgtcaactctgaagctgacgatacgaaaggactggttgagaacctggtgaataacatggacttcaccatctccggtgaaggtgaattccgtaaacaggacaaaacaactgagatcggcgccatcgctatttcgaaatacattttcgacgaagtgcaggctggccggcagccgacgatttgggtgcgctttgacttcaccggtgaagacgctggcacttatatcatgggctacttcaacaccacctcctggtctggtgatttcggtacctcggatatttccaccttctccggtgagtggaaagttgctgatgctgacaccgtggtatttgaggtcgctccgccggcgctggcgtttaacaccaacctgccgacgaccaagagcgtggcggctggatcggctctgaatatgtcggtagtggttgagggtggcacagcaccttacacctacgtctggaagaaagacggtacggttgtcagcgggcaaacaacggcgaccttcaacaaggccagcgctgtttccggtgatgccggggcctatacctgtgaagttaccgattcttccgcgacaccagtcacgatcacttctgcatcctgcgcagtgacaatcagctaa

SEQ ID NO: 98201 - DNA, 705 bp, Enterobacter aerogenes
atgaccccgattaaagaattaggcgaatgcgttatcggtaccgatgaccgggaattctttttccggccgtcgtttcgcaacatggcgcgaatcggtgagccggaggaaattgtccaggcgttctatgacctgtgcaatgacgaggcgacgccattcgcacagcgcgcagctgaggcctatatccgcgatgagtacagccgccttcctgattgcgtcctgcggtttatgcaaagcggccttctgtcacgtaaagcgattatggcggctcacacggtgctgacagcctgctgtgacgatgatatcggcgatctggttggctggatgaagccagcaaaatcacgtaagcgtggctttgtctggcgcccgggcagcatgccgccggaaagtatggtcatcgtcgcgcaaaacctgatgatgcacggcatcatcggcaaagcgaaggtgcgtaagctgcaacgctacgagtcgaatgaaaccacctccgaatttcgcgcgaccgattacatcatggctgcgcgcaatcatttcggaataagccgggaagaggctgaaaacctcacaatgactgagtttgccttaatgcttaatgcgaagtacccgaaccagaaaggatttacccgggaagagtacgatgcagttatggatgatgatgatcggcgttggcaggcaatgatgcagcaggaacaagttagcaaagccagataa

SEQ ID NO: 98202 - DNA, 342 bp, Enterobacter aerogenes
atgacagaagaagagtggctcgaggggcttcgggggttgcctgatgatgtgattctaaagatccactttgaccttcaagagaaaattaagaagcactataaactgcgcgatacaggaaataacctcgagcaggccattcattactgtcagcagcaaatagccctcgccccattagctatgtctgccatgaagaacaatcagggcatgtacgataatggaaaattctttgctcctggccatcatggttataggcaatacacgacgattcttaagaagcggaaggaagcaaaggtgttggaagatcttctcaaaaagaaaaaggcggaaggatgggcagactaa

SEQ ID NO: 98203 - DNA, 405 bp, Enterobacter aerogenes
atgaaaaaggttttgatggcggtagtattggccgcttcgtcgtttgtcattgcaggctgcgcacctaagccaccttctcaagtggaaatatccactgcaaattacggcactttgccgaatgactatcagcaacaaattaaaaatcacatggcatctattctgaaagacccggagtctgctcgatatacgtttgaacctcccttcaaaggttattcgcaggatggctccttttcttcgacgagtggaggcgtgacgtatggccaagttgtcggtgtgcaggttaatgcaaaaaacagttatggcggatacacaggaaatcaactttatgtgtttatgttctctaatggggtgatgtatgactccacagcaaacttccagtttggaagggttaagcgagtcccgtaa

SEQ ID NO: 98204 - DNA, 123 bp, Enterobacter aerogenes
atgtgggacgtctatcaccgtcagcagcttgaagaagccgaactggaagaagatgacgaagactgggatgacgactgggacgaagacgacgaagaaggcgtcgaattcatctacaaacgttaa

SEQ ID NO: 98205 - DNA, 405 bp, Enterobacter aerogenes
atgaaactgcgccatctggaaatcttctacgccgtgatgacttgcggctctctttcacgtgcggcggaatcgctgaatatctcccagccggccgccagtaaagcgttaaaaaacgccgagcttaagctcggttttaagctgtttcagcgggtacggggtaagctgctgccaagtagcgaagcgctcacactttttgaaaaagcgcagagcatttatcaggatctcgataacctgcgcctgctggcggataatctggcccgcgatccgcgcgccaaaatcaccttaggctgtttaccaagcctcggattaagcctggtgccggagctggtgaccgatttttatcagcaaaacagtaatctggtgatgaccttaaccaccgagcatactgagacgttggtcaaataa

SEQ ID NO: 98206 - DNA, 1023 bp, Enterobacter aerogenes
gtgggtccggtaatgttggatgtcgaaggttttgaactggatgcggaagagcgtgagattctggctcatcctttggtcggcggcttaattttgtttacccgcaactaccacgatccggcgcagttgcgcgaactggtacgccaaatccgcgaggcctcgcgtaatcatctcgtggtggcggtggatcaggaaggtgggcgcgtgcagcgctttcgcgaaggttttacccgtctgccggccgcgcagtcttttgccgcgctgctgggggtggaagagggcggtaagctcgccgcagaagccggttggctgatggccagcgaaatgattgccatggatattgatatcagcttcgcgccggtgctggatgtggggcacatcagcgctgcgatcggcgaacgctcatggcatgaagacccgcaaaaggcgctggtgatggcgcgtcatttcattgacggtatgcatgccgccggtatgaaaaccaccggtaaacacttcccgggccacggcgcggtgacggcggattcacacaaagagacaccgtttgatccgcgtccggcagcggaaatccgtgctaaagatatggcggtgttcaagagcctgatcgatgaacaacgcctggatgcgattatgccggcgcatgtgatttactctgacatcgatccgcgcccggcgagtggttcagaatactggctgaaaacggtgctgcgcggcgagctgggctttgatggcgtcatcttctcagacgacctgtcgatggaaggggcggcgatcatgggcagctatgctgaacgtgggcaggcatcgctcgatgccggttgcgatatgatcctggtctgcaataatcgtaaaggcgcggtgagcgtattggataacctgtccccgatcaaagcagagcgtgttacaaaattgtatcataaaggttcatttacccgtcaggaactgcgagattccgctcgttggcaaacggtaagcgcacagctggaacagctccatgcgcgctggcaagaagcgaagtctgcgtag

SEQ ID NO: 98207 - DNA, 246 bp, Enterobacter aerogenes
atgaacaagcgcctctggctgctcaatcctctgctgctggccaccgccctgccagcctttaccgcgcaggccgccgatgaagacgatattatcgtcagcgccaaccgtaaccaccgtaccgtcgccgagatggcgcaaaccacctgggtgattgaaggccaggagattgagcaacaggttcagggtggcaaagagtttaaagatgtcctcgcgcagctgatccccgggatagatgtcagcagctag

SEQ ID NO: 98208 - DNA, 558 bp, Enterobacter aerogenes
atgctaacagtgctgttttacgtgctgttgggtttgggcgcagcacactttatatatgagcggattatcttaccatctatccgtcttcactatagaaatcaactttttgcactacgtgacgtagccagagaaagaattattgatggtggttcagaatcttcagtacaagcggctacgcttgttcatgattcactaaacaacgctatcaacaggttacacttactcacgttgccgaataagtttcgagctcagaaacgtgttgctgaagagcctacaattaaacagcgaatcaagcgtgaggtagacgttttcaagcgttgtgacgatgaggaaatcgttaaggttttacttaagtctggtcaggtgcttgagaatgtactgtttttcaacagccttatgttactgatttatctgctgccattcgtacttgttggtgttttttgcgtcaaagtagtcaagacagcaagcaccttggttcaatgggttaaaggccgggagctggaggaagttattatgttgcttccagaccctcaagttaagcaggttgtatacgcataa

SEQ ID NO: 98209 - DNA, 441 bp, Enterobacter aerogenes
gtggatagagagttaaacgagcaagtcatgattgaacgggtcgagatgattgcgcgtctgacgacagagggtgtttgtcaggaaagagatcgtgaaattgctttgaatttaattgcggaaattgcgagagggaacttgctgaaaaacaactctttttcagttgttttcgctcccgctcctgttgaacaaagattaaaaaaagggggcgaagtgagggttaacatcacgttggataaagaccaaaaaattgggcaacaagttgttgatgcttttcagtgcgaattgacccgacgggtgcaatcaattttcccatcaacgcgagtgacggtaaaaaaagggtcaatgacaggcgtagagctggttgggttcgaccaggagtcagaccgtgaagcgttggacagtatccttcaggaagtatgggaagacgaaagctggcgttaa

SEQ ID NO: 98210 - DNA, 282 bp, Enterobacter aerogenes
atgagaaaaacacatcaactaaaaattaggcctgtgttttttcaggctgttatcaatggaacgaaaaaagccgagtttcgccgtgctgaccgtgcttttgctgtgggggatttactttgcttaaacgagtatggagcctgcgaatatgacccaaaaaaggttggttttaccggcgcttttgtctacgtgctggtgactcatgtaactgaccttagcgagtgggctcccggctatgtgatgctaagcatacagcgcaggcaaatgggggatttatgcgggtaa

SEQ ID NO: 98211 - DNA, 273 bp, Enterobacter aerogenes
atgagtattcgtatcgaagttggcgacaaatgggttattaccagcgaccagtatcaatttatcctgaatgaaaagaaagtcgttaagtcaggtaaaaaagctggtgaggaatggctcgacaccatcggttattacccgaagattaaccagcttatttccggattgattcatcaccatattcagcagacatcaattaccacccttgatgcaatggccgctgaaattgagcgtgtcggagaaatgtgcgcctcctctatcaaggtggcggcatga

SEQ ID NO: 98212 - DNA, 222 bp, Enterobacter aerogenes
atggccgacacaatggatttagcacaacagcgtgagcaggaagaccgcgagcgccacatcaacaacgcgcgcagccgtatcgatgcgccttctcgtttcctctgcgaagaatgcgacgcaccaatcccggaagctcgccgcattgcgataccgggcgtggccttttgcgtgacctgtcagcaaatagtagagctcaaatctaaacattacaggggcgtttaa

SEQ ID NO: 98213 - DNA, 1452 bp, Enterobacter aerogenes
atgttgctcgataatgcatctatagacagccgcatcaaagggatttggtatcaaatatcaagccaaaataagcacccatcaattactttggatgaaataaaatctttagcagatgcgaagaacttaaatgttattgaattaaaagaaataacctttggttatgatgtacattcaaatggcatattaataaaaaccgatacaggtagtgctattttacctagactaagggctaacgaagtgaatttacaccaagagcgaatcgccccctcactgaattatgaaaaatactggaaacatatcgactggtttttgccaccatacatttccaatggggcattagcagaatctatacaacgatgcggtgttaaccctagaaacttttcaacaattgataccaagacagctcaaaaccgttttgaaactgaattcagttctttatatccgttatcagttataattcctgtaaccatccaaaacctatctaaatctacagcaatcgccaagcacctccctatcattaaagaagctatattagcgttttacagcggaatgaagatagccgcaattgctgctctcatcccaataattgaagacatattgagagttatcgttggcgaggaaggaagcgagctggatacagcaagcaagattaacagttgttttgatttagcgcgattgaatatcttgaaacttgatattcatggggttgactgggttcctaatgaatttagcgatcctgcatttttaaaagtcaataacaatagagtatttatgcttgagacgcttcgagcatggttgttagatagcttttacgcaaatacaaataactataacaaagagtctggatttaatagacatcatttcgcacacgccctttctgatgtatggcaaaatgagagtaattttttcagagcgataggtttaatacatgcgttagcgtttgttgaatgtttttcagttgcagatagcagaatcagcatgttcgttcctgaaagcaatgatgaatcattgtcttttcatgcagaggtacaagcctgtcttgatgcacaaactattaaaaaatttgcattgaatcgttatcagctgactcatgaattgccatttaatgtgacggcgtctgatgacggatggtcaatccgagctaatatactgagtgagaaaatggataaaaatataatacctctacttagagataaaggttggcaatgtcacaacattggagacccaataaaagatggtgaatacataaccgttgaagcagagaaaaatggaagaaatataaaaatagcattagtttacagttttgctatatctccacaaatctattcacggtttaatgggtcttatgattttgtgctgtgtcaaggtgcctcttacaagagtaatgagtttacttctcacttacaatgtcaggctttgcccttaagcgcttggattgctcctgatgcatga

SEQ ID NO: 98214 - DNA, 255 bp, Enterobacter aerogenes
atggccttaaccaaatgtaaagaatgcaaaaaagaagtctctacaacagcaaaaacttgcccacactgtggcgtaaagaatccaggcgtaacagcaaaacaaactttaggcggatgcctggtactgattgttctggctgttggttttggcgtttacatggcttctggcgatgatgaacaggcgaaggccgcacagaactactcaaacacagacacgcagtgtaatttcgatcagaaccttgtatcgacgacataa

SEQ ID NO: 98215 - DNA, 1038 bp, Enterobacter aerogenes
atgactgtaagaaaactcagtaatggccaatgggttgcgaacttctataccgtcaaccgtagcaatggcaagcaagggaaaagagttcgcaaaaagttcgcgactaaaggcgaggcgttagcattcgaaaattacacccttcaaaaattcgatgacacgccctggcttggacaaggaaaagataaacgccgcctttccgatttgatacatctctggtttgagcgccacgggataaccctgcgcgatggtgaaaaacgtaaatgcgccatgttatgggcagatgagtgcatgggttccccgatggctactgagttcaccgcgcagctgtttaccgcttatagggctaaaaggttagatggtcattttgcccggacaaaacgcgtcactcaggtttcgccgcgcaccatgaacctggagcacgcttatttcctcgctgtatttaatgagttaaaacgactcagggaatgggacgcgcctaaccctttagagaacgttcgtcagttcagtacagaagaaagtgagatggcctatcttactggagaacagattgacaggctcctagaggaaagccgccacagctctgctaaagatttagagatgattgtcagaatttgcttgtctactggcgctcgctggggagaggctggaaaattgaaacgcagccaaatcggtgctggaaaggtcacatttataaaaacgaaaggtaagtacaaccgcacaataccattagccccagcaatcatagctgaattaccaaaaaagaatggcgcgctttttagcccgtgttattacgcttttaggtctgctcttgagagagccggaattgaactaccggccgggcagctgacacacgttctcagacatacttttgcatcacatttcatgatgaatggcggcaatatcctagttcttcaaaaaatcctaggacacactgatatcaaaatgactatgcgttacgctcattttgcgccaaaccacttagaagaagcattgagattaaatcctttaaataatattcacaaaagagaaatccaatga

SEQ ID NO: 98216 - DNA, 1800 bp, Enterobacter aerogenes
atgaacaaaaacaacctagaactatatttagattattatctaggactggatgccccaggttttgctgttctagttactggtgagtggggttcaggaaagacgttccaagtaatgaatgcaatacctcatgaattacaatgtcatgtaagtttattcggaatcagcgactcacaagaagtttataacacagtattcgctaaaatgtttcctggtaaaaaccttgccaagaagttactagacataactaaggatctatctgctgaactgaatggagttaccttcggcgctggttccttagccggaaatatacttagcccgctaatcaaactaactgtagatcggaataaagtaataatctttgatgaccttgagcgttgtccaatgtcgaacaaagaaatatttggtgttataaatcagtatattgaacatcatcaatgtaaggtaatcatactagctcatgataaagaaactcatgatgatttcatcaaaaccaaagaaaaaatcattggtcacacaatacaaatagaacctcaaattgatgatgcagcaggtgttttctttagtgaaaaattcaaattgaataatttccacgccataaagccagtaataattagtgcatttttaaaaagtaattgcaagtcactgaggatattaaaatatgtaattaatgattgtcatagacttcttgagtgtcttgagcctattcatttaaaaaacattgcagcaatgaaagcgctcttcaatttcttttgcatagttaacattgaacacaaaatggggaatataagcactattgatatagaacaaatcccacaggactatattgaatatgcaattatctcacaacaacaagatgcgcaccaacatgaattagatgaacaaacaaaaaaaagaataaaattttattgtaagtataatgacatggatttaagaagcgatattttagattttgagttaactgctaaaataattaaaactggtgattatccaaaagaagaaatcataaaatctctaggtgtatcaaaattctttattcagaaacttgacaccccaccttggttaacaataattaactttgataatcaagagagcgcaaatgtaaggtcagccatcgttgaaatgtttgataaattcaaagaaataacaatgactgacataggggaaataatgcacagcttctgcttatcttatatgctctctgaaaaaaatgaaattaaccatagtttcgactatttatttaatgttcaaaaaaattacattaacactcttttagaaaaagatttactactccctgaaccattaaatcctgatccattcagcgatgatgtatacgagcgttcatattcgcatatgtactggataaatgactcatacaaagattacgttaacaaaatcgttgaccatttaagagaatgtagaactttagcaaaaattaaaaaatatcccatttatgttaatgaaatccttgaagcattagatactgacatagactattttaagaagttactggttggtactcccaatgaaactggattatattctgatatagatattatgaattctgttgaccccgacgatttcattgatcactggcttaaacttcctgttgaactatggagtaaggttagttcgatcttaaatgcgcgttacagaggggcagcacataacaatcttgctaatgaaaagcaatgggtacaaacggtctgtgataatctcctaattaaagcgggattacatagcggattagaccaatacaggatagaaaggcttgtactacaccatgcgttaaagtctttctag

SEQ ID NO: 98217 - DNA, 348 bp, Enterobacter aerogenes
atggattttgaagcgcggaaacaaaagacgctggcgataatggccagccgtaagatgtggaaaagcaattatgcaccgcttctgatacgcctgctgtggcggctggggataaagattccccctctgccgtttgctccgctctggcaggtttttggcgtgatgatagcctctttctccgtcggatacgggctgtggatgtactggatggtgtggcgggcccaggggatgtcccccctgttcgcttgtaaaatcagtcttatcgccggcgtgttatttggcctgacgatggcgttgtttcatctgtggcgccgaaaggtgaataaattacctgactggaaagatttataa

SEQ ID NO: 98218 - DNA, 597 bp, Enterobacter aerogenes
atggcagaagaaaaacgccctgtactgagcctgaaacgaaaaccggcggagaacagtacgacccccgcagaggcgacccctgctcctggtgtggtgcgccgtaagaaggtcgtggtggtctcgtccccgccggcctggaaagcaaagaaagcgaaacttgagaaggttaaacaagcggccgaagccgccgcgcgcaacactgcgccggcgccggttaaagcggtaaagacgccacctccggtgcgttatcttcgcctgctgccgccggaacaggccattatgacgctgaaggctttctggccacagctgttcgacggaaactccccccgtctgctggtaacgggcatgcgcgaacagctgtttgccgatattgtgaagcgcgacctgccgctgtcgcataaacaggtgatcaagtgcctgaagagtctgacccggtctgcgggctatctgtcccggatgaaggtgggggcctcccgctatgatctgcaggggaatgccgtcgcgaccgtcaccgcagaggaagcgcagtacgccagtgagcgcatgatgaaagaactcctgcgaacggagcgtatgcggagccagtctgctgactga

SEQ ID NO: 98219 - DNA, 726 bp, Enterobacter aerogenes
atgacagcacacacaatgggtttcagagccgctgaccgctggctgcaggcattactgacctggacaccgggtcagacggatatgattaaaacggtggccctggtcctgatggtcaccgaccatgccgggttactgctggcacacaataacgagataatgcggcttctgggacggggctgttttccgctgttcggtctggcatggggaatgaatctggcacggcacgcggaaatacgccagtcgcagctcaacagcctgtgggtctgggcgctggttgcccaggtgtcgtttatgctcatcgggtacccgtggtataccgggaatattctgtttgcctttgccgtcacgggccaggtcctgcggtgggtcagccagccgtcctggtattacaccctcccggcggctggactgctggtcgcctggatacccctgtcaaccgccagctacggcatggccggagtgggtatgctcaccgccagctggctgctttgtcgcgcacagcatgcaccggaacggctgggatacggtgtgctgtgggccctcatggtgttgctgatgaatatgaatgacgtgagtgaatcagtggccgggctggcgattgcgctgctgacgctgatggtgtgcccatctgccggagagcgtgtgaaacgcttctggccgcggcagttcttcgtgatgttctatgcggtgcacctggcggtactgggtattgtcgtctcaatgtga

SEQ ID NO: 98220 - DNA, 603 bp, Enterobacter aerogenes
atgaaaacgattgctttgctacttattcagtgtatatcgtgcctattagcaggatggcgagtatcagaaactatttttatagtattagcatccgcgatgtggttgttggtgttcaaatatgttttcattaaagttggtgcgaaaacaaaacgcccagtaggtgatgttagtaatctttatcttgttctggccggagtctgttgtattgttaatcccattgcctgtttgatgagtattgttttatacccactttgggttatgaataaagcactaaagtttgcatctgtgaaatttagtaatgataatgaaagtgcattcgaaaatgggaccggcaggaattatgtcgggagaacgcaatcattgacgaccttaccatacaaggaaatgttctccgagcgagagtttatgagttatcagcttgagcattgttctgacggttcagtcaacctcgaccaacctaatagtacatgtagcagtgctatggggtcatatggaaatgagatatctataagtactcatgatattaatcctgcgagtgggcttcctatgattgaaaatgtagacgttgcaggaaacgtgtatggtatagatcggaatcattaa

SEQ ID NO: 98221 - DNA, 318 bp, Enterobacter aerogenes
atggctgaatctctgttaagttttgatagtgatggttatgtacgactgttttttgcaatggcaatcattatctgtggttacggctatgtaattatgggtgtttttataagagatgcgctttcctatattttaatgttgtttgggcttacaggtctcagtgctttattttctttcatggtattcatggataaaaacatgtgggccggttctcctgatttgacgctgtcagtaataacgggattttttacagccacagtgatcttttatatgttttatgtcttgatttattcctttgatcggatgggggcaggtgaatag

SEQ ID NO: 98222 - DNA, 219 bp, Enterobacter aerogenes
atgcatgcctttatttttctggtgctgatgacgccgagtagtggtggtggaatttgggatattactcccatgcctaatacagatgtctgcataaaaatgctacgggtactcgaagcacgtggaggcagaggttacggaagtaatacaggagagtgcattgaaattaaaacacgcgagcctttgaacagcgtgatggaaacattgagtgagggtgggtaa

SEQ ID NO: 98223 - DNA, 291 bp, Enterobacter aerogenes
atgagagagttattcggatgggcgatgtggctggtgtttttattggcaggttatgtcctgctattttctactgacagtaatacagtacccgaagcgctttctcatcactggaaaaatgactgccggttgcttgagactaatattgataaagggtttttctctcctgcgcaaaatcgacttcagtgtggtgatgttattgaaaatgtcagcaaggctgattatgacagagcgataagtggcgataagcaaacaactctcgcagaggcaatgaaagaaatattcattcgttaa

SEQ ID NO: 98224 - DNA, 558 bp, Enterobacter aerogenes
atgctgttaattcctctgggcagcgctttgctcttaaccgggtgtgcgggcacagagaccgaatttcaatgtaatgccacgacgtcggatacctgtatgacgatggagcaggcaaatgaaaaagcgaagctgaaagaggaacgcagtgatgcaaagccggctgcggccgggttgccacaactggctgagggtaatttcagaaccacatcagttaattcgtacccgttgccgccacagccaaatttaatgcgtcccggagcaacgacaactgcaccgactaatagagtaacgtcaggattgctgacgaataacaggaaagtcagtacgccggtgtatcggcccgtggctgtagcgccagctgttcgaccagtgagtgtatcaacttttacatcgccggtgacggttcctggtaattatccccggccattaagaaaaggggaggagacaacgtcattgtggatagcgccgtacgtggatgcagatgatgtatatcaccagccagcaacggttctttttgtcgtgacaccatcggcgtggggacaacctcgccttaattga

SEQ ID NO: 98225 - DNA, 426 bp, Enterobacter aerogenes
atggctaagtctctcattactgctgttctgtcagcactgcgctgggctcactggctggttaagtgtgctgtggtgtatccgctggccatgatgatgttactggttgttctggtgttcctgacgggaccgtacacgttcggccagacgctggtgaaaaccgtagagtctgtgcagcaggagggatatgtcattcaggactgcacggggccgaaagaacttaatggtgatgcggtgaacgctccactgcctccggttttacaggaagactgcaccaccgtcagtacggatgcggcagggtatgcagcatatatcgaccagagctatacgcataatattctctggctctggctgctgatggcggtggtgtttaccgggatggctgtggttttccgtaggactcctgtccgcaggggatttctcgggtga

SEQ ID NO: 98226 - DNA, 696 bp, Enterobacter aerogenes
atgtgttcgatggatcgtattgaaaacaccaactgtagtcaattggatttctttcgtgaaatgcaattaactgtcaacctttctagccatcctgcttgtataaggctccgtgatggatccttttcccatttcaatcattctttcgctacaacttttctgcacaatattaacgttaacatatggtttaaccgtctggaaatctcctcttctttacgtctgtcagctcttgacgccgaagtttactcaggcgatcgaaaaatgcttgttgaggaaaatttgcccattaatggggaccgatgggattttataatagaacggatgtcatttgatggaacggagttcactctgtggaagttctgtcatcttcaacgaggcggttttttactgtctcctgttcgttctggttttataaaaaaactcaacgaatttaaaaatgcactcgtttttttaactgatgttcagattgagactctggctctatattcttttggtgcctcccacaatcagatttcagaggttttaaatatagcggttggaacatcgaagaacagagttaatcgtattcttgcagctttaccaatccgcacgagagaagaggttttttattttttattcgccagtggaatggccttttcattctgtaaggttgttacagaattaattggaagtcgcgttaataaattgttaactaaatag

SEQ ID NO: 98227 - DNA, 393 bp, Enterobacter aerogenes
atggcaaagatacaggcatatgttagcgatgaagttgctgaaaaaattaatgccattgtggagaaacgaaaagctgagggcgccagggagaaagatgttagtttttccagtgtgtctacgatgcttgtcgagttaggcttgagagtttatgaagcgcaaatggaaaggaaagaaagcggctttaatcagatggctttcaataaggttttgcttgaaacagttttgaagacacaatttgcaaccaacaaaattttgggaatttcttgtttgagtccacatatctctggcaaccaaaaatttgagtggcgatttatgattgataccattctggaagacactaaagaagtggtcgatacattctttccagaatcagaagatggtgaagaagagtaa

SEQ ID NO: 98228 - DNA, 564 bp, Enterobacter aerogenes
atgcatcatgaccttaaacaccgtattcaggcgatgcgggacaaactggaagggcgcgcccctgtcgctgaaattcagggtagctcgcaactttttgtcaccccctccccggaatgtcgccggctggttgagctggctgatgtccgggaaaccgatcgcattctggaacccagtgccggaacgggcgccatactgcaggcgatcagggatgcagtcccccgggcgaagtgtgacgccgtggagctgcacgccgggttagcccgtcacctgcaggcacatttcccgaaggtccggatctggtgcggagattttctcgaatatcatccggagcgccggtatacccgaattatcatgaatccgccgtttaatcgcggtgatgatatccggcatatccggcgggcattaactctgcttgagcctggcgggattctgacgggcatatgtctggacgggccgcgtcagcaaaaggcgctggagtccctggcggacgtctgggagccattgccgcggggaacattcacgtatacccaggtagcgaccgccattctcagaataaccgtctga

SEQ ID NO: 98229 - DNA, 1356 bp, Enterobacter aerogenes
atggcaccgactaccgcacagatcatgacggaaaataccgtcagccagacttaccgggcaacctattcacccgatgataataaattgcgactttacgcatcattacggctcgatgaagaaacgtattccctgatcaacaaagcaggctttcgctgggcgcccaaacaggaactctttgtggcgccagcctggacgccggggcgggaggatgtcctgctttccctcgccggtgatatcgaggacgaggacagcaccctgtttgatcgccaggagcagcgcgccgggcggttcagtgactacagtgaccggcgggcggttgaatcggagcaggcgcttgcgcatgttgattcgctggcatcggctgtccctctgggacagccgatcctggtaggccaccacagcgagcgccgcgcgcgccggcatgcgcagaaaattgagagcggcatgaaacgtgctgtgatgctgttcgagcgtgcggaatactgggaacagcgcgcgcaggcctctctgcagcacgcgaaatacaaggagcgtccggatgtgcgttaccgccgtatcaaaaaaattgaggcgggtttacgcaagtcccaaaagcacattgcccggtctgaaaagtatatgacgatgtggcgtgcgcagacgctcgatctgaaaatggcgttactggtcagtaattatgatcatattcatgcctgcttcacgctcgacaaatacccccgcccggcagagaaaagccagtatgagggctcgatgtctctccattctgccctgtctgaggagatcattacttttgaacaggcgcgtgatattgcgatccgctgtcatgagcgcacgattaaccaccaacagcgctgggttaatcattaccagaaccgcctggcctacgaacgcgcgatgctcaatgaaaacggtggcgttgtcacccgaacacaggaatttgaaccaggcgggcaggtactgagccggggagaatggttaaccattctccgggttaaccggagtcagggggaggtgagttcagtcgaaacgcccggttatcgctttctgggctacagcggcacgatgaaactcacgcccgaccgtatcacggactacaaagccccgacagcggaggaagccagcgacgcgaagaaagcggcgaagcgcccaccgatcgtcaattatccgggggaagggttccgggaaatgacaaaagccgagtgggcgaaattacccgctgattataaaggcgtgcggggtgctgcagaaaccgaaacacacggcgcctaccgcttccgccggtgcatgacgcacggttgtacgctcgtgaatgtgtatattacagacatgaaaaccgttgaaattccgaaaaaataa

SEQ ID NO: 98230 - DNA, 231 bp, Enterobacter aerogenes
atgatcgtttctattttttcaccttccgcaggcgctgtaaagccccgtcgtcattcgcgcattctgcgcgcagatatcaccgcacctgagattgatcccgctctcagagctttcgggcgtcatatcgccagaagtcaccgcaaagggcgcggtgtccacatccccgcgatgaaaaataccgccctcgggcaggtactccgcacgctggaactgaaacgcgcatttaactga

SEQ ID NO: 98231 - DNA, 228 bp, Enterobacter aerogenes
atgcaggatccttcattgcgaacgtatcggatcgcatttctgggaagcaatgccagcggcaatctgccgatgtttacccgggtacaggccacgaccggaaaacgggcgatgaaagcgtttattgaacgctgtgaacccgtcaaaggctggtttctgggcgcacctgaagacattaccgatcaggttaagaaggaggaagaagaggcgggaagcaaaccgcaggtatga

SEQ ID NO: 98232 - DNA, 507 bp, Enterobacter aerogenes
atgacttcatcagtaaccgttccggccgtctacgtgggcacatattaccagtacaacggcggcagtatttttggcaaatggtttgatttaaccgacttcgacgacgaagacgaattttatgacgcctgccgggcgttgcatgccgccgaggatgaccccgagtttatgtttcaggactgggaagggatcccgtctcagtttgcctctgaatcctctgttaagtgggcgtttatcgaggcattccggcaggcgcaggacgaaggacgcgccgccgcgtttgtggcctgggcggaatataccggcgagagcgactatgacgcctttgatgatgcgtattgcggcgaggctgaaagcgaggaggattttgcttatggctttgtggaggatcacggcctgttaaacgaggtgcctgaatccctgcgcgtctatttcgattatgaggcttacgcgcgggatctgttcagcagcggctatgtcttccatgaaggctatgtattcagcaactga

SEQ ID NO: 98233 - DNA, 975 bp, Enterobacter aerogenes
atgtcgaatgagaaaagaaaaaccatcggcagacagttaaatacccaggcgtcaatggcggaaatgacggacaccggtagaagccaggtatttaccttaaaaaccggcaggaaggtaacgttcaggtttgttcgggtgcctgcatctgaagttgaaagtaagaccttcgtaaaccaggaaaacaacggaagagatcaacttgcactgaccagggagtccctgaaatccattatccagacgattaagtttcagcagttctttccctgtattggtattaagcaaagtgaaaggattgagatactggatggttcaagacggcgagcctcagcaatttttgtccgtacaggccttgatgtaatggttaccgaagaacatttatcagctgatgaagctcgccaactggctaaagatatccagacagctaaagaacataatcttcgggagattggcctgagattgatcgctcttaaagagtccggatttaatcaaaaggaaattgctgaactggaggggttatctcaggctaaagttaccagggcgctgcaggcggcggccgtaccgcaagacttgatttctctgttcccggttcagtcggagctatcgtttagtgactataaacttcttttggaagttaatgaaaaactcagtgaaaagggattaacgcctgaagaactcattcagtctgtatcagctcagctcgatgcaattttgagtgatggcgagcgaccagaagacgaacagaaagccagtatactgaagctgatttctcaggcatctcaggcattgatagatccatctcccaaggaaaagtcagtggtctctccactctggtcttttgaggaaaaggacaagttcgcgcgtaagcgtgtgaaagggcgcacgctgacttatgagtttagccgtatgtcaaaagtgattcaggatgaactggacaaggctatcaacgaggtccttgacagaaatttgagtcaataa

SEQ ID NO: 98234 - DNA, 1206 bp, Enterobacter aerogenes
atggacaatattgagcagttacggaaagttgctacacgtgcaggtaagcttctgacatctttgagcgagagtatccgccagcaaaaagaggaattgaagcttaccgagttctatcaggaatacagcaaagccgctctgtataagctgcctaagctcagtaaaggcagtgttgaatatgctgtggccgaaatggaagccggtggctacattttcaaaaagaaaccttctggtaatacaatgaaatacgcgatgacgattcagaatgtcatcgatctgtataaccatcgtaaagtacccaagtacagggatcgcttcgataaagcctttacgatttttgtatgtaatcttaaaggtggtggttccaagacagtttctaccgcttcattatcacatgcttttcgagctcatcctcagcttctgttcgaagacctgcgtattctggccatcgatttcgatccgcaggcatctctgacaatgttcctgagccatgagaattcagtgggcctggttgaaaatacggctgctcaggccatgctccagaacgtgtctcgtgaagaattactttccgattttatagtaccgtctattatccctggtgttgatgtaatccccgcttccattgacgatgcattccttgctgaaggctggaagggattgtgtgaagaacatctgccagggaaaaatattcatgcggtgcttaaagagaacattatcgacaagctccagcatgactacgactttattttccttgatagtggtcctcaccttgatgcgttcctgaaaaactgcattggggcggcagacctgatgttgacccctcttccaccggcgacggttgattttcattcttctctgaagtttgtggccagcctccctgccctcatagattccattgaaatggatgggcacacctgcaatctcatcggtaatgtcggcttcatgtccaagatcctgaacaagtctgatcacaaaatttgccatagtcaggccaaagaggttttcggtgccgatatgctagacatggttctgccgagactggatggtttcgaacgctgtggggagacttttgacacagttatttcagcaaatccagcaacctatgatggaagtactgaggcactaaaaagcgcaaaatcagcagcggaagactttgcgaaggcagtctttgatcgcatcgagttcattcgtactaacggaggtatgtga

SEQ ID NO: 98235 - DNA, 756 bp, Enterobacter aerogenes
atggcggaaatagcggttataaatcataaaaaacgtaaaaatagcccgcggattgtccagtcaaatgagctgactgaggcggcatatagtctttccagggatcaaaaacgtatgctgtatctgttcgttgaccagatcagaaaatccgacggctccctgcaggaacatgacggcatctgcgaaattcacgttgctaaatacgctgaaacattcggtctgacctccgctgaagccagtaaggatatacgacaggctttaaaaggctttgcaggtaaggaagtggttttctatcgccctgaagaggatgccggcgatgaaaaagggtatgaatcctttccctggtttatcaaacgtgcgcacagtccatccagagggctttacagcgtacatatcaacccatatctcattcccttcttcatcgggctacagaaccggtttacgcagttccggctcagtgaaacaaaagagattaccaatccgtatgccatgcgtttatacgaatccctgtgtcagtaccgtaaacctgatggctctggtgtcgtgtccctgaaaatcgactggatcatggagcgctaccagctacctcaaagttatcagcgtatgccggattttcgccgccgtttcctgcaggcaagtgttgatgagatcaatagccggacacctatgcgcctctcttatatcgagaaaaagaaaggccgccagacgactcatatcgtattttccttccgtgatatcacctcgatgacaacagaatag

SEQ ID NO: 98236 - DNA, 783 bp, Enterobacter aerogenes
atgtcagaacttatttcctggaatcaaggcaccccaccggcgcagctacctgttgctatcgattattccgccgcgcttgcactgcgccagatggctgtagttcaggatgaactgccgaaatatctgctggcgccggaagtcagcgccctgctccattacgtgcccgaccttcaccgcaagatgttgctggccaccctctggaatacgggcgcgcgtattaacgaagcgctggcactgacaagagcggatttttcgctggcgccgccgtatccgttcgtgcagctggccacgctcaagcagcgcacagagaaagcagccagaactgcaggtcgtgcacccgcaggcagtcaggctcatcgcctggttccgctttccgatcaccagtacgtcagccagctgcagatgatggtggccaccctgaaaattccactggaaagacgaaacaaacgcaccggcagaatggagaaggcgcgcatctgggagatcacagaccgtaccgtccgcacctggcttagcgaagcgatagaggccgcaggggccgacggggtgacgttctctgtaccggtgaccccccatacgttccgtcactcctacgcgatgcacatgctgtatgccggtataccactgaaggttttgcagagcctgatgggccacaaatcgattagctcgacggaggtctatacgaaggtgtttgcgcttgatgtcgcggcgcgccatcgtgtgcagttcgccatgccggaagccgatgcggtagcgctgatgaaacaacttgagaggcgctaa

SEQ ID NO: 98237 - DNA, 687 bp, Enterobacter aerogenes
atggcggacggaatttccgtgtggatacctgtgattacagcgctggcaggtataggaggcgcattagggagccagtacatttcccatcggtttaccctgaatcgggagaagaaggcgtcagaagataaaatgcagagggagcgatattttattgcaaccgggctggtctttcttcttgagcgatttgcgcagagatgcgtttattcagcttacgagtccggatttaacgaacccgaacacgggcatttcagagtgaatcatactctaccggagttgagctatgacggcatagacggtgactggcgatctcttcctccggagcttatgttccgtctgagtcagatgccggttctgcagcaggaagccaagcagtcaatcgagtcagcgtttggaaatgacaatccatatgatggtagtaccggtctgtcagaaattaataaacactcatcccggcttggcctcagggcaatccgtctttcgcgtgaactccggcagatctgttctatgccgcatgatgacctctctgcccatcactggtctgcctggcgtatgctttcaatcgcgcgtgcgcggagcattaatgctgagctgcgttatgcccgcagtcaccacaaatatcatgcttctcttagattgatggaatctgttgatagcttagagagcaccggactgccagacaaagaatag

SEQ ID NO: 98238 - DNA, 300 bp, Enterobacter aerogenes
atgacattttatgaagtgatagatcagctcgaaaaacaacatggtcataccgagctgtggttttactcaggtacgggcgaaacagagcctgacttgattgccaacaatatcgcgaactggaaatggccaaaaattctaaagcgcaacggacgggctgtcgctgagtacacaggaaaaggcaaagattgggaattcatgggggattataaaactcctgataacgatccctgcagccctccgtcgggagcatgccgtctcaacgataaattcatcgccctttgcattttgtttaattactga

SEQ ID NO: 98239 - DNA, 975 bp, Enterobacter aerogenes
atgcaggcacccggtataccggagaatgaagaacagaggctgaagtccctgtatattaccggccttcttgatacccgtgacgatgagcgttttgaacgcctgacgcggctggcccgcaaagcctttcaggtcccggtggctctgataagcctgctggatcgcgagcgccagtggctcctcgcctgccagggcgtcggcgtgcgcgaaactccacgtgatatttcgttctgcgggcacgccattctgcaggaagggccttttatcattcacgatgcggctgccgatgcgcgatttcacgataatcccctggttaccggtgagccacacatccggttctacgccggccagccggtgagcctgccggacggcacggtggccggcacgctgtgcctgatccacaccgttccccgcgccttcacggatgaggacattgcgtccctccgggacctggcctgtatcgtggaggacgaattcgaggccatcagcatggccatgacggacagcctgacgggcattcccaaccggcgcgggttttaccgcgccggcgaaaaactcttccgcgcaatgaaccggcaggatgcgtcgttcagcctcatctatttcgatctggacaggttcaaaccggttaacgatctctggggacacgcggaaggtgacgaggtgctgaagatctttgccggctttttacatcagcaccttgaaccgggtgaaatagcaggccgcctcggcggggatgagtttgccgccctgatccggcgaaacggtaacactcagtcttatctgcacgcgctgagtgccagtctcgatcattacaatgacacctcgggcaagccctacaacatcaattattcctttggcgaactgatcaataacgcagaccattatacgacactggcggagatgatcggtaaatgtgacgaagtgatgtacctgaagaaaaaaagaaagaccctgtcgcggaaaacagaaacgtga

SEQ ID NO: 98240 - DNA, 909 bp, Enterobacter aerogenes
atgattgaaaaaatatgtgaagtaattgatggtgaatacgtctgtgatatagatattagcgttgaagaatggaagattttattaagggataaaaaagtttttgatgacaaaagtattgcagcgttaaaaaaatggttcattgagccagaccattcctgtacatgtttcgatatcggcaagaagtacgacctgcacagtatgagtgctaatggtgtaatcaatgggttgggtggaagagttcagaagcagcttggccgattcgaggttaaaggagtcggaaagattgcttccgggacaaaattcattacagtcatgaaaagtagagaaattaaaggaaacccaaagcgaaatttatggactatccgtgaagaacttgttcaggcaataaaagaactagatttttttagtacgaacgaaagctcaagcattgatttttactcagataatgatttgatcactgctctagaagaaagtaatcactttgacgttactcagacatttgagtatagcgaaaaagcgaaacctaagaaagctgcaatagaagtcaaaaatggactctcatacccaagaagtaaatctgtttcaaaaaatgcgcttaacaaagctgattataaatgtgaaattaattgcgaccatccaacgttcagaaggcgaaactctcctctaaattacacagaacctcatcacattgtcccgatgtcaaagcaagactattttgagaattcactggatgtggaagagaatatcatatcactatgttgcaactgccataaacaaattcatcttggcaaggggtttgaagatatgttgaggaaaatatatgccgagcggaaagatgtattaaaaaaagcgggaatcgagatattattagaggatttgattcttttttacaagatggaagataattaa

SEQ ID NO: 98241 - DNA, 432 bp, Enterobacter aerogenes
atgaaaaatatcgtattagcatctttgctgggctttggtttaatttcatcggcctgggccactgaaaccgtgaatatccatgatcgcgtcaacaatgcacaggctcctgctcaccagatgcagtctgctgcggctcctgtcgggatccaggggactgctcctcgtatgaccggtatggaccagcatgaacaggccattattgctcatgagaccatgacgaacggctcggcggatgcgcaccagaaaatggtggaaagtcatcagaagatgatgggaaataacacggtatccacgactgtcccgtcaacgtcttacgcggcgatgaatgagcatgaaagagcagcggttgcccatgaattcatgaataacgggcaatccggcccacatcaggccatggccgaagcgcaccgccgcatgatcaatgcaggctga

SEQ ID NO: 98242 - DNA, 174 bp, Enterobacter aerogenes
atggtggcgctgattaatgcccgtgtcgaaggagagcctgaggagatttacgctcttgttgaagaggccgtgatgctcaccgcttcacgtaccggaacccaggtcaatatccgggaacataatgcgttcagtccgggtatgccttcccctgtacacaggatcctgcaggactga

SEQ ID NO: 98243 - DNA, 663 bp, Enterobacter aerogenes
atgaaaacattatgcaattgtaaatcccgtgatgttatttcggaattcctcggcacgttcatccttgtgatgattggtgtaggctccatttcggtcaatgaaattagtgaggtgattggaaattttggtatagcgctcagttttggtctggcggtttacttttgcatacatctgttttcagccagtagcggagcacaccttaaccccgtggtaagcctgattttttatcttatcggggcctgctctttcagggcaaccatgaattacatcgtggctcagttgttaggggccgccgctgctgcactgtgcctgaaggctgtctttggccactccctgctggccggggtgacccgggtccatatgggggtatcactgtacaatgcctttttcatcgaaggtgtcatgacttttattctgattatgagcatcctcacgaccagaaaccccgcgattatcagcattgctgtttttcttgatgcttttattggcgggccgctgacgggggcaagcatgaacccggcccgtagcttcgggccggcattggccatgggatactgggataatcagtggctgtactgggccgctccgctgtctggcgggcttgcagctgttgcgtgctgccagctgtttatgccgcaactgaagtcaccctcaccggaataa

SEQ ID NO: 98244 - DNA, 498 bp, Enterobacter aerogenes
atggcagagatcatcattagaaaaatgcacgaagaggactggtgtgcagtcagggaaatttatcaggaaggaattgcaacaaggaacgccacctttcagaccgcagcacctgagtggctggaatggaatgaagggcatcttcaggactgccgctacgtcgccactgttgataacagagtggtgggatgggctgcgctatctcctttttcccgccggcatgcataccgcggtgtcgcagagctgagcatttatgtcagtactcattttcagggaaaaggcgcaggcagggctttgctctccgggctgataaagggctcggaaggtgcgggtttctggacgctacttgctggcatctttccggaaaaccaggccagtgttgctttacatcgcagccagggattcagggaagtcggctgccgggaaaaagtgggtgaaatgaacggaaaatggagagatgttctcattctggaaaggcgtagtcggacagtgggttgctga

SEQ ID NO: 98245 - DNA, 327 bp, Enterobacter aerogenes
atggagctgaaaatcgccgcgatggtgctgaaagaacttggccacaccactcgtctcgatatttacaaaacactcgttaaggccggacgtcagggactgcccgtgggggaactgcagcaacatctcgccattccggcctcgaccctgagtcatcatctttcatcactgatatccgtctcactggttcgccaggaaaggcaggggagaacactgttctgccacgcctgttatgacaaccttgctgcattgattgcctttctcacagaagagtgctgtgcagacgaatatgccccgcctggttttatgtcaccaccggagacaaaatga

SEQ ID NO: 98246 - DNA, 546 bp, Enterobacter aerogenes
atgagtgatgtaacggcattcaacaactgcatgagcgtgttctggcaacagcatgaagcagagctctcccgttttctggcatcgaggacaggcgatcgggagcaggcagccgatctgcttcaggaagtcttcctgcgcgcccgggcctgtgcagaccgcttctgtgaaatggagaacccgcgggcctggctgtaccggacggcgaggaatctgctgacggatgagtaccgtgccgccagagacgtcgtggtgctggaagacgagatcccgctgcctgacgccttccatgatgcggtttcaacgctggagatttgcctgcctgaaaccctgcaggccttacctgacgaggaaagatggctgatagaagaggccgatctgaaccggcgtccccagcagcgcctggccgacgagctggggatcacgctgacggcgtttaagtcacgcctgcttcgcgcccggaaacatctgaaggagacgatgacggaactctgccaggtggaagcggatgatgcgtcttccgtctgctgccataaaaaaatggattaa

SEQ ID NO: 98247 - DNA, 1758 bp, Enterobacter aerogenes
atgacgatgccatttttacagaatatccccccgtttatcttcttcaccggcaaaggcggcgtggggaaaacctctctggcctgcgcgacggcggtatggctggctgaccagggccggagaacgcttctggtcagtaccgatccggcctccaatgtcggtcaggtcttcagccagactgtgggccaccggatcactggtatccgcaccgtggaaaaccttgcggcaatggaagttgacccgatggcggccgcgcaggcttaccgcgatcgcgtgctcgatcctgttcgtgaactgatgcctgccgatgttatcagcagcattgaagaacagctttccggttcatgtaccaccgagatcgcggcatttgatgaatttaccgcgctgctgaccagtcatgaactgcgcgaaaaatatgatcatatcgtctttgatactgcaccaaccggacacaccatccgtatgcttgagctgccgggcgcctggagcgggtatctcgatgcacatcctgatgctgcggcgaacctcggccctctggtggggctggagaaacaacaggaccagtacgctgacgcagtgaaagccctctctgatacggcactcacgcgactggttctggttgcccgcgcccaggcgtcgaccctgaaagaggtctcccatacccacgaggagctgtcggctatcggtctgcagcatcagcaccttgccatcaatggcgtgctgcctccctttgccggtgaacgggatccgctggcgcacagtattctggcgcgggaggaacgggccttacgggccatgcctgaaaacctcgcgcatcttccccggtcgatgctgtatctgaagccttttaatctggttggtctggacgccctgagggcgctgtttacagagagcacacctgttctgccggatccgggagccacgctcacgacggtcgatttaccggagcttgcctccttggtggaggacctcagccgggcgggaaaagggctggtcatgacaatgggaaaagggggcgtgggaaaaaccacggtggcggctgcggtcgcggtctcgctggccagacgcggtcataaagtccacctgaccacctccgatccggcagcccacctgtcttacaccctggatggctcgctgccaggccttcaggtcagccgtatcgatccaaaggcagagactgagcgctatcgtcgctttgtgctggaaaatcagggaaaagggctggatgcggagggactggcggtactggaggaagatctccgttccccctgcaccgaagagattgccgtgtttcaggcattctcccggatcatcaaagaggccaacgaccattttgtcattatggacactgcgcccaccgggcatacgctgctgttgctggatgcaaccggggcctatcaccgggaaatggtgcgccagatggggcaggctcacgatcacgtgataacgccaatgatgcagctgcaggatccggagaagaccagagtcattatcgtgacgcttgccgaaaccacgccggtactggaagcggccgggctgcagcaggacttacgccgggccgggattgaaccctgggcgtgggtcatcaataacagcctcgcggccgcgaagccgtcctccccgttcctggtcacccgtgcccgtcgcgaactgccgctgatcgacgacgttgccgggcattatgcacagcgcattgccctgacgccactgctgaaggacgacccggtaggcgtggacctgctggctgaaatggcgggctga

SEQ ID NO: 98248 - DNA, 192 bp, Enterobacter aerogenes
atgatagcggttgtgggggactgtgcgaacgtcgcgtctgtagcgctgcatcttcgctccggatttactgaaatcggcacgctgaaggacatcggtttcaagcatggccgctggctggacacggtgttgctgcagtgtcagctgggaaaagggagctgtacgctgccggacagtccggtacccggacgctga

SEQ ID NO: 98249 - DNA, 1209 bp, Enterobacter aerogenes
atgcgggaaaaatcccgacgtccgtcgccgctgcagcggcgggtgctgattgtgctggccgccctcgatgcgaaacgtcctggaccggtggccacgcgggatattgagcgggtgctggagcagggcggggacgccccggtatacgggccgaacctgcgtgcctcctgccggcgcatggaagccgcgggctggctgcgcaccctgcgcgcgccgaacctgcagctggccgtcgagctgacggatgccggccgtgcgctggccgccccgtttctcgctgacgaacaggcgcgcgtcctggcggagcagcgcgcgacggcgatccgggttctgcctctggtcccgcctgtccaggcagatgaggctgacgaccggccggtggagctggatggtcgatggcacctggcgttgcggggtgactacgtgatccgtcttgacggcaccacctgcctgcagctgtggaatgcggccgggcaggtgacacgcctggaaggcgatcccctgcaggtcgccacctggctgcagtcctgtcacgatgcggggattgcggtccgggtacagattaatgagagcgccacgccggaggcgggcacggtggacgttaccgcgccggcggaccagaccggcacctggtgccgtcagctggacgccgcgctgcaggcggaggggatcaccgggctgactgaggatattcaactggccgtggtcagtcctgaagcgtccctgcggatgctgccggcaccggcgcgcctgctgcacgttctgcgcgacgcggacccgctcactgctgccacatacgaggaagacacggtggccgcgctggctgacctgctggcccgcgcggggttcacggacgaccaagcgcaggagctgcagtggcaccgcatccgctggccgctgatgagtcaggaagaagctgaccggcgcgagctgaacagcctgctggatgaactggaacagcgacagctgtactgcaaccgcgggcagctgacggagattgtgttttcgccagttcgcaaacccggagagcgctggactgaacgtctgcagtggctcctgatgacggatggattcgggttccgcagtccgctgtcgcgtgaagcggcctcacgggcgctggctatcctggccggttacacgggacgggaggtggcggagcatctggccacggtgatggtgtggaacgacgccgaagcaggagagaggccctga

SEQ ID NO: 98250 - DNA, 492 bp, Enterobacter aerogenes
atgaaagtcactgaaaaccgactggacaccctgatcgataacctgaacaccctgatttgcgaggacagcctgctcacgcgccaggagcgtgaaaccctggtgcgggccgtggccgccatcggcgccatgaaagcgcgcgtcggcatgaaaaagcccgcggtaccggcatcgtcgaaaccgaaggaagagaaacaggcacctgtacctgacccacgctttccgaatgcccgccaggcctgggtggctgaagaggaaactttattactggatgcgctcgatggcgtcccgaatgatgatattggtaagcatcttttctggctttccgaaaaactggggagaacgccgttcagcgtcgcctgcaaaatcgcgtcacaaagacatctgacaaatggatggaaagagcagttcagggaagtttcggataaaattcgcttgtccggcctgagcatcagtgattatcttaagcagaacggcacgggccataacgcctga

SEQ ID NO: 98251 - DNA, 1359 bp, Enterobacter aerogenes
atgttggtgaccatgtcagataaagagatccaccgtttaccggtgatacaggctgtttgtgaaaagcgattacgccgtcgcgatgcagcatcacagcttggcatttcagaacgtcaggcgcaacggcttatcaatcgttaccgggtttctggtgctgaaggacttgtcagccgcaaacgcggtcaacccagcaaccgccggctgaccgaatctctcaaaatgcgtgtactcacgctgatacgtgaaaactacagtgactttggacccacactggccgcagaaaagctcagagagcgccataatatccggctttcaatcgagaccgtccgcaactggatgacgtctgacggaatctggatcccacatgcccgacgcaagtcacggatatatcaaccccggcatcgacgtgattgcctgggggaactgatccagatcgacggctcccaccatgactggtttgaaggccgtgcaccaaaatgctgcctgctggtctttatcgatgatgccaccggccgtctgatgcatttgcggttcagcgaatcagaaacagcctttgactacatgctggctacccgggaatacattgagcagcatgggaagccggtatcactgtacagtgacaaacacgcaatatttcgcgtcagtggtccggagaaccgtaataccactgttacccagttcggacgtgtgctttatgagttggcaatcgagcttatttgtgccaacagctctgaagctaaaggccgagtggaacgtgcgaatcagactcttcaggatcgactgatcaaagaaatgcgtctggaaggtattaccggcattgaggctgcaaatgcctggcttgccactttcattgcagactttaaccgccgattctcacgtccggccaggttcccgaaagatttgcatcgtccggtgcaggaaagccccgatgaattaagagacatctttgcctggcatgatgttcgtaccgtgtcgaaatcactgaccttccagtacgataaggtcctttatctcatggacccgtcagaagaaaatagccgtcttgccggtgaaaaaattaaagtactagattatcccgatggcaccctcgccttccactatgggcaccggagccttaagtgccaggcatttgataaactggcctgtgtcgaccaggggcagattgttgataacaaacgtctcggtactgtactcagactggctcaggtaaaacaggatgagcgggaaagcgaaggcaaacgggaacgaagcaaaaaatcgcccagccgtaaggctcaggtgcgcgtccaggaacagctccgggctatcaatcccgttctggcagacccgagcttgtttgtggcaagttcaaagcggtag

SEQ ID NO: 98252 - DNA, 894 bp, Enterobacter aerogenes
gtgagtattccaaagttcactttaaagacatcaaatacttcaagctgcaattatattggtattttggattgtcttaagcctgccatagatattgcctcccctaaaaggcatcatgaagatctgcgtgtaaaattaatagggaaagatacaccagaaaaaattgaggaaaacctacaatttataacttgtgggaacaaacaggattttttgagttgctttaaaattctcatgcaacgtttcaatgttcctggctttaagcctatcatcctaatccatgctcatggagacaaagaacatggactgcaactacccgaccattcatttgtaacatggcctgaattgattgaactgtttgatggattaaccaaaagatgtaatggagattgcacaataatttctggtttttgccattcatttgaactcattaagcacatacccaaaaacgttaaaaaattaccattcgcattctattatggttataccagcacaatatccgcaggtatagtcgaggatgagatgagtactatatttaattcattcattgataatggtggagaatatcttttcaacctccatccaaaattacgaattagatccttcggtgagttcgattttattatgcaattcctagcccctgcacttgctatggcggcagaccctaaagaattatcaaaattggctccgcaattttcacaggaacggataagagaatcagtacgtagaggtcataatggacctcagggcgggctggacaaaattattaaatcattcgttaggaacgatggcttagctgttaatttaattgaaacttacatgcatgatactgagcggaaagaatatgttttgaaggcggtggatgattatttttctttgattaaaaacggacatgattaa

SEQ ID NO: 98253 - DNA, 1458 bp, Enterobacter aerogenes
atggagctgggatatccttccacaaaacagctgggccgttgggttcggatttatgaagagaagggcgatttacccagggaattaaagccaagagaacgctattcacggacacagaaaattgctgctgttgagcattatcttactcacggtggttgcctgtcgtacactcgccgagccatcggctaccccagtaacgaaattctaaagcgctggattgaagagttttacccaaatgcgcgtcccctggtcattcgctcaggcacaaacaaatgcttcagcccggaagagaggtctcaggccgtccgggagctctgtaaccgacgtggaaccgcgcgtaaagttgcacaaagcataggcgtcagcgtcccggtcctgtacaaatggaagaaagaccttatcagtgacgaggcttatcaatccatgcgcaaacgaaaggcagcccctcaggataaaaatcaggatgctttactcggtgaaatccagcgactcaggcagcaggttcatcagctgcagctcgaacgtgacatactgacaaaggcgaatgaactgataaaaaaagatctgggcatcagctttctgacactgaaaaacagggagaaaaccctgatagttgatgcccttaagaaaaagtaccccgttgctgagttgctaagcgttctgcaacttgcccgcagctgttatttttaccacaaagccagcaaacgtctgtgcgataagtatgcggaaatacgcgtgatcatggccgatatctttgaggagaattaccgctgttacggctaccggcgccttcacgcgatgcttcgcggtaacaacagggttatttctgaaaaggttgtccgcagactgatggcagaagagcagctcgttgttaagcgcaccaggcgacgacgatacaactcttactgtggcgaaatcggcccggcaccggaaaatttactcgcccgggattttagttcctgcaggccaaatgagaagtggctgaccgatattacggagttccagcttctggctggaaaagtctatctgtcgccggttatcgactgctttgatggccaggttgtaagctggtcgataggaacacgcccggacgcgacgctggtgaatacgatgctcgatgaagcactcgatacgctcaacgaacatgataaaccggtaatacacagcgatcgtggtggccattaccggtggccgggctggctcgatcgtatcaacacatccggacttataaggtccatgtcgcgcaaaggatgctcgtcggataatgctgcgtgtgaaggcttcttcgggcgtatcaaaaacgaaatgttctatggcagaaactggactggtatcacgttggaaaaatttatctgcttcctggacaggtacatacgctggtataacgagaaacgtatcaagctatcattaggtgcaatgagtccggtgaagtaccggcagtatcttgggatcacaacataa

SEQ ID NO: 98254 - DNA, 408 bp, Enterobacter aerogenes
atgaataacgaagttacaatcgatgttgataatgaggttctgaaaacaaaaattattgattttctaaattctcagcagcctttagacaagcctgtactcctagcaaaagttggtagtcatctgcgaagaactctaagtgagaaactcccaataacattcaaactgaagaatttcatccatgaaaatttaaaaggtaaagttgacattattgaatcgactttagataaaacctattgtgcagtaaaaatctcaaattatgaacttgcgctggataaagatcaagaaatcgtggataaaaacactcggactcaagaaactctttttgattttttactacgtaacctttcccaacatgaaatgaaatacgtcagtattcctctgaatattttgaacaaaaaagtaaactga

SEQ ID NO: 98255 - DNA, 888 bp, Enterobacter aerogenes
atgcacttaatcttgattgcaggtttaaatgataaaatagcatctagaatagtaaatcatttacgtgattcagttggtaatacttatttcattgccatgaataggcgcattgggtccaaacgaatttctgatagtgattttaataatacaattaatgaattggttgattattcattcaataaagatgcagattcatttgggctggttatagatcaaaacctgagtaattacatcgatatttttaataaattacttccttcttcattcattacaactccagatatttttcctgaggatgtccatattgataccgacagaaaactaaatgagtgcgtgaataaatcaaagaaaaaatttgagttagtggttcgtgagattataagatgtgtatctttccttaataatcagaaccaagcgaagcgtaatacgacaccgttactgcttcctgtcgttaactatgaaaaaaaccttgtgcaagagttactttgtgatgtgataaccgaactttatggagctaaggataaagagaaatgtttaaaagatctcattgcaaaatttgatagaaaagtacaaaaacacaagatacgtgtaaaagataaagaaattcaatattacgctagaggaaaaatcgtatttaaatcaccaggaaaatacacacacggtattaaatttttaaaaaatgaagataaacatagtaatttttgttacctaaacggcgtttatcgaatagggtctaaaatacacaatggctttcattatgactgcgaaaatatcaattcaggaaaaattaaaaaggacatgaggaattgttgtggtgagggagagaaacacaacacgttatatataaacatatatccaaatgatttcttacgagttcctagcaaataa

SEQ ID NO: 98256 - DNA, 2139 bp, Enterobacter aerogenes
atgtatatttccaaactgaccctggtgaattacaaaaacttcaagaacacgtctctgcggtttcacaagggagtgaacaccattatcggggaaaacggctcagggaaatctaacatcctgcgagctattcgcctcctgcttgacgacaatatggtgcgttctgcttatcgtctggaagagggcgatttcagccgatcactcgaccaatggcagggacactggatcatcatcagcatggagtttgacgagatcaccactgatgaatccgttcaggcactctttctccacggtacggctcccttggacgatgggccaatacataaggccacatataatctcattttccgacccaaaaaagacatcaggttgaagctggcagccttagaattgtttgattttaaagaactctcggagattcgtgacgcaatcaccatcgatgattacgaaacgcttttcactggacggagcagtgctgatttcggaaatccagcggtataccgaagtatcgttggagattttgatatatgtgatttctcatcagagacggagtttccagaaattggggcaaaggtgccgggcttcctttcagttacgaaagaggtctcgctgactttcatccaggccttgcgcgatgttgtttctgagtttcacaacaatcgcactaaccctttactcactttgctgaagagcaagagtggagatatcaatccactaacgatggaaccaatctccgagatggtccgcggacttaatgcctcaatcgaaggacttgaggatgttcagtcagttcgcaatcatattcgtgagaccattaaggacgccgcaggtgaaacttactcccctgcttcactctcaatcaagtcagatctccctgaagaagcagataaactttttcagtccctgcgactattcgttggtgaatcagaagaagggtacgaaggtgcaattcatgagctgagccttggcggtgccaacctaatatacctgactctcaaactactggagttcaagtaccagcgggaaaagctagccatggccaatttccttttgattgaagagccggaagcgcacatccatactcatattcaaaagacgctgttcgatcgcatcgcatatagcgatgcgcagatcatttacaccacgcactcaactcacatctccgaagtcagtaatgtaagcaatgtaaacatactgggccgtcacggagcgttttgcgaggcctatcagcctgccagaggtctagatcccacccaaatcaatagcatccagcgttatttggacgcggtgcgtagtaatctcctcttcgccaaaagcgtgatactcgttgagggtgatgtggaggagatcctgataccaatactgattaagcttgtactgggcgtaagcgttgacgagttgggcatcagtgtcatcaacattcgtagcacaggattcaagaatgttgcggttctcttccatgacctacgtattaagaaacgatgcgccatcatcactgatttggataaggccttctttaatatcaccgtacaggcaactgataatgccattgtggcaaagataaaggcaaaagctgcgggatctcagaaagccggtttagaacggcaggccgatttgacagagttcacggcagaaaatccatggattgaaaccttttacgccaaacacaccttcgaggtcgactttgtcgcagccggcaaccaagaggctatcgtccagaccattccggtggtttacaaggatcagggaaccagggaagaggcgaagcagcaactcaagtccggagacctgcaacaaatgggtagtcgtacgctgacaatggctcggcaagagggtaaggggtggttcgcgcttttgctcgctgaatacctcactccccaagtccagatacctgaatacatcatacaggccatccattttgcacatggcaaatttccgcgttcccttattgtcagaattctccagtatcgcgctgaataccgatatggagcagatgtggcaaatctgccagcgaaacaattatttcttcaggagataaatcgttttgcgcaaggagatattggcctggctgagttcaggataacaattggacgtttattaccgggagaccccattattgtattcttagggaagttgcaatga

SEQ ID NO: 98257 - DNA, 1785 bp, Enterobacter aerogenes
atgaggttcatttgggatccaagtgacctcaatcctgaacaggcggcagcagtgacagagccatcgagcatttttctgatcgcttgcccgggtagcggaaaaacgcgcaccctgacctacaaaattgcctatgaactctctcgtcgaactgataagcggatggttgttgccattacctacacccaccgtgcagccgatgagatccaagaacgtattgaggatttgggcgttgatacttctgggctatggattggtaccatccatgccttttgcctggagtggatccttaagccatatggcatttattcgcctgaactagcgcgtggttaccgcgttatcgacccgtacgatcgtgagcgtctgctggagaggctgtgcgctcagtataaaggtatcactcactgggattgtgactactacgttactgaaacgggttatcaacttggctgtgtcgatacgagaaaacatcctattattcaaaacgttttgaaggaatattttaaagagctttcatcaagccgacagatcgacttcgaacttatcctttggtatgcgtactgcttgatgcgggacagacctcctatcgcagtactgctctctcgcgtgttttcccacatcctcgtggatgagtatcaggataccaaacagattcagtactctattttgacgtcgatacttcgcgctggaaggggggagaccaaaatactcatcgttggtgatccgaatcaagcaatctatggctcactgggtggctacgctatgccattagatgaattccgtgcgcaagccggaatcccgataaaggagtttgcgctcagcctaaactatcgctccagtgagcgaatcatcagctatttttcgaactacagcgtacacgctagcaaaatcaccggtgctggcaaagatgctaaatttcccagccggattacctataatcaaaaggttacacgcagcaatgttcatgatgagattgtaaggctgattcggaagagtctagacaacggctactcacccgaaaacatctgcgtcctcgctccacagtgggttttgcttgcctccacgactcgaaaactagttgcaatgttgcctgatcagcaatttgatggcccaggcctcatacctttcagtaataacttcgataatttctggttcaaggtttccaaggttttactgacggattcttccccagcattacttatcaggcgactgcgttgggcaaacgaagtaataaaagatcttgatagtttcggcgttgatactaagacactgacaccgagaatcttgctgcgggagagtaacgcgctcacggtcaatgagttggacggactccgctacctggaccaggccttcaccgagctgctcaagaggctcaatatttctccggaaattcatcctgcgctcttgactcatcgagaggcttttttcagcagctcagctgcgcgaatagagcgtctgcaaaaggaaggggcgacatacatcaatcaaatatccgtcttcaaaaaagtctttcgcgaaagaagcggcatcactgtctccaccattcatggtgtcaagggtgccgagttcgacgtcgtcatcgcctttggattattggagggcatggtaccgcacttcaatgaagtgaatggacatgttgccgcaagcaagctcctctatgtattgagctctcgtgctcggaaaaatcttcatttaatctcggagtcagaacgtcagagaggaagatacagtagctattccgcgaccgaattactcgcggcctgcatctttaattatgacgaggagtaa

SEQ ID NO: 98258 - DNA, 921 bp, Enterobacter aerogenes
atgtccctgctacatcagattcaagagtctgtggttcaagatggatcaagcttgggtccaatactgctcaaactccgactcttggcagcaagattaggaagtaacgatttagaagaatgggtcaaacatgagtcggaaggctatcctcaggatgctgtgcttcccgattacagaatagtaggagtaacttataaaggcacgttttctggcccttttggctctggtataaaaaatgcgcctatcccaccaatattaataaaaacgtttgcaaatgatagctggaataactactccgtcagagaaagcattgctgctgttgacgaacttgttaaagttagtacaaaaggtggttctttggggattaatgcgtcaaatttaatccttcttctacaaggaaagatatataaaggttatgcttgtaatgatatctctggagatatttcagtagtatcactatcagaaatttcacaagccgttcgtaatagagttcttgaattaacaattgaatttgaaaaatcaattccctcagcagcacacatcacttttggtactcaaggcatggataaagataatgcatcaaaagcccagcaaataacacaacaaataatctatggtaacgttggtaatgccatctctggtggcagcgaatcaactattaacgtaaatatacaatcacacaataaagaatcggtagcaaactacctgaaagattcaggtatttctgaagaagatgctcgtgatttttcactgattgtagcgtctgaaacaccatcaagttctgaagaaccttttggggaaggtgcaaaaaattggattgcatcaaatataagaaaagctgccgatgggacttggaaagtcgggatggcagttgcaaccaaagttctgacggaggctgcactgaaatactatggtttgcagtaa

SEQ ID NO: 98259 - DNA, 477 bp, Enterobacter aerogenes
ttgtttttagaaataataggtggtttagcaagtgtcgcatccatctcgggcatcacagctaaagagttgattccatttatatctgatccggataagaaactgtttgaaaaatatttcagttaccttgaaggtaaaaaggttttaattgcaccattcgattcagaggtttcccacgcagtaatcaaaagtttagaatcaatcaaagagaaaacagagcagctaagattagacattaaatccaagcaagcgcaacatttattattagatttaatccacactctaagccaaaatttaatgttattatataagcatcaaaattcgatagatgaagtacttttttataaatctttgcaaaaagtacgagttaaatttgcaagagtattatctttactatgttttacgtatgaggtcgatttatcaaatcaacaaactgatttagcaagattggtgttggaacatgcttaccgagtaagataa

SEQ ID NO: 98260 - DNA, 279 bp, Enterobacter aerogenes
atgtcacgtccagcagataaaacaacttcctctgcgaatgcaaaacgtgcataccggaaaggtaagccaatgtctgccagtgagagacagcttgccgcgattgcgcggaaacgcgaaacgcataaagaagttaaggtttttgttaaaaacccactaaaggacgtgatgatagcggtttgtgaagaagaaggtctgacacaagcccagtttatcgagaggctccttgagcgagagcttacagaacgcggtcttttagatgtaaagacttcacattcttga

SEQ ID NO: 98261 - DNA, 561 bp, Enterobacter aerogenes
gtgaaaaaaatgaaccgtacgctccgcagatgttgtctgtccgggcttatcagcctgtctttgtttgcaccttttccggttgtgtatgccgacagcatcgagacgggatattcgccggaaggaacggctctgcagctggtcctgaagactattaattctgcacagcaggaaatccggccgatgggctattcctttacctcacccgaagtcgccggcgcgcttgtcagggcaaagcggcgtggcgtcgatgtgaaagtggttctggactggaaagccaataccggcaagcaaaaccaggcgagtctggcggccatgaatcttctggtcaatgccggcatcccggttcgcacagtgtcgcagtacaaaattatgcatgacaaagtcatcattgctgatggccgcaatattgaagttgggtcttttaactacacccgctccgccgatcgggtcaattcagagaacgtgctagtcgtgtgggatgttccagtcgttgctcaacgctatctgcagcactggtcgacccgctggtcgcagggaacggactggaaacgggcttattaa

SEQ ID NO: 98262 - DNA, 543 bp, Enterobacter aerogenes
atgagcgcccaggcagaggaaggaacattacgccggatgacgttaggcgagatagcaatggctcgtagggtattcggtgattcgatagtttatagccgtgtctggattcattgcgacagctatttaccatttggactacagaaacaaaattatgcgatgactcccaacggggagttgtggtacagaaagtcgatgtacagggaagacttttctgcaaactcagttttcatcgaagataaatatgttttcatccatgagctggggcatgtctggcaacaccagcacggacaatgggtgagaatgcggggagcttttagctgggctgctgaatatacctacaagctggataaagaaaaactcaccgattactctcttgaacagcaagcctctattttagctgattactggttactgctggtttatgggatcagtaagtggtcttactatcagagagcagggcgcatggggatgtacaggggcgtagataagttgcaagatgttccttcgctttaccagaaaatcgtaacagggaaggggcgttaa

SEQ ID NO: 98263 - DNA, 312 bp, Enterobacter aerogenes
atgaacaagaaaactaagcgtactttcacccccgagttcaggctggaatgtgcacagctgattgttgataagggctactcctatcgacaagccagtgaagcgatgaatgtcggttctaccacgcttgagagctgggtacgccagctcaggcgagagcgccagggaattacgccctctgccacaccgattactccagaccagcaacgtatccgcgagctggaaaagcaggttcgccgtctggaggagcaaaatacgatattaaaaaaggctactgcgctcttgatgtccgactcgctgaacggttcacgatag

SEQ ID NO: 98264 - DNA, 831 bp, Enterobacter aerogenes
atggttaatccgggacacgtcaggttgtgcagcgaaatacgtcgggtgtggaaccagagccggggctctgcgggggcacgcactctggctgacatgctgacccaaaacggcgtcccgatgagccgttaccgtgccggacgcctgatgaaatatctgaacctgagcagttgtcagcccggaaaacatcagtacaaaaatgcccgtcaggcgcatacctgcctgccgaatctgctcgagcgtcagttcgctgtgcccgagccagaccgggtgtggtgcggagatattacgtatatctgggccggaaatcgctggtgctatctggcggtcgtcatggatctttttgcccgcagggttatcggctggagtctgtcagtacatgccgataccgcactgataagcagtgccctgcggatggcctatgagacgcgtggtcaaccgcatgatgtcatgttccatagcgaccagggaagccagtatacgggcctgaaatatcaacaacttctctggcgttacagaataaaacaaagcgtcagtcgacggggaaactgctgggataacagtccaatggaacgctttttccgcagtctgaaaacagaatgggtgccgacggatggttatgcaggcaaggatgaggcccggcagcaaattaatgattacatattgaactactacaatagcgtcagacctcaccattataacggtggactgacgccggaagagtcagagaacagataccattcttactgtaaaaccgtggccaatattactgtgccactacaacaggtgtttgtgcggcaactgcgcctgtttgtattggtgttgctgcattag

SEQ ID NO: 98265 - DNA, 273 bp, Enterobacter aerogenes
atggccagcgttaacattcattgtcctcgttgtcagtctgcacaggtctaccgccatggtcagaaccctaaaggccatgacagatttcgctgccgtgactgccaccgcgtttttcagctcacttacacttatgaggcccgtaagccgggcattaaagagctgatcactgaaatggccttcaatggcgccggggttcgcgataccgccagaacactgaaaattggcattaacaccgtcatccggactttaaaaaactcacgccaaagcgaataa

SEQ ID NO: 98266 - DNA, 726 bp, Enterobacter aerogenes
gtgtctatcaccatccgtaagccatcgaaggtacaaatcccgcatcagtcatacatcgatgcgggattttataaccgggtaacaggcgaggaaaaaacggagacgcacgacgaggaattaattgcattgtacaatacaaaaaatattcctctgtttatggagaaatgcgtcgagtacggtaaaactctcgcggtcgccggggaaacaagcaccgggaaaaccacctatatgaaaatgttgatagggtatattcctgtacatcttcggatatcaaccattgaggacaacccggaaatcacgttctttatccataaaaactacgtccatcttttttatccgtcagaatcatcagatgaaaaaggttctatcgttaccccggcgagccttttacgctggaattaccgtatgaaccctgaccgcattttattaacagaggttcgcggtgcggaagcctgggacttccttaaaataacaggttccggccatgaagggagtatgacctccattcatgcaggatcagcgaaagaagctatagatgggtttattacccgttgctatgaaaatccacagtgcgcccagctcccctatacatttatgttacgtaaggttctggatagcctggacgtgattgtgagcattgatttagacggaaatgttcgccgtatgaatgacatctatttccgtccaattcatcgaaaccagtattttgaggaaatgaaagcatga

SEQ ID NO: 98267 - DNA, 747 bp, Enterobacter aerogenes
atgctgatttcgacatatcaagagcgccagacacgcaacagagaaaaaataaaacaactgctgaacttcctgaaagaagaaacctacagcgattttaaaacgctgatactgctatttggtttccgggatcataaatcgctttatacccttctttcaaaagtcgagagaatggggttaatacaaaagcatgtcctggtatcacgcacaataaaaatttcattgtggggcataaccagtgacggactggccgttgtgttaacccccgacgatgcgcttttccccgcacgatttgagccttcaaagattaccggctggacgctggaacatcaccttgataatcaggcggcacggatcatccttgagcaaaaaggcgcgtccggctggataaacggcgatcgcacgaccttcctcagccgttatcaggtcaatcaccggccagacgggctgatcactctcccttgcggaaccgtgatcgccattgagaccgagcgccgtctgaaaaccagagctcgctaccagtcaatcatcgcaagccatttactggcccggacccggaaagactggatttacgttttttatatcgtgccggacccgcagaaaaagcgcggccttgaacggctgtttgacagcatcagacacgttatcgttaaccatcaacacatcccgctggaaacccgccaccggaatgtcttccgcgtctacacgctcgacgagttgcaacggctcaacttggataacaatatatag

SEQ ID NO: 98268 - DNA, 3525 bp, Enterobacter aerogenes
atgccagcaacagctgatgaaattatcgaagctattaaggaagcttcagctgtaggttttcgcgggcgcctgattgcacgcgggcaagcccggtcggtgatctggcgagacggtgacttgccgccggatgcaccggagtttagcgcactgctcagtcaggaccttcaaggctatgcttatgccctaatcgatctcggccttcgtcttcgagaacttaatggagacgacgcctatgcgcgaattgcttttgaacaggccggaaccgcactcgagtcggctattgctaaaggaaaacgcgacagccgggatacagattttcacttcgtaatggctgctgcaagctatcaccttgcgcatctttcagcacgagcctattcgttactcgcaatggttggtcaggatgataatttttcaccaatagagagggctcttacacaactgatccggcgtgatttgcgtactctgcgcgataatgcgttgggctttcggctcagaggtgatggcagtgacgtgaaaattactgaaatcctccaggctcgcctaaacttgccgcaagacgagaacggtgacagtgagtcagaggaggacatcctttttgatgggcttgatttggcactgactgacgcctatatgtcggccatttctctctaccttctcgctgtagaaaggggagaatcacgtttgctttccagggctattgaaaaattaagaattagtctaagtatatgtgctcagtttaatatgctaccccagtggtggctaaactttattaccattcatctgttatctgacctttggtcagatacattccatgaaagattgccactggttccagttggtggtgacgctgctgaatggcccgcgcttcgggaactgtttattgcactgcttcaaagacgacctcgagccgaaattgatctctggccatcgcagagagaggccgccggacgctctgttaatgacaatgacgatttggttgtttcgttgccaaccagcgctggaaaaactcgtattgctgaattgtgtattcttcgctgtctggcgggtggcaagcgtgttgttttcatcaccccgcttcgtgcgctttctgcacaaacagaagccactctctccagaacatttgggccgcttgggaaaacaatatcaatgctgtatggcagcattggcgtaagtggtatggatgaggatgcaattcgccagcgtgacatcgtcgtcgccacgcctgaaaaacttgactttgctctccggaatgacccgtcaattattaatgatgtaggactttttatttttgatgaggggcacatgattggggccgatgaacgagaggttcggtatgaagttcaaattcaacggctgttgcgcagacaggatgccgatacgcgcagaattgtctgcctctcggcaattctacctgatggtgagcaactcgatgattttgccggttggctccgtcgtgacaagcccggaggaccaatcaaaaataattggcgaccgacccgcttgcagtttggcgaggtcatatggtccgctccagcaggtcggcttaatctcagcgtcggttatgaggcggcttgggtatcgcgttttatcgtcagcagacaaccgccaaaggttaaattacctaataaaaagcagcgaacaaaaatgtttccctctgataacaaggagctctgcttagcgacagcctggcgtctaattgaagatggacagaccgtacttatctactgcccacttcgccggagcgtcgaaccgtttgccgagacaattgtcgatctgcatcagcgcggactactgccatctttatttgatgctgccccggacattctggatacggctatctcgctgggagaagaatggttgggggcacacagcccgatactcgcctgcctacggttgggcgtggctcttcatcatggcgcattgcctacggcttaccgcaaagaaatcgaacgtttgctgcgagatggggtacttaaagtgacgatctcatcaccgacgctagcacaaggtcttaatctttcggcaacagctatcgtcatgcattctcttcatcggaatcgcgagcttatcaaagtgtccgagttcagaaacgtcataggcagagcagggcgcgcatatgtagatgttgaagggctggtgatttatccaatattcgataaagtaaataaacgccagactaactggcataccctcacatctgacacgggggcccgtgagatggagagcggactaatacagcttgtctgtgtgttattgattcgcatgcatacacggcttggtggggatttaaaagcactcactgaatatgtgaccaacaacgccgtagcgtgggaatttccagaaattatgaccgaatctccgcaagaaagagatattgcgcaggccatctgggaaaaacaactttcaacgcttgatactgctattctgagccttcttggtgagaatgatatcccggatgaccagattgaaactgctcttgatgacattcttcagtcttcactttggcaacgcagtttgcagcgttatagggatgagaatgaacggattttgctgaaatcgggactcctgtcccgcagccgctacatctggcagcgctcaacggcagcagggcgccgggggtatttcctgtcgggggtaggacttacaaccgggctacgacttgatgctattgccgctaaggccaaccaactattgattgatgcgaatgcggctataatgggcggtgatgccgaagaggcaattgctgctatcacggcgctcgctgaagaggtctttaccttctatccgtttatacccgatccattgcctggcgactggagaggtattttacgttcctggctattgggtgaacccatgactaacgtcgcgaatacgcaggcgtctgaaacgcttcaattcgtcgagaatgggctggtgtatcgacttccgtgggcaatggaggctattagggtacgtgcaacagctaatggagacctcataggtgatacagataccacgctagacgattatgagttaggttttgcggttgctgctgttgaaacaggtaccttgagccgttcgtcttcactgcttattcaggcgggttttagctctaggcttgcagccataaaagtggttacagacactactgccgattttcaatccggccaggagcttagaaggtggctgaactctgaagaagtgataagccacacggataatcatgactggcctacacctgaaaccagagtgatgtggctggaattcttgggtagtctcagccccaaaggcagccaggtttggagtcgtcatcgttataacggaatggtggactggagagatactccggcagtgatcggcacaccattgcagctttacactgttgatggtattcatcacgtactggctgatgatggcactcctctgggaagtataaatggcagaattaacacaaacagaagaggtcttcttagagttgaggtggatgatgagaatggtcgtgccatgttcgattatttaggaccggacgactttatttctacctga

SEQ ID NO: 98269 - DNA, 780 bp, Enterobacter aerogenes
atggcaaatttcgaggactggtgtgattcgacagagcgtaatatcagcgaccattatttgcagtcaataacggccagggatgccgagtgtatgttcggcgttcaggttatggccgcgctaatacctgaacactatgcgtcaccaagaaatatcgctaacgcatttgaagctctaggtaaaccggggctggcggcatacattgctggaaaattgcctgaaacgaaacagattcgttccggtgatttgggtgagatatttgcaactgaatggataaatgcacgtagcaatggctataaaacgcctataaaaagattgcgctggaaagatcatcgcaatatgtcgatgcgtggtgaggacgtcattggtatttacatagatcagtcttctcaacaactttttttccttaaaaccgaagcgaaaagtcgcgccaaaatgacgggagaggtggtttctgaagcccgcgataacttgaataaagagcaagggctgccatcttcacatgccctaatgttcatagcagatcgcctgaatgaacagggtgaggagcttttggctaaagcgatcttaaatgcaacgcttcggcaaggaattgttccaggatgcgtccggcatcttatctttctattatcgggcaactcttcagaaactatgctgaccacttcaattgaaaagtatacaggtcaaaataatcagtggggtgtttgtctaagaattgctcgccatggtgagtttattgccgcaacttttgaaaaggtgattagcgatgccagcaacagctga

SEQ ID NO: 98270 - DNA, 360 bp, Enterobacter aerogenes
atgtacatagcgatagatggcgatgatgtggggagaaaaataacctcatcatacttatccaactcagaagagaggttgacatacataagcaacaaattaaatgataccacaaaaaaaatatctaaaatgcttttatccaatggatttgagataattttccaagccgcagatggtgttacagcgaaaacagacaacgaggtcaatcttaactttgtttttgataagataaaatcctattcctttgacgaaattacattttcagctggtgtgggagcgaatctaagagaagcctatgttgcactgttaaattctaaaagcaacggtaagaatatgatttctatttacaaagacatattataa

SEQ ID NO: 98271 - DNA, 186 bp, Enterobacter aerogenes
atgataatggatgctaatgatgatattgataacaatttgagcaggcttaagtcagaagacagaactgtcttaaagatccaaaatgaaagtattgtgacaaacaaagagattagtgataccgtttttaacaaccagtcaaatcttattattctaaacatttcgcaccattataatatgtctttgtaa

SEQ ID NO: 98272 - DNA, 1770 bp, Enterobacter aerogenes
atgaaggacgggcagctccatcaagtgatgacgggatgcgggtatcgctatacgcgtgcccgcaatcttcctgaaaaatcgattctgcacagcagggagcgaggtgcaggatattacacgaaagaatacgcgactgatgccggtaattttaatgttgcattggtgattcatcccgaccctttcacagaactgccgacagcattcattattgagcaacctgaacagttcaaaagttgccttatgccccatgtcgccctggaagggttcctttgctatgttgagcagatggaagcagactgggattccaacgatctggaagcgacatataaagaagttgatgcacagatacaccagaccctcattgattcggtatccgctgctacgcaaggggtaaatgataagagagaactggaaggggagtttgctgcatactggcgtcccagcgagacactctttcttctgtcaaacgcaagtcgggggaccacacttaaaacctctttggcaaaattacttaagtctgatggaactaccagacaggagtacataacggttgaggaatcatccccggaggactcggaagccgttatgaccaagtggctcaaacaaaggtatttccccagaacttcgttaaaagaaatacccatcagcacgcattacatttctgtaaatcccagccgtctagccgggatgaaatggccaccggcttcattccgggacttactggaatggcttgaaaaatcagaccacaatgccagagatagagtcattgaaaacatcaaagccgaagggaagaaaaggtacatttttctctttgatgttttaaaccaggacatcttagctatctatgttgagttcaatgcgcagtctgttgatttcagaaggtaccggaagtcagccaaaaactcaacggtcaagcttgcggcgatgttgggtggcaaaagtgtttgcacggaatatcaaaggctgggtgtcattcgtgctgacattgcgacgctccttagccggaatacacgacggaagggggcagtaagtctttcaacaaagcgtatagcgttgataggttgtggaacaattggagggtatctggccgaattattactacgcaacggagccggatgtggtaagggttatctgcatctttatgatgatgatatctacaaacccagtaattttggccgtcataccctatcgtcacatgatttcgggtggcctaaatccctttcacttgcggcaaagctacaggagtctgtgcatttacagacaaaggttgtaggatttatggaacaattccgtatcagcgcagatgaaatgcagaagtacgacatcattattgatgcgacaggacgcccacctgtgtcaaaacgcatcgctgcggtggttagacagattccactggagcaaagaccatatattattcacgcgttcaatgatggcaacggccgggcatcaaaagtctttattgatgatggccgaagctgttacgggtgtatggtttctaaccctgcaaaataccataaaggaaccgattcaaggtttaatgatcttgatatatcaagcgaaaaaaataaaagttgtggcagcacttacaccctttatgatgcagcagttagtagcataacgtcatctctggcccagatggccgtgttaagtactctagaaccagagttaaagtggacttacaatgaacatatccttgagggggggcgttcgctcagacctcaatttttgccacatcagccgaattgccctgtgtgtaatgaacataaatga

SEQ ID NO: 98273 - DNA, 1299 bp, Enterobacter aerogenes
atgccttgggattttaacaattactatagtcacaatatggatggcttaatcagtaagctcaaattgagcaagactgaatccgataaactcaaagcacttcgtcagatcgtacgtgaaaggacgagagatgtatttcaggaagctcgccaagtcgcaattgacgtgagaaggcaagcgctgacacttgaaagtgtcagattaaaacttgagaaaacaaacgttcgctacctctcccccgaagaacgtgctgatctagcgcgacttatttttgaaatggaagatgaagcacgcgatgacttcatcaaattccagcctcgtttctggactcaaggaagttttcagtacgatacgttaaacaggccttttcatccggggcaggaaatggatattgatgatggcacctacatgcccatgacggtgtttgaatccgaaccgagcattggacacactctgcttctccttctcgtggatacatcactgaaatcactagaagctgaaaacgatggctgggtatttgaagaaaagaatacctgcggacgcatcaaaatctatcgggagaaaacacacattgatgtaccgatgtatgcgatccctaaagaacaattccagaaaaaacaaacagcagcagattcagcacacctcataaagtcagattcggtgtttgaatcttttgcattgaaccgggggggacgcgaggcttatgccgttgagtccgacaaagtgaacctggcacttcgcgaaggggtcagaagatggtcagtcagcgaccccaaaattgttgaagactggttcaacgaaagctgtaaacgtatcggcgggcatctgcgttcagtttgccggtttatgaaggcttggcgggatgcacaatgggaagttgggggcccttcatcaatcagtctgatgactgcagtcgtcaacatcctcgatagagaatctcataatggctccgacctcaccgggacgatgaaacttattgccaggttgctgcctgaggaattcaatcgcggtgtggaaagtcccgacgatactgacgaaaaaccattgttccctgcggaaagtaaccataacgtgcaccatagagctatcgttgaaactatggaaggtctgtacggtattttacttgccgctgagcaatcagaaagtcgggaagaagcgttacgtaaaatcaacgaagcatttggtaaacgtgtgactaatgccctattaatcacgtcaagtgctgcagctccggcatttctcaatgcaccatccaaagagccatcatctaaaccaatcaacaaaacgatggtaagtggctga

SEQ ID NO: 98274 - DNA, 1086 bp, Enterobacter aerogenes
atggggttttcaatgtctgaattgcatgtagtcaatgaccatggagtacggctactctgcctaaatggtggtggggccagagggatgtttacaatcagtgtgcttgctgagattgagaggatacttgcctctaggcaccctgaccaagaaatcagaattggcgattactttgacctcatcgcagggacatcgataggtgggatcttggctctcggccttgctaaaggcaagagtgctcgcgagttggaatgtgttttcttagataaagcgaatgatatttttccaccaagatggtggctattcaatctccttaaatcacttgtttctcccatttatagtagtaaaccacttcgacaaacaattgaaacgatgatcggtggtgagactacctttaatgacctggcccggagagtaatggtcccggcagtcaatctttcaacaggaaaacctcagttcttcaagacaccacataacccagattttacccgcgacggtgcacttaaattgattgatgccgcactcgcaacctccgctgcaccgacgttctttgcaccacaccattgtgaagaccttggttcttattttgctgatggaggtctggtcgccaacaaccccagttatatcggatttttggaagttttcagggacatgaagtctgattttcctgatgttgctcataaagacatacacatacttaatatcggtactaccggggaagagtattcacttagcccaaggctgctgagcaaaaaatggtggaatggctactgccgactttggggcgtaggtaaaaaactggtccttacaaccatgacggctaaccaacatctccataaaaatatgctcctgcgcgagcttacgctccatggtgcctccgataactacaccagtctggatgaagtgatccctaatgaagcagccagcgacatcactctggataatgccacgaagagttccattgaaaacctgcgcgcaaggggaagacaactcgctactgtgcagttcgctcagaaccagaagcttaagagctttttcactacacctgcaaaaccctttaagcgcgcaatcgcgcaggagaaactctga

SEQ ID NO: 98275 - DNA, 1746 bp, Enterobacter aerogenes
gtggcaggtagcatcattaacctttttatgtggggatatcaggacagctacagaattcacatccagattctggcacgtaatgtactgaaaaaattgggtgcaccggctgatgcagaagtgctacttgttggtgctcgccgccctggcagtaaaaatgcgaatccgatatgcgtagagccagaagatggtaagtggcatctatctttgtttgaaggattgctggattcagttgaatcgatttacaagaatcatcggttacagagtatgatttttggtgatgggccaagcatgcgcgacaagccagagtggatacgtcgcgactcagtgcgaacatcggttagtaaggcacttgatgcttttgataccgagcaaaacgtaacgtcattttgcggagagtctaggcgaatagacgactattatgtcaccccagtcatacagattccaaacgacactttcgagaaattccctcctttgctctccaagtctgttgacgaaagccaacaaggacatggatttcgtagtctgatacatgcagcgatgtatgcggttcttcgtgaggctaccgaggaattgcataaccctgatccaggaagatttatccatggcagtatgagagatgccgaggaaataatacggattgctgcaaacgactttctgcacaccgcaggcctctcgatcgaacgaagatacattcatactgatcttttcgatgctttgaaccttgtctcctctcttatgtacgagggggcgaaaggcataggtcagctcattctcgtcgatccagataacgaggcggttgagttcctggcgaagtttgttgagccagttccctttcgtgagccacgatgggttcggaaagtcttgcagatggcggcatcaggtgtcggcattatcgcaaatagtcagtacatctatggacttgggagactgaagaagtcgcacgatcccagtgcacaagatgcgttcacggtagattttatagatcattatcactggcagttgtactgcggtaaccaagcactgcttctcagtcaatatgctgtgcccaaacttccacaggagccttttgacaaagctgccttcctggcaaattacgcgagactatttccgttgtcttcacaagatagtggattgcacttgtggaaccttctgatgacccaaaccagtcaggggcatgggagcatgattgtcgttgcggaagatgcggcctgcgaggcgaatcgactttgcaagcaaggtactagaatcgtgccaactaagctcactgaatcactccttcgaagtgtcagcggtattgatggcacaatactgcttgatcctgctggtctttgccatgctatcgggattattctcgacggtgaagcgaccgatgagtgtacgccatcaaggggatctcggtataattccggagtgcgttacgtacaaacgagcggcactcgaaggcttgcgatcgtcgtgtcggatgatcgaacagtcgatatcattcctcaaatcaagcgactgtgcagtcgttcaaaaatagaacaatgtgtcgtaacactggaggcggcaacgctcgacaactatcatgattctcggaattggttaaacgaccatcgcttctatatcaacgctgagcaatgcgctcgaattaatgccgtactcgacaaactagatgccgttccaaaagaagtaggtcttatctattttgaaactgagagatttgaagttgacccagagatggacgaaagctatctcatagactga

SEQ ID NO: 98276 - DNA, 894 bp, Enterobacter aerogenes
atgggaatacctgaatcacagctcgatacatggtcccaccaaggatctattgcacagtctgcctcgacttatagcattataaagaatgcattagagagcgcaaacactaagtatcatggaaagaattttaaagtattccttcagggctcctatggaaacgatactaacatttatgctgaaagtgacgttgatgtagtcatatgtcttgatgatgtctactacagtgacctcacacagttatcaccagaagacaaagatgcgtatgaccgtgcatttgttcctgcaacctactcgtatactcaatttaagcaagatgtgcttgaggctcttacagagcgcttcgggtctgatgttaaggtcggagataaggccatagttgtagcggcaaatggaagtaggcgcaaagctgacgttatcgcatcaatgcagtttcgtcgttattggaaattcaaggggcattacgactcacaatacgatgagggcatctgtttctttaatggcgctggtgaacggattgccaattaccccaagcagcattcagaaaatctcaccttaaaacatcaggccagtaataaatggctaaagcccatggttcgcgtactgaagaaccttcgaagtaaactcattgctgacggaaaattgaagtcaggacttgcaccttcctattaccttgaaggtctactctacaacgtgccaaatgaaaagtttggcaccagttatgctgattgttttgtcaatgccatgaattggattcagacagaagcagataaagacaagctggtatgcgccaatgaacagtattacttgctttgggaggggacacatacctcatgggagaaagccgatgcggaagcgtttatcgacgctgcaataaaaatgtggaatgaatggtga

SEQ ID NO: 98277 - DNA, 963 bp, Enterobacter aerogenes
atgacttactctgtttcgccgtcatcactactcaccgagtacggcaacgacaacatatgccgtgttctcgcacttgatggtggcggtgcaaagggcttttatacgctgggtgtcctcaaggaaattgaggctatgcttgggtgcccattatataagaggtttgatcttgtatttggtactagcaccggtgcgattattgccgcgctcatcgctctaggatacgaagtagatcaaatacacgcactgtacaccgaacatgtaccacgagttatgtccagccggtcggctgcggcaagaacaatggcgctccaggatttggctaaggaagtttttcaagacaagacattcgaagatgttctgatgggtattggcatcgtcgcaactcgatggatgaccgaaagaccaatgatcttcaaaggtaatgttgtgcaggcccatggtcgcaagggaaccttcagtcctggattcggggtcagcatcgctgatgcagtgcaagcgtcttgctcggcttatccgttcttcgaaaggaaagtgattgttaccgcagcaggagataaggttgagttgatcgatggaggttactgcgcaaacaaccccaccttgtttgcaatcgccgacgccactgtcgctctgaaaaaagatcacaaggatatccgggttataaatgtcggtgttggtatctatccagaacctaaaccaggtctccttatgcggattgctaagaaatggctcgcagtccagctgcttcaaaaaactttagagatcaatacacaatcgatggatcaactacgcgacattctattcaaagatattccgacgattcggatcagcgacacattcgaacggcctgagatggcgacagatttacttgagtacaatttagataaactgaatacccttcgacagcgtggtagggagtcttttggagctcgtgaggcacaattaagagagtttctgatatga

SEQ ID NO: 98278 - DNA, 1119 bp, Enterobacter aerogenes
atgaaagataattggccattctgcggaagaactgtatttttatcaggcggtcctattgctacaattgaaccattaagtgatgaagttttaatttggccaaaaactaaagatggaaaaataacacaaataaaaatagatcaatacggtaaactcttttatgcagttaataaaatcaacttaaacattatcggcgttgagtttacttctaatgaaagtgaatatataggtgagtccccaagagagtttcgaggctatgttaaccaaaagaatatttggtctaattgggatgccatacagacatggggtggaatagctctgtcatcatttcataacaaaaatggaattagctatgatctttcaaatagaatccgatttcaactgaacacaattaacaaccggttaaaaaacttagctgtttcttatcaacaacaattaaatgcattagttttaaaagaaagtttcaaaagcgggcaacgatttcaggacggatataccgatttagtttatcaagaattccattcatttttatttgattctggaatccttcgagataatctttgcgagtatgtatacaacttctcaaatggaggaatcagtaagcaacaaggaaaagaaattacaactgcaggaggcctgctaagatttttaaactcaaagaaagatcattcggaaatagagacttatctgaaaaaggaaatgagcattggtggatggctgtttgagttgggaaattatagagatctagtaatgcactctgcaccaataaatattgcaagccataatttatatgcaattcatgagcctatcgctatgcctgaaggtaaagaacttcctgcagttcgtttcccgttgcccgctaatcccgaaaagctttatagtgaacgatgtaagaaaagtgattttaataagtatatagaaaactttaaagaaatatcgcgaatttctcttcaagatcgtggtaaatatgattgcttagaatatgcacataaagcttttggtttgctcacaaatttatcattagaagtagcaaagcaatcaccatttaaaccaatgcggcacaggtttattcgcacagaacaaggacttgtatctattcctgaatatgaagaaaaaacttga

SEQ ID NO: 98279 - DNA, 1221 bp, Enterobacter aerogenes
atggaaatatcaaataatggtaatgcttatcgagcattatttagttctttaagaagctgcaccgaaatcactcctccatgtaagattgaagatcagaataatgatataattcaagacttcaaggaaaagtgtagtagttatataaaaatattaaaaaaacatacatcaccgactagcattgctaataatcattatgctactgataaattagcaatgaaaaaactacgcggatatataaatactatatatgacgttcgcgatactgttattgattgccttgaatattttttatcaggagatatacaggcggcttacgatctctttgatgtaacatttaatagaactagtaaaaataagcacttacaaaatatctgcattcatcttaatgatatttgtaatgatgcaacccctctttaccgagtaagaaagtccgagaaatttttagaaaatagaaacgatttattccatataccatttaaactcagacacttagtaaatgcacagcgctattcggtagcagggttaccttgcttataccttggcacatccctatatatttgctggcaagaaatgggaaaaccagatttcgataaactatatatatccgctttcaaatccgagcggaatggtgaaaaaagactaatcctaaatttcgcctcagagttattaaactcatctctttcccttaaaaaggatgacatctttagaatgacctctgaagaaaatctaatttcttacctctgcttatggcctctaattatcgcttgtaattatattaaaaaacaaccagacgccgcattcaatcaagaatacataatcccaaacatattaatgcagtggatcagtagaaaagaaaactcccctataattggaattgcataccgctctacaaaaatcacatctattaagcatagtgatttagcaattaatgtcgtgattcctcctaaagctacatacgagcaaatggctaatagctcatactgtccaacattgagcaatatattttcgcttaccaaaccaatttcatggcaattacttaagaccctagattatccattgataaatgatggcgaagctgaaagagcaatagaacgtttgagaaaaagagagatacaaaatttccatgaagacttggtgagattttatccagtaaccgattttagaaggcttgaaaagaccattgatgagcttctaccgtacgaggctatagagggagactaa

SEQ ID NO: 98280 - DNA, 1035 bp, Enterobacter aerogenes
atgacaatcagaaagcagccaaacggaaaatggttgtgtgaatgctacccgaacgggcgcgacggcaagcgtgtgcgcaaacaatttgcgacgaaaagcgaggccatagcattcgaaaacttcaccatggatgaagtaaacaaaaaaccatggctgggggaaaaggaggatcggcggcgtttgtcagaagtgattgagctatggcattcactctacgggcagacgcttgcagaccccaaacgcctgatggcaaaacttagaattatctgtaatggtctgggcgatcccatcgcctcagaactgaccgccggtgactttacgaaataccgcgaagcaaggctaaaaggtgaagtgcgaaatgaagatggcgcgcttatgtcgccagttaagcctcgcactgtaaaccttgaacaacgcaatttatcatccgtttttggcacactgaaaaagttgggccactggtcagcgcccaatccgctcgccgggctgccaacatttaaaatcgctgagggcgaactggcgttcctggccccggaagaaattaaacgcttgctggatgcctgcgctgattcacaaagtcccagtctgctgatgattgtaaaaatatgcctggccaccggcgcgcgctggagtgaagccgaaaacctgcagggccatcagttatctaaataccgaatcacatacaccaaaaccaagggcaagaaaaaccggaccgttcctatttcacaggatctgtacaacgaactacccaaaaatcgcgggaagttattcacgccatgcagaaaagcctttgagcgtgcattaaagcgggcctgtattgacctgcctgagggccaatgcacccatgtacttcggcatacattcgccagccactttatgatgaacggcggaaatatactggtactccgagatattcttggccataccgatataaaaatgacaatggtttacgcacactttgccccagaccaccttgaagatgctattacaaaaaacccaattgtaggattagaagactatggaaatatcaaataa

SEQ ID NO: 98281 - DNA, 633 bp, Enterobacter aerogenes
atgatacaagtgaaagctggcgagaataccgggggaagagaagctatccataggctaatggctgcctatgatttcaaatccagacaacagctgtgcgatcacctaggcgcatcaaaaagcaccatggcaaacaggtacttaagagatagtttccctgcggagtgggtgattcagtgtgctttggagacaggggtttctttactgtggctcactaccggacagggtgaggcaggttcaaatattgaccataaaaaagatatcaatttcgggaacactggcaaagttaaacacctttctgagcttgtcagccccgaaattgataaggcaactctcaatggtggcttactggtcgatgctggaaaagcaatcattgatagcagcctgctcccctcagactcaagcaacttattgctggtgaatacttctgtggattcttacttagtggaccgcagccaaactactccagttaacggtatgtggttggtagatatcgacggaataaaaagcattgttaagttaacacggctaccagggaacagattagtgatccatcaagacgagtcatcatttgagtgcagtctttatgatatcgaggtagtaggacgcgcattaaaaataattaagagcctttga

SEQ ID NO: 98282 - DNA, 243 bp, Enterobacter aerogenes
atgagcactgatatttcaattcgtgtaccaaaagagatggctacgcctgcagagttcgcggaatgggagggtatctcccgtggctctgtttaccagaaaattcaccatggacagcttgccaagtacatggtcaagaaggaaaaaaacaaaggacgagtaagcttgcgttacctgatgtacaaagctgatcaggttcgtgagtcccttggtcattctaacttccgcatcatcgtgggccagtaa

SEQ ID NO: 98283 - DNA, 234 bp, Enterobacter aerogenes
atgcgaaatattgaaacccgtaccactaaaaccggaccagatgatgctggactcaacctgttgctgactgaggcacgtaaagaagaacgccgaggacgcgcagatgtgatggctgcgcgtctggattctttagctgctcgtatcgtgtcacgtcagcttaaccacacggaagcggctgagctgctgcgtcaggaagctgtgaagattcagaacgaagcgcaggagatccactga

SEQ ID NO: 98284 - DNA, 516 bp, Enterobacter aerogenes
atgcctggttttgaaaatgcacagcaaaatcaagttgatgaaattgttccagcaatgcagatcgaattggttgaagaagatatagaacagcacgtagccgccgaatatctatacagccagcatataagtgcgctcgtaccacaatgccctccagcagaagcgacagaatgtgataaagaatgctggcgttttacactgaatcctataactgacaactgtttttggcctccgaaaagaagatcaccgcagagaattgcttccgacgacgctcaggagtgttctatgtgggcgttgtctatgtatgaatcagaggcccaggccacaagagcctatactatgttagctaagaatgtgaaaaatataagaaaaactattggcgatcacctggcaaggggtttagtaacctgtagtgatggtaaatgtatgcctgctaacagaaaaggtcattttgattttcatccttatgtggatgcagatttcgccaacggattccaagtaatacgagcattgccatga

SEQ ID NO: 98285 - DNA, 1092 bp, Enterobacter aerogenes
atgataagattagatgctagaagaataaatgcgtcaactgtcggggattattcttggtactctgaccttgtatatttcgatggcccactcatttgtttgtttagagggagcgggtataaagatgctctttatgtatggcttgataattctgagcgggctaatcgttggtgcttaattccggtatcaagatctactttggactcttatcttaatcaaagaatgagcttaagggagattatacagtcaagcgaatatacttatatttgcaatcattatgcggaaactggaaggaaaaactataacattctgcatgttgatagttttcctgatgaatacatgcctgatgaagattcatatttgtatgaagagatatgtactgatgatgcattgctgttgaagcaagaacgtacttccagttatatgcttggcttagataatcagttgtttataaatgatttatccgtaatacctaaggtttttgaacagctttattctttccattacggactggcccatttaggacggttatcgattagaaataccatgttgcgcttgatggggaattggactggtggtatatcagcagttaatatattttcagggttgaaaagtgttattcccgttttgcatcgaccagagattagttctcttcaatataattcgcctggacatattgagttaaatttacttccagatttggcccaaagtgttcaagacgcatctgttcgtgtggagaatgagctaatttatgaccgcttggagaaaatgtataaaaatacatatacatacttcagagagcacgggctatcaggttttgatgaagatggtggcattgaaattagaaatatcgataatgacaccacagaaaatctgcgtaagcgtgtgagaatattttttagatgtttgggatggtcaagttatcaagctcagtttgatttgatcggtgcccatcctctacaacaattacgtgctgtaatggcctactacaggcggcttaaaatattgcgtgagtacatcatttcagagaagctttttgttggccagtctcgggtattgcagcagccacaaattgctcttcctcctgaggtatag

SEQ ID NO: 98286 - DNA, 588 bp, Enterobacter aerogenes
atggcattaaaatgttcagccattgatgctgccagtaaggacacggaattgaacttagaacagattgccagtcaaagtattagcaaccttcagtttcttctcgatacgctgaagatgccgttggctgttggtccgatcagtgatgaggactatgtgatcctgactacaggatatgcccagctcgaatgggattatggtttttctcgttatggtaatcgaagtgataagtttgagttttgcctgaaactcctggctggcccgttaaggcatataccttctggcgctgctatgtgtacctttgatgaggacactggagttatagagatccactttgtggagtctttcgtgaaagatgatgacgtagagcatcctctatacggcaacatgtttatggtgactttgtgggcggtgtatcttttcggtagcgcagtggggtgtcaagagattcgcatccccgaagcactgaatcagaaagttgctgaccactataaaaaatttggttttaaaggtgatatcagcttgctttcagcaccttttgctacaataactgatgtggtaagacgctacattacttctaagaaacagtag

SEQ ID NO: 98287 - DNA, 180 bp, Enterobacter aerogenes
atgactaagacgcatagtgacaagaaaacacagaagcattactccgtatctgatgttttcagccgtatgggcgtcgcgatggaagaactacttcaagcggccccacatatgatgcaggactgcaaatttgaaggaaatgagctgcatggtaagctcaaagaaaagcagaaagctgcttaa

SEQ ID NO: 98288 - DNA, 1032 bp, Enterobacter aerogenes
atgactgagattaccgcacaggatgtgatgccacctgacgtacaacccaatgatgcagcgactacccaggcgttcagctttggcgatcccattccggtactggaccgccgcgaacttctggactacgtagaatgcgtgcaaatggaccgctggtatgagccgccggtgagctttgacgggctggcgcggacctatcgcgccgctgtacatcacagctcgccgattgccgttaagcgtgacattctcagcagtacctacatcccccaccgcctgctcagccagcaggcttttgcccgtttcgtccaggattatcttgtgttcggtaacgcctatctggaaaaacggacgaacaggctgggcggcgtcctgtcactggagccatcactggcgaagtacacccggcgcgggattgaccttgatacttactggttcgtgcagtacggcatgaccacccagccttatgagttcaccaaagggagcatctttcacctgatggagccggacattaaccaggaaatctacgggcttcccggctacctctccgcgatcccttcaacactgctcaacgagtcggctacgctgtttcgccgtaagtattacatcaacggcagtcacgccgggttcatcatgtacatgactgatgcggcacagaatcaggaggacgtgaacaacatccgccaggccatgaaaagcgccaaagggccgggcaacttccgaaacctgtttatgtattcacccaacggtaaaaaggacggcattcagatcatcccgttatcggaggttgcggcgaaagacgagtttctgaacatcaagaacgtgagccgcgatgacatgatggcagcgcaccgtgtaccgccgcagatgatgggcattattcccaacaataccggcggctttggtgatgtggaaaaggccagccgcgtctttgtccgcaacgagctgatgccgttgcagaagcgtctacaggagcttaacgactggctgggtgaggatgttatctcctttgaaccctacgagctgggcgccgagtag

SEQ ID NO: 98289 - DNA, 450 bp, Enterobacter aerogenes
gtggatgaactgcagagggtggatgactggctgacggcgctgctggcaaatctggaacccgccgcacgcagccgtatgatgcggcagctggcgcaacaactgcgccggacgcagcagcagaacatcaggctgcagcgtaatcctgacggcagcggctatgagccgcgccgggtgacagcccgcagcaagaaggggcgcatcaaacgccagatgtttgcaaagcttcgcaccacaaaatacctgaaaaccaccgccagtgcggactccgccagcgtgcagtttgatggcaaggtgcagcgcattgcccgtgttcaccattacggactgcgggatcgcgtcagccgcaaaggcccggaggtccgctacgcagagcgccgcctgttgggcgtgaatgatgaggtggagaccatcactcgtgacactctgctgcgctggctggttaggctttag

SEQ ID NO: 98290 - DNA, 696 bp, Enterobacter aerogenes
atggagtttgataaaataaatgcattcttagccacagctataggtggactaatatttaaatggcttgcgggtggagtatcctctttttgggcatggctaaataagtcccatccagaagaagattttttggtgtccaaaatcggcatcacgaaaccagttatcaggcttagtttttgcaagtacaaacgaaacactaaaccgcacactaagaacaataaaatatttctcaccatatttggttctatagttatagccctatccgctgttggtttttatcaatttacgaaaattgttattcaaggaccaatacagtggatcgatttcaaatataaagaaacaggtgattcgttatggattagacaggatgaagcgagaaacaagccaaacagtccgaaatggaatatatctcctgacacctgccttaaccaaaaggcattagataaaatcacatcaataaaacccaaaaccatcgaattcatttgcggttatatgctaaatccaaaaaggcgagatgaattaggcatagcagccaataaaaactctctcggcctaatggtcatgattcctatagcttatttatctcttctatttttcttcatgcttggcactgccatgtttattgatttatatataaacgcaaaaatcaccttattcaataaatcagaagcagagaaaagttatcaatacctaacatga

SEQ ID NO: 98291 - DNA, 594 bp, Enterobacter aerogenes
atgcaatctgacaacatgaacgcacaactgaccgaaatcatgcgccttatcaccaacctgatccgcaccggaactgtaacggaagtggaccgggacaactggctgtgccgggtgaaaacgggcgagcttgaaaccaactggattaactggctgacgctgcgtgccggtggtgcccgtacatggtggtgcccgtcgccggatgagcaggtggtggtgctgagcatgggtggcaatctggaaacggcttttgtgttgcctgccatctactccaatcagtttgcgccgccgtcggattccgtggacggctgcgtgacggagtatccggacggaggctggtttgagtatgaacccgccaccgggcgttggcatgtccggggcatcaaatccatggtgatcgaggcggcggaaaatatcaccctcaaaactggtgagtttgtggtggaggctgacaccacgcgcattaacagcgaaatggtgatcaatggcagcgtcacccagggcggcggtgcgatgagttttaacgggatcgtggtggataaacacggtcacaccggcgtgaagtccggcggcgatacatcaggaggcccggtatga

SEQ ID NO: 98292 - DNA, 402 bp, Enterobacter aerogenes
atgaaatatttcacggcaaaaccggttggtctttatgacgacgaaaataatattattcctgctgatgctatcaatataagcgaggaacaatatcagctattacttgagggacagcgcaatggtaaatttatacaggctgattcttctggttcccctgaactggtggatgaattcctgttagcacatactgaattagttgctattgcaaaaggtcagcggtctgaattcctggcaacagctaatacagagattgcatggcggcaggatgcgcttgatgcgggaattgcgacagaagacgaaaccgccacgttggcagcctggagaaaataccgggtgctgctgatgcgggtggatgtatcgatggccccggaaattaactggcctgaacctcctgaagaataa

SEQ ID NO: 98293 - DNA, 3075 bp, Enterobacter aerogenes
atgagtgacaataacctgcgcctgcaggtgattcttaatgcggttgacaagctcacccgtccattccgaaccgcgcagaccagctcaaaagagctggctgcagccattcagcaaagccgcgcccgtttaaaagagttagatgcccaggcgggccgtattgacggtttccgcaaggccagtgctcagttagcagtcaccggcaacagccttaaagccgcacgcgaagaagcggctaaacttgccacgcaattctctgccaccaaccgcccgacggcggcgcaggcgcggctacttgagcaggcaaaaaaccgtgttacagagttgcagagtaaatataacggcttgcgtcagtcggtacagcgccagcgtcttgcgctcaatgaagccggactggacacgaaaaagctcagtagtgcgcaacgggaactgcggcagaatgccgacgaaacccggcaggcgctggaccggcagcagaaatccctgaaacgcctgggcgaacagcaggtgcggatgaacgccgtccgcgatcagtattcgcgccgtcttgaggtgcgggatcgtatcgccggggcaggggctaccaccacggctgcaggagtggcaatgggtgcgccagtagtggcggcagttaagagctatgccagcatggaagatgccatgaaaggcgtggcaaagcaggtaaacgggctgcgggacgataatggcaaccgcacgaaacagttttatgacatgcaggctgccatcaaggccggcagtgaacagctgccaatggagaatggcgctatagattatgccgcgctggttgaaggtggcgcacgcatgggtgtcatcaatcaggacgatccttacgaagaccagaagcgtgacctgctggcctttgcttccacggcggcaaaagcggcaacggcgtttgagctacccgctggcgaactggcggaagggctgggtaaaattgcgcagctgtataaagtccccacccgcaatattgaacagctgggtgatgcgctgaattacctggacgataacgccatgtcaaagggtggggatattatcaacgtgctgcagcgcatggggggcgtggctgaccgcctcgacttccgaaaggccgccgcgctgggttcaaccttcctttctctgggcgcagcaccggaaattgccgcgagtgcctcaaatgccatggtacgtgagctttccattgcaaccatgcaaagcaagcgcttttttgaaggtatggacttgcttaaactcaatcccgcagagattgagaaacagatgaccaccgacgcaatgggcactatccagcgcgttctggagaaggtcaacaagctacccaaagataagcgcctgtctgccatgaccatggtttttggcaaagaatttggtgacgacgcagcaaagctggctaacaacctgccggaattacaacgtcagctaaaactcacctcaggcaatgaagcgaacggctccatgcagaaagaatctgatatcaataaagactctttatctgcgcagtggttgctggttaaaacaggtgcgcagaacgctttcagtagtctgggcgaaacgctacgccagccactgatggacattatggattctgtaaaacgcatcaccggcgcactacgtcgctgggtggagaccaacccgcagctggcaggcacgctgatgaaagttgcagcggcgactgccgcgatcaccgttgcgctcggtacgctggccgtggcggtagctgctgtgctggggccgctggcggtgatccggtttggcttgtctgtgctgggtgtaaaaactttaccttctgtcactgcggcagtgacccgcaccggtagtgcactgtcatggctggcaggcgccccgctttccctgttacgtcggggaatggcctcatccggcggcagtgcgggactactgagtgctccccttcattccctgcgacgttccgccgggctggctggcaacgcactgaaagcggtagctggtgcaccgcttaccatgctacgcgcgggaatgtcaggcatacgtaatgttattggtatggtgatgaatccgttggcggcgctgcggggtgggttatctgccgctggcggcgtgctgcgctttttggtttccggcccgatggcattacttcgcgttgcgctgtacgggatttccggcctgctgggtgcgctgctcagcccaatagggctggttgtagctgcgctggctggtgtggcgctggttgtgtggaaatactggcagcccatcagcgcattttggggtggtgtggttgaggggtttaaagccgcagctgcaccgatcagtgctgcctttgagccattgcggcctgtttttcagtggattggtgacagggtgcaggctttgtggggatggtttactaatttgctcacgccggttaaatctacttccgaagaactgaacagcgcagcggcaatggggcgcaggtttggtgaggctctggcggaaggtctgaatatggtgatgcacccgcttgagtcgcttaaatcaggcgtatcgtggttgcttgaaaaactcggtatcgtcagtaaggaggcggcaaaagcaaaactccccgaacatgtaacacggcaacagcctgccacggtgaacagtgacggtaaggtagtgctgccgccaggcggatttccgtctttggggtttgcaggtatgtatgacagcggaggcacgatcccgcgtggtcagtttggcatcgttggggagaacggccctgaaatagtgaacggtcccgcaaatgtgaccagcagacggcgcactgccgcgctggcttccctcgttgcaggtgtcatgggcgcagctgcagcgcctgtagagtcagcaccactgcatccgtacagcctaccagcaatggcatacaaacaaagtcaacctgtgaaatctgccagcgtaccgtcagtgatccgttatgagattaacgcgcccattcatatcactgcccagcctgggcagagtgcgcaggatattgcccgcgaagtcgcgcggcagcttgatgagcgcgagcgcaaagccagggcgaaagcgcgcagtcatttcagcgatcaagggggatatgattcatga

SEQ ID NO: 98294 - DNA, 219 bp, Enterobacter aerogenes
atgatgaattgcccaaagtgtggacatgcggcgcatacccggagcagttttcaggttacggacagcacgaaggagcgttactgtcagtgccagaacattaattgtggcagcacatttgtcacccatgaaacggtagtgcggtttatcgtaacgccgacattaattaataatgcaccaccgcaccctttgccgggtggtcaaggacacatgaatttttaa

SEQ ID NO: 98295 - DNA, 1923 bp, Enterobacter aerogenes
atgcgtaaggttaagattggtgagctaatcaattcgctagtgaacgaggtcgaggcaatcgatgcctcagatcgcccacaaggtgataaaacgaagaaaatcaaagccgcagcgttaaaatataaaaatgcattatttaacgacaaaagaaagtttcgaggtgagggattaaaaaaaaggatatcgcctaatacttttaatgcctatatgactagggcacgaaaaagatttgatgataaattacatcacaactttgaaaaaaacatagttaggttatcagagaaatacccattatatagtgaagaattatcttcgtggctttctatgcctgcggcatcgattcgccaaaatatgtctaatttgcagactaaactaaaatcaataatgcacttagccgaagaattatcaaatataaaaataggcgcaaggaatagtgaggcaaagttaaataaattagcaaacaaatatcctgaatggaaatttgcaattagtgatttaaatagtgaagattggaaagataatagagatcacctttataaattattccagcaaggttcttcacttcttggggaactaaacaatttaaaagtgaaccatgaagttctctatcatctacagcttagttctgccgagagaacgtctatccaacaacgttggtctgacgtccttagcaataaaaaacgtaacgttgtagttattgattacccacgttacatgcaagcaatttacaatatcattaattcacctatatcctcattcgacttaacaactcgtcgtggtatggccccattggcattcgctcttgccgcgctatctggtcgccgaatgattgaaatcatgcttcagggtgaattttccgtcgcaggtaaatatacagtaaacttctcagggcaagctaaaaaacgctctgaagataataatttatcaagagaaatatataccctttgcgatgcaaaattgtttgttaaattgataaatgaacttcgttcatgtcctgctgcacttgattttgaagagctcttaaaaggatatggcgaaaacgatactcgtcctggaaatggccgagtcactgctattttatcaacggcttttaacccttgggtaaaaaaattcttaagcgatgaccgccgagtttataaagatagccgcgctatttacgctcgtattgcctatgaaatgttcttccgcgttgaccctcggtggaaaaatgtcgatgaagacgtattcttcatggaaattctcggtcatgacgatgaaaacacccagctgcactataagcagtttaaattggctaatttctccagaacatggcgaccagatatcggcgaggaaaatacccgtctggcagcacttcaaaagctggatagcatgatgccagatttcgccaaaggcgacgccggggttcgtattcatgagaccgtgaagcagctggtggagcaggacccatcgataaaaatcacaaacagtaccctgcgaccgtttaacttcagtaccaggctgattcctcgctacctggagtttgccgccgatgcattgggccagttcgtcggtgagaatgggcagtggcaactgaaggatgaggcgcctgcaatagtcctgcctgatgaggaaattcttgagcccatcgacgacgccgatctcgatgacggagaccaggaagatgaaacgctggatgacgatgagatcgaagtagacgaaagcgaaggagaggaactggaggaagtggacgacgctgaagaggccgaggaggctgagcaggaagagaaacatcctgccaagccaaactttaaagcgccgagggataatggcgatggtacctacatggtggagtttgaattcgatggccgtcattacgcctggtctggtgccgccggtaatcgggtagaggcaatgcaatctgcctggagtgcctacttcaagtga

SEQ ID NO: 98296 - DNA, 801 bp, Enterobacter aerogenes
atgaacgcactctctgttttctcgtttcaggaaaaccaccccgttcgggtggttctggttaatggcgaaccgtggtttgtagcggttgatatatgcaaggcattaggactaacgaacccgacgaagtccgtatctgcacttgatgaagatgaaaagcagctttttagcggtgaccctaactttaagttagggtcagcaggaaaaggggcgcagtcattgataattttgaatgaatccggcctgtacactctcatcctccgctgccgcgacgcggtgaagcagggaacgacggcctggcggttccgcaagtgggtcaccaatgatgttctgccagctattcggaaaagcggtgaatacagctacgtcgaacccgcgccaaaaatcgccggtgaaccattggactggcggcaaaaggaagaattacgcggcctgataaacgatatagcccaaagttttcagtacaggaacgcgtggatcagtggcgtctggctggcgcttcgtcgcgcctgcaggaacccttcacctaacccgattacggtcgacgatctcccggctattattgccgaattgcgccggatattagcggcggcagaaacagcgctgggtaatatgcgagcttacgaacgggagctgctgtgcaaagtcgttcgcggtggccatcagagtatgtcgcgcggagagttgccaattaccgatatcaatacggaaatggagaaggtgctgccagcgcatttcgagctggccatcaataaactggaggcgttatccacaaaattagaggctcctgccgtctcttcctga

SEQ ID NO: 98297 - DNA, 231 bp, Enterobacter aerogenes
atgaatcaggtgcagctaaacacccaaggcctgcttgaatcgattgaggagcgcctggcgcagatagaagcgctggtttcctctgcccatcggacgatctccagttacgaggcctcactgtatatgcaggaggcggcagaattactccaggttgcccgtgagctggtacaagaggcccgaagctgttcttcctctctgtcagcgcagctgaccgccagggaggccaaatga

SEQ ID NO: 98298 - DNA, 165 bp, Enterobacter aerogenes
atgttcaaattcaagtttgcggcgatctgccgtaccgataaaaaatcccatattcatcatctgtccactatcgcctcatccgagcgagaagcccgtcgccagttcgccagccgttttgttctcgttctgtcagcccgtatccgggttagcggggtggccgcatga

SEQ ID NO: 98299 - DNA, 168 bp, Enterobacter aerogenes
atgggtgaagcaacaataatgcagacattgagataccaggcgcttcaaagagctattggtgaattgatggcagcgcgcgagactatgcgattagaagaaaatggcgagtatgaccctctcgataaagtaatccaggactgcatcacaatgctgaaagacaatatgtga

SEQ ID NO: 98300 - DNA, 351 bp, Enterobacter aerogenes
atgatttaccgcaggggatgggtgccggttttgtaccggcatgagcttgagcgaaagctgaaagagcagggtttcgacaactggaaagagatatgtaattttctttgcggtgaaggggattactacgccgaatcagccaaaatgccagagcaatacgattaccaggtggtcgacaataccaaatggatggcaagccgtgacgcgacgttctggcagcgcctgaaccgcctgtggttcgtgccgctgtatctgctaacaattccgttccagtggcttatccgtgggcgtatggggtttgaaacgacatctaaaacgggcgcatttttcagccggttaaccgggctgaaataa

SEQ ID NO: 98301 - DNA, 297 bp, Enterobacter aerogenes
atggctaaagatatcgatgtacttctggaacagcaggcggatcagatgaccgccgtcttaaaaagccatgcgtcgcatattgaaagcatgctggcgcagcatcgctttcaggtcgcgcagctggcgttgcacaacagcccggaaccgttcgttcgtgaggtattcaaccacctgcgtgatcgcctggtacaagtcaccatcaatgaagctggccttgctgatgctgaggatgcgcggtacctgctgcgaatacttgatcgcatggaattgtcagcattagaggggaaaccattatga

SEQ ID NO: 98302 - DNA, 4005 bp, Enterobacter aerogenes
atgaccttacaagaattctatgcggatcgcttcggtagcgatccgtattcattgcttgaagcggcgcgggatgagctgtcagagctggccagaatggctggcattaactggacagcatgcgctgataacattcagttgaacccgcgcggcggggaagagcgttattctaaatataacggtcaagcacccgaggctctcgaaaagagcctcaaagggcgcgttgaaatctactcccgcaaggaacaacacaaaagcggcatcagctacccattcgtcaactttgtccagaaagggcatgacgaaggttcctggagcggcttctccttcctgttctccgaataccgccgtgaccaacaacgaaatcatgcgaccgtggtcgcacagcctgctgaagagctggcgcgtattgagcgccaggcggaagcacgtaagcgccgtctcgaacaacagcgaattaatgaccttaaaaacaatcagttagaacatgagcgtttgctcggctggttggcttttcacaatgcatgggaacacgcgccagctgaagacggttcctggccctacgcagtgaaaaaaggcattcgtgacgtatttagcgcttgcgatattcgtcgcgtgaccagtcacgacaacgcaaaatggagccgtgggccgactacatacatggcgattccgctggcccacctggatggacgcaaagacggacgcattgtcggctggcagcgtatcgaccagcgcggcggcaaattccagaccagcgcgatcacaagcggtgatttcgtcggggcatgttttgttattggcgacctgaaaggcgcgcaaaatgttgctgtggtggaaggtttcgccaccggcgcatcggtatggctggctacccgaaaagacccgaaaaaacgttttgatgccgtcgtggtcgccgttgctgcaaacaacatgatccacgttgtcgagcagctggtgaacatgtacccggcggcaaagattacctgcgccctggataacgaccgcaaatcatctgcagagggcaaaggcaataccggcttgcgtaccggctttgatatcgtcgccaaattcaatggcatcaaatgcgtttacccgacctttgaagatgatccccagctggagtgcagtgacttcaacgacctgcacagattacgcggactccgcgagacctgccgccagcttttcgccaaaggcaaccgcctgagtaccagcaccgatttgctgacactgacgctgaacaagctgaaaacggctaagtgtgataaccgccggacgttcgcgaaagaactgttaagcgcggtagatatcggcatgcttacctgcccggtaccgaatagcccgtccgatctgtttaacatgttctgcattgtgctgcgtgatatggggctggaaagcgtctatcgcgccacggttaaagaccacatcgcgcgtcgcctgaatcgtaaatgccggaccgcccaggctcctcgttcctttagcgagcgcatcaccgacccgaacaaacgtccccagcacatcacgtataagcgcttcgaaacatccgtaatgacggatgaaattctgcaatacgtgcagcagctgcagggcatcgttattgtccgcgccggtatgggttcgggtaagtcgacaggcctgcttcgcccgttgatgcataacgccgaacgcggcgtttccgtcgcgcaccgcgtaagccttattggtggcctgtgggaaatgatgaccgagcagaaaggaaccaaagccgatattctgcattaccaggaccccggctatcaggaaatggcgccatacgcgagcaagctgaccatttgcatcaactccatcgtgaaaggctgctggcaaccgctgatgcgccagcatgactatttcggctttgatgaagcaacgcagggactacgcgccgttctttctggccgcgcaatggaaaacccggtcgccgtttttaatacgctgattgacgcgctggccagaacggaattgcaccccatcatggttgacgccgacgctaacgatctgctggtcgacctggcggagctggcgatgaaacgccgcgaagaaatgggcctgccggcatggctgcaaattcacgttatcgaattgccggtcgacgttcgcaaccgcgaaacgggcgaacctatccgcgtattctacaccgagaaagatcgcatcatgaccgaggtgattaaagcggtggaactcggtgaaaaaatcatgctggcgaccgatagctcaacgtttgccgaagacgttaccgccacgctgcgccagcgctacccggaaaagaaattcctctgcgtaaaccagaagagcaagccggaaccagaggtcgaagaattcaccaataaaccgaaaaagatggtgaagaagtacgacggcctgatttacagcccatcgatatcctccggcgtctccatcgagcagaaacacttcgatcgccatttcgggatgttctgcggcgaagttgtccccagcgatgctatccagatgctgcgccgcgaccgtaccgccaaagagttcatcatcggctttgataaggttcgcgcgcgacgcgaaaccgacccgcaaaaaattgagcgcgcttttgtccaggcgctgctggccaccgccggtatgaacggcgaactaaccgacgttgtgtttgacggcgaccgcatctctatgggcgtggccaataccgattttaccaggatgaaaatcaaagcggcggcgacagaggcctccgcgcgtaatgactacgccagcaatatgatctgcattatgcacagcgacggctacaaggttgccccgctggcgtccgacgaactggcgaactccgtcggcaaggagctgcgtaaggaagcccgcgaaattgtctgggaacaaacgctggacctccacctgaatatcgaaacgccgagcgagtctgaacgtgagaccattctgaagaaacgcgccctgacactggaagaacaggcaaagctggtccgatgggacatcgagcatgagctgaagctaccggtcaccgaggacaacctgaaattctacttcgacggcgcccgcgataaggttcgccgttatgaaaccatgctgctcgatgaagtcaccgcgcgacgtttcgaccgcgaggaatccgcgatcaactttacatatgccttcaagcaaacaggccaatggcaatactttaccgccacggcgatgacccgcgagcaggccgatgaagcattccaggcgaaacaccctggcatcaccgattacaaagtcaaatcgacaccggcggtcgaggtcggcatgcgcggcttctacggcctcaaatctacggtgctacgccagtacttcattgattgcggcatcgacccggaaacaatgaccggagaagccacccaggcgcgcctggcgtacgccagggataaactcatgaccaccgaacggcgggacctgttaaacaacgtcctgcgcattggcggctttatgacgccgaagggcaagccgaaggttcccgaagcgctgtttaaaaccatctgcgagtcgctcggcctgaaaaccgacaagcgccgcgccagggacggggacaagcgcccgaccatccgttttgtggatcaggattcggcggcgttcatgatggatattctggcgaaccgccaggacgacggcctgtctctgcagttgcgtaaagccgagaaagcggccaccgaagtggatcacggtttggatctcaatatatatatggatcataaaacgcgatccacaaacggggatgatttggacgcccctcattcagtaatcactgaggcgttagccgagctgccggtgccggtaccggagacctgggcgctgaccgcgctgtccgatgatgaactggccacaatgaccacctggtcgccagccagcattgcgatgacctttgcgtccctgtacctcacagagttcatggaccgcctctccagcaacgaactgcgccgcttgcgtgaatatatcaccggcacagctacgggcggctacgacgcgcaggaggcgttttatggctaa

SEQ ID NO: 98303 - DNA, 609 bp, Enterobacter aerogenes
atgattaatcgtatgaatacacgaggcgaacgactgaaagcacgccgtttagaattgaagatgacactgaagcaagtcgcggaaagtgtgggtatctctcttcctggcgtccaaaacttagaacgtggcgacgttatgccgtcgctggagatcgggcttgccctggcgaaatgcctgcgcaaacctgtgcaatggatactatttggtactgaatctgatcctgaccgcgttcctgttattggcacaacagaaagtggcccggatagcgactggcagcctggagaacctgccaacacagaacgattcctgccgttcgttagccaacggaataccgtttacgcattaacggtcgggaaccagattcagcacaactaccagccaggtgacgtcatcctggctgactcaactcttacgccggttcccggcgaggatgtgttagtttgtgataatggcgggaaaatctcgatactgcggttagcgcgctttgatgatgagcactactacttagatggtgctaattctcaacgggttatccatgagaaaagtgatcttcaattcgtgcatcaaatagtcggtacgatcaaatcgttcatggtagagggtagatga

SEQ ID NO: 98304 - DNA, 738 bp, Enterobacter aerogenes
atggaacttgagcgaatcagggtctgtgtggccacggctctttcagatcttcattacctccagcgaggcatcttagaagttcaacttgagcagttacgtcttgccaattccggcaggtttactgataagccgacccgagtgattcaaatgggcgagagtaataaatatgaaatttcggtctctgcagagcaggttcgttatcacgttgggaaaacgtttaagcaatcctcaatgctgttaactgagctggattttcagacagccagctggcgcagagctattgaacaattagaacgtgaggaaatggcctggctgcgttattgctacggctgtaagcccgattttaaaaatgacgaggctatatgccagtggctatggcttgattttcttgtcgctcattcaaataccgattttaaaaaaatgaaagagcagacaaagaaaacgatgaagaaattaacttattacgccattcagcaggttaaagcctcgatattacgcaatgaggaaatagaccatttacgtgaggatgagcatataagttttttactgaatatcaccattgatagctggcgtaaggattacaaaaaacgctgggcattaatgaaatcacgatgcctgtatctgaacagtaccgcgttattaaacgcagcggagaagcgcagtgaaatcatcaaccgccatcgtacaggatgtgccgacctgcctgtgtcagcagattatgcacaggaaacccggtag

SEQ ID NO: 98305 - DNA, 609 bp, Enterobacter aerogenes
atgcttacttatcatcaatcggttttaaaaatgatgatggctaattggctaagaagcgattatgtcatcatcgatacggagacaactggtctgaaagattttgatgaaataatcgaaatcacgataattaatatgcgcggtgaaattcttttaaatagcttggtaaaaccgagccgccctattccaccagacgttaccgaaattaataacattaccaacgaaatggtcgctgatgcgccttcgtggcatgacgttttcccagcggtgctgaaaattattctgaagcataaatggctggcctggaactccagttttgatgcccgtctgatggtgcagacctgcctgaagagcggcttttttgacggcctgacacctcaccgcatcacctccatcattatggccatcgagacacgccatattgacgccaaagcgatttatgaccagtggcacggagagtacgacgagaagcggaagagcttcaaaaagcagagcctggcgacagcagctgcgcgtcacggagtttcaaccgctggcgcccatcgcgcgcttgccgactgccagatgatcctcggcgttcttaatcaggtttgccagcaggaggccgcatga

SEQ ID NO: 98306 - DNA, 135 bp, Enterobacter aerogenes
atgaactccgagctattcaattacagcctgaaaacgcttttggtactgaactttatcgccgatttggttctgttcgcggtgctgttcggttttgggtacggccttttatccctgcttgagtggtggctcgcatga

SEQ ID NO: 98307 - DNA, 333 bp, Enterobacter aerogenes
atgacagatatcacccggctgattaacagtattaagcgccgcacgtcctcagcaagagagcttggttacgatgtcctgttcgtgaaactcgatgacttagatgtcttggcggattcgctggagactgcgttgcgtgcaaacgccgcccaggccgatcacatcaagcagctgcaggacatgaaacaccagctggagtcaaagttagccaggccggtgcaactgccgaaaacaaacggctactggactgaagaagaaaaggcatatgaagaagctattacattcgctaaacggcagattcgccttgctggattccgttgtgagggggatgagtag

SEQ ID NO: 98308 - DNA, 681 bp, Enterobacter aerogenes
atggctaaatctgttgtctggtcactctttgatggctccgggattatgggacttccgtgggctgaatatggttacaccgtgtactgcttcaacgcttcatcaggcaatcatggcgagtacgaagggcgcaaggagcacccgttagtacaccatatcgacatgtggattgatggggactttgcgaagaagtgcgctgcgatgaacatcccgcgccctagcattatctttgcgttccctgactgcacagaacttgctgtatcaggcgcgtcgcacgagggacataccagccttgtttcagtagacaacgcgaaaatggtccagagaatcgcggaggagttcggcgctaaatggatggtagagaacccggtagggaaaatgtctacagaatggcgcaaagctgattactactttcacccgtatgaatacggcggttacatgcatgggggcgaggaaagtttccacccaaaaatgccagcctatgacgggtacacgaaaaagacctgcatctgggctggcggtgggtttgtaatgccagagaaaaaaccgggtccagtaaatattggcctgttctgggggtggcgctggttaggaggtaactcgccgcgcacaaaacaactccgctcacttacgccgcgtggattcgcaagggctgtatttttggctaatcggggagctgcgtga

SEQ ID NO: 98309 - DNA, 294 bp, Enterobacter aerogenes
atgtggcgaggaactgaccgcagcagaagccagatgatactagttgagtatcgttacgaccctaaatccaaagactccaaatccgtttacctggtgcggcatagcagctgctcccagcagacagttctggagcaattcctgacgatagagcgcgatagttttgggcgatttaccccgactatcgaactgaaagactttccgaggggacttagcgaccgcgagtcgatgctgaaactcgccgactggctgcaccgcttaggcgtggcgattgaagacaactggagccaaccatga

SEQ ID NO: 98310 - DNA, 267 bp, Enterobacter aerogenes
atgaccagcaaattaaccaaaaaagaatcggcctggttcgatgaagttaatgcagtgctggcgcgctgcccgtcgccggaaaaattcggcttctacactatcggcgatcctaacgtgatggtgtacgacaagcgtaaagagaaagagattgagcgcaagcttgatgcgcggtcatcttccgattggtgcgtagctgtacgagatgcggacgctgaaatcgacgccaacatttattttccttcagctgtgttgagtacggcaggataa

SEQ ID NO: 98311 - DNA, 780 bp, Enterobacter aerogenes
atgaccaataaccagttaaccaaagaatggctacagcagactatcgccgaactggagtctgtacgcgatgaaattccgttcgggattgacacaaatagcgaattagaactggctgctttcaagctggcgctggccgcaatggataacgagacggtaggtaatgaattcatccccaaaaatctcgacaaggcgctcggtgtagttggtatggcccttcctgagtcaaaggaagagtttaacttccagatagagcgatggattcaacgattgattgaccgggttattcgttacgctgatgaattcaaagagcagccagcaccggtcgcgccggaatgtcattcgatgtttgatgtagtgaccagcatcttggatggaattgacaggacagaattagacgatggttggtgggaaacctcggcaggagcagagttcggcagagagaagctggaagagatacgctcctgcatgatcaaaaagtcagctgataaaagcgcctttcttcagcatgcggaaaggctggccacggatgcaaaagaactggcggaacgagtccagcgcaacgacgtaaaagcgttaaccaccagcgaagagcaccggcagctgcgtgaccttgtcatgatggtgaagatgctctgcagaacggtgagaaagtacaacccggaaagccagcaggcggcaaattttaccgcctatttgcaaaaggaaggtctgatatcggcagctgattgtctgcgcgattccgatccgctggataccgagtcggaggatcgccgtggctaa

SEQ ID NO: 98312 - DNA, 327 bp, Enterobacter aerogenes
gtggctaaaacccctgcagaacggcaacggcagcgccgtgaacggttaaagcagtccggcaccaccagacgcgattgggtactggagccggaggaactgcgcatgctgggtgagatttgcgtccagcgtcgcccaggtagaacgccgtattcagaaaatgaagtaatcggcctgttgatccgaaagaactacaaggcgcttcaaaagagcctggcgaacacatgccagcgatgtggtcaggcgctgccggtgtctgaatgcatcttcgacggcgaaaattcatgcttactgacgactaccagactaaagctggccattaaggcgtga

SEQ ID NO: 98313 - DNA, 228 bp, Enterobacter aerogenes
atggataaatcgacgttacttttggagaaactccgggagagaactcaaagcagcctggccagtggtggggacggctttgttttggcatcgatgctggtctttgatgtgggcctcaactcccgaaccataaggaaaatactggatgttgcagtcaacaccggaaccattgaaaagagggaaagaggagtaggccgcgctcataagtatcggacaaatctgcaaatttaa

SEQ ID NO: 98314 - DNA, 204 bp, Enterobacter aerogenes
atggaagatacggtcctctctaattgtgaaaggctcgacgctaagctgagcgatatcgatgcagtgctggatatggtatcagtggcgatggcttcgccggaggccagcttgcatatggcccaaactatgcgcctgatttgtatgtcacgtaagatggtgcagcggtgtcgggatctaaacaaggttgaaggcaaaagccactaa

SEQ ID NO: 98315 - DNA, 288 bp, Enterobacter aerogenes
atgaaagtaaaaggcatcccatttaaccaggttaaagaaaatctgctcaacaccccggaggcaatccggggttaccaggaagcagataaagaactggcactggtcgaaatgctgtacgacatgcgagaaaaggccgggttaagcaaatctgccctggctgaacggatggggatcacaccatctgcgattagccgcctagaggggaaccctttaggggccagcatgaagacgctgagcaagtacgcgcaagcgtgtggcgctgagattaatattcaggccgtttattaa

SEQ ID NO: 98316 - DNA, 309 bp, Enterobacter aerogenes
atgtttaacgtgataacccacccggcagcgctggaagagttacaggaactaccggacgagttacgaggtcgcatgacccgactgattgaaagattggaaagtgaaggaaaactaaaaatgcctcatagccgcgtaattggcgccgggctttttgagttaagggttggagacaagaacatagcaagaacgttatacgcttacgcagtcggccacgaaatctacctactgcatgcgtttgttaagaagacacagaaaaccccaacaggggccatagagatagcaagaaagcgcctgaaggagatgagctaa

SEQ ID NO: 98317 - DNA, 222 bp, Enterobacter aerogenes
atgaactatcaaggcaacgaaaaaatgagacaggacgcggctgaaattgctaacgagctgtatgaagtctggcagaaagtgaagcgtttccagcgtgagtacagcttcaacagcgagaacattacagacagactggcaggccgactggttggaacaatggaaccaacactggccgacctgaaccgctttatggccgatgttgattaccagttcgaagactaa

SEQ ID NO: 98318 - DNA, 228 bp, Enterobacter aerogenes
atgaacgttaaagagatccgcgagacaatgaccgaagcggccttgagcgttgagtgtgtaatgcgggggcatccccgcattaccccgcaggaattaagcgacgcctgcaacgttagcctgccagcggttgagtttattatcgagcagatgctttgtatgggggtagcgcagcggggcgcttttgggcggtactcactgaccccggaatataaaaacggcaacttctga

SEQ ID NO: 98319 - DNA, 1062 bp, Enterobacter aerogenes
atgaaaaacactgtaaaaataaacagtgctcaacttgtgcatgcagattcactggaatatatcaaaaccctgccggacaacagcttagacgccattatcaccgacccgccgtattaccgcgtaaaggcgaattcctgggacaaccaatggcctaccgtaacggattatttagcctggctggatgagttcttcgccgagttctggcgcgtgcttaaaccagccggttcgttatatgtgttttgtggtccgaaattatcgtcggacactgagctgttgttgcgtgaacgtttcaacgtgctgaaccatatcgtctgggctaaacccagcgggcgctggaatggcgctcgaaaagaaagcttccgttcttatttcccggccagcgagcatattttcttcgcggagcattacggcgcagaagggtttgcaaaaggccagactggatacgcgacaaagtgtcagaagttgaagggtgaagttttcgaaccgcttatcaactatttccgcgatgctcgccagcggcttggtatttccgctgctgaaatcaacgaggcaaccggcacgaagatgtgtagccactggttcagcaccagccaatggcagctacccaatgaacggcagtacctggcgctgcaggcgctgtttaacagaaaggccgcagagttaggaacaacaggacttgccgagccgcatacggcgctgcaggaggaatacggcgtgttagcggcgcaatattccgaactggttgttcagtattccgagctgcgtcagcagtatgagaacctgcggcgaccattccgtgtgacaaaagacgtcccgcacaccaacgtgtggacgtatccaccggttccgtactatccgggcaaacacccttgcgaaaaaccgctgcagatgatgctcgacatcatttcggcttgtacgcgccctggcgatgttatcgccgactttttcatggggtcgggtgcaacgattaaggccgcgctgcagttagggcgcgaggccatcggcgtagagctggaagaggagcgatttttacagacggtctccgagatagaaaaacaataa

SEQ ID NO: 98320 - DNA, 492 bp, Enterobacter aerogenes
atgaattatggactggtgagcaagcaagacgcgcgcctttacgccgaagcggtttgcgatgtgatcgggaatggtaaagccaatgcggcggttctgctgtgtgtcgaaacggctgcagccgagacattgctgggcgattacaaagaccctacgccgaccagcgccggaaccggattaacccaggttgatctcggtaccttcgaatggcttcgcgataagtacaaaaacagccgttacgccgccgttctgctgaatcagtttggtatcgacctgggccggacggtttaccaggagctgagaacatcaccgctcatggcgatgctgttttgccgcttgcgctatttgacggtcccggagtcgattccggcgacccgcgaggctcgcgccgcttactggaaaaagtattacaacacctcggcaggcaaaggcacgccgcaggattacatcgataaatgccagcgcgctggcgttgatgcgctattcacgcagtga

SEQ ID NO: 98321 - DNA, 471 bp, Enterobacter aerogenes
atgaacagtttaaaacgtatggctaaagcctggttgttgatgaatgctgccttcgcccttctggtgctggctgcgcccccggcgatggctaatgaaagtctcggtctggatctggattcaattctgagcgccctgccagctggctgggccagcggcgtaactgccgtatttatcgtgctgtatgcggtggcgcagctgcgtgccgtacttcccccatcagtgaccaaaagaatccccaccgtggtcatgaaaattctcgaccttgttgccgcgaactatgcccatgcccggaacgccgatgcgatcagcaaagtagcgcgggatgccgggaaagccaacggcccatcagatgatgattttcgtgtgatggtggagacagccaaaaacaatggagagctgcgtggaagccgcattgagagcgctggcgattatcctggagatgatcggccaggcagtaaaagtccgaaatga

SEQ ID NO: 98322 - DNA, 219 bp, Enterobacter aerogenes
atgcgcgtaacaacccggctgattatctgcgtcgctttggccgggtgcgcgaaatcaaccccgatgacaccaatactgaatccggctccgtgcgcagcggaaaaaccggcgattgatgtggttcacgtcgatgggcatttcgttatcgctgatgacgatatgggaaaactgaccggttacattgccgcgcttgaagcgggctgtaccgcaccgaaatag

SEQ ID NO: 98323 - DNA, 312 bp, Enterobacter aerogenes
atgaaaatttatattgctggcccgatgaccgggcgagagaactttaaccgcgaggcattcaaaaaagaggccgaccggctgacccttcacggtcataccgttctgagtcctgccagcctccctaatgggctggagcagcgcgaatacatggatatttgttttgccatgctccgttgcgctgacgcgattctgatgcttcctggctggcagacgtcctccggcgctacggcggaatatcactatgcgtacaaaatggagcttccggtttataccacggtgcattatccgccggtcgcatggcagaaaaattga

SEQ ID NO: 98324 - DNA, 846 bp, Enterobacter aerogenes
atgatccgattcgatgaacttacaggcggagcaaaggatacgctctttgctcttttcttccgtggagcacttccgtcaggagatttaccggcgaagagtggcgcagcagaattacgcgagcgaggtcttgctgaaagcgggaataccgcgatggcatatcaaggggaaaattacttcacctggttgacgcctgcaggcttgaagttctgtgttgagcattttgttacgccgcgctcttgtgccatggatattagttacatgttcaagacaccgcccgacgacacagttaccagctatgaagggcaactttgcggtaatagcatcgagcaagaaacgctttcggcggtgctagtgcatttcctgcccactactaacctggataaagccagcgatcacgctgtaaagctggcatcggctgtcaaagcttcatttgccgaattggatcgccctacaggtggtgttgttagtggcgaatatgctccccttcgaatttttggcgaaataggcgatccaataacaatccccgcatcgaccatcaagccgggcgctgatggtgagggaaagcaggattcaaccattacggtgaagatcaatgtggatgccagcgaagcgatgaagtcgcttgatgaacttggctctatggcgaagaaaatcggcgctattgtggcagaagcacttcaacaaaacggcagtatattcagtgcaattaatcaacgagagcgtgatgcagcttctctcgatgatttgtcggcgcgagtgagtcagctggaaaacgtagtcaactctcacagcgctaagattcaaggtttagatctccgtgtgcttcatgctttatcgggcagatag

SEQ ID NO: 98325 - DNA, 384 bp, Enterobacter aerogenes
atgtttacagttaagacaatcatcaacggtgtgactcacatctgcgaacagccaagcgtgacaattgcccgtgttggcagcgatcggttctatgacattcttgagcagactaacgaccactcaaaccctgacttcgccatctggctgccagcggtctattcagatccacagtgcaaagatgcgctacaggaagaggagttaattgtcagcgagcgcgagggtgttctggataaaaatgccatcgccattctggtagaagacttcgaaagtcctgagcatgcaaaacgtaaggcattcgatggtgttcgatatcagtacatctatcctggcgatcaggtttatgtgatgaactcccacggctcgaccatcgaaacggtgaagtaa

SEQ ID NO: 98326 - DNA, 201 bp, Enterobacter aerogenes
atgggttatacccgctgtacttactgcggttcggggttccatacgcgagctaactgcccgaaaacgtggggaggttcatcgcatcgcgccaatctgcgctgcagttattgcggtcagtccgggcataactcgaatgcctgcccacacaacgcgagaagcggtcgtcggcgcagcctgaatgacgacttccacctcgactga

SEQ ID NO: 98327 - DNA, 249 bp, Enterobacter aerogenes
ttgctgatggagtactgcaataccgtgcagctgctgtacgacgccaatcaggaaattaaaagcgatggccttggtgatgataccgcagccggtggccagaaacttggcgcagcagtaaaagcacgcagccgttatatcagcgaattaattcgactctccgttgtattaaagctggaccccaatagccgcatcctgaagaaacagcccggagataataataattccagcggtgagttcgacgatttttaa

SEQ ID NO: 98328 - DNA, 1710 bp, Enterobacter aerogenes
atggccgcatatccaaacgtcaatgtggcgaacaaatatgcgcgggatattgtagacggaaaaatagtcgcctgcagagctatccggctggcatgccagcgccattttgacgacttaaagaaatcactcgatagcaattacccttaccgattcgaccgggatttagcagaaagagcctgccggttcgttcagctattacctcactccagcggcgatttagccggacagaaattaaagctggaaccgtggcaaacttttatattcagttcgatttttggctgggtcacgaaaaaggataaaaaacgccgatttcgcgaagcgtatatccgggtagcaaggaaaaacgggaaatcgttttttgctgccgggattggcacctacatgttctgcgctgatggtgaaaatagcgcagaagtgtattgcggtgcgacaacaatggcgcaggcgaaaaaggttttcaccccagccaggcagatggccagccgcctgccagcactacgcgccagatttgatatttcggtatggaccgacagcctgacccgcccggatggttctgtttttgcgcctatggcggggaaacccggcgatggcgatagcccgcattgtgcgatcattgacgagtatcatgagcatgatacggatcatatgtatgaagcaatgacgatgggtatgggcgcccgttcgcagccattaacgcttatcatcacgacagccggttcgtcacttgagtccccttgctatgacaaggataaggaagttaaagaggttatcgaaggcattacccgtaatgatcgcctgtttggcatgatttacgaactggatgctggcgatgactggaccgacccgaaaaacttaatcaaagctaacccaaatctggatatttcggttaagtacagcgacctggttgagcttctggaagtggcaaaacaggttccccgcaaggttaatgcctttaagaccaaacgtctcaatatctgggtatccggtaaatccgcgttctacaacatggagcagtggaaagccgctgaagaccctagtcttgagctggcagattttgccaacgacagctgcaacattggtctcgaccttgcgaaaaagctggatatgaacgccgggatacggttgtttacgcgggaaattgaaggtaagcggcattactactgcatcaagcctaaattttgggtgccagaagacacaatcaatacaaccgatccaaagctgctgaagacggcagaccgataccagaaattctatgaaatgagggttctggaggctacagatggcgctgaggctgattatcgggagattctggccagcattctcgacatgcagggtgaaacccgcattgacgagattgatatcgaccctgcaggagcaacagcgcttcgccaccagttggaagataacgggtttaccgtcgtcgatatccggcaggactataccaatatgtcaccggcaatgaaggagctggaagcggctctggccggtggccgattccaccatgatggcaatcccattcttacctggtgtatcagcaacgttatcgggaaatttatccctggtagcgacgatctcgttcgccctacaaagggagacaatcaaagcaaaatcgatggggccacggcgttatttaacgctatgactcgcgcaatgctgaatgaaagcagtggcggtacatcggtatatgatgaggaagatgtagcgtgttaa

SEQ ID NO: 98329 - DNA, 1287 bp, Enterobacter aerogenes
atgccacagattgaagaattgcgtcgtcagcgtgcgggtatcaacgaacagattcaggccctggcaaccattgaagcgaccaacggtacgctgacagcagagcaactgacagagtttgctggcttgcagcagcagttcactgatatctgcgccaaaatggatcgtatggaggcggctgaacgtgcagccgcactggtcgcgaagccagtcaaagctacccaacacggtccggcagttatcgttaaagcggagccgaagcaatacaccggcgcaggtatgactcgcatggtgatgtctattgccgctgcgcagggtaatttgcaggatgcagcgaagtttgccagcgacgaactgaatgacccgtccgtctcgatggccatttcaactgccgctggttctggcggggtacttatcccccagaatattcacagcgaagtaatcgagttactgcgtgatcgcaccatcgttcgtaagttaggtgctcgctcaattccgttgccgaacggcaacatgtcgttaccgcgtctggccggtggtgcaacggcgagttataccggtgaaaaccaggatgccaaagtttccgaagcacgttttgatgatgtgaaactgacggcgaaaaccatgattgctatggtcccgatctctaacgctctgattggtcgcgctgggtttaacgtcgagcagctggtcctgcaggatattctgacggccatctccgttcgtgaagataaagcctttatgcgtgatgatggcaccggcgataccccaattggtatgaaagcgcgtgcaactcagtggaaccgcttgaagccttgggcggcagacgcggcagttaatctggatacgattgataagtatctggattccatcatcctgatgtcgatggatggtaacagcaacatgatcagcagcggctggggtatgtctaaccgtacctatatgacgctgtttggcttgcgcgacggtaacggtaacaaagtctacccggaaatggcgcaagggatgctgaagggttatccaattcagcgtaccagcgcgattccggcgaacctcggagagggcgggaaagagtcagaaatttacttcgctgactttaacgatgtagtcatcggggaagacggcaacatgaaggtcgatttctccaaagaggcctcctacatcgataccgatggcaagctggtttccgcgttctcccgtaaccagtcgctgatccgcgttgtaactgaacacgatatcggtttccgtcacccggaaggtctggtgctgggtaccggtgttctgttctaa

SEQ ID NO: 98330 - DNA, 459 bp, Enterobacter aerogenes
atggcaggaaaaacaacgaaaacagcggcgagcaaagatgagacgactactgatgcgtccctggatgcttccagcgcgagtgatactgtcgttgatgcggccagcagtaataccggtgacgccacaggtggcgccgacggtggtggtgatgctgaaggtggggaaaatacatcaggtagcgacaccgatcccgacgcgtccgtgggtgagcaggacaataccggctcagataatagtcaaagtgggaagcaggcccctgcggaggtaaagatgtcagaacgtaaagccgttacattcctcggcccacaccatcgttattcacgcggtgatatcgcatgttttgacagtaagtacgcggaagagctggtttctcgcggtattgcggtatggccgaaagacgctaagcgcgcgatgacgcccaaaccgggagatagcgactttgatactgacattggctga

SEQ ID NO: 98331 - DNA, 318 bp, Enterobacter aerogenes
ttgatactgacattggctgaggtgaaaacccagcttcgcctggagctggatttcacggagcatgacgccatgctcacgcagatggttaacgccgcgcagcggagtatcgagcgtgattattactgcaagttggtcagcaatgatgcagagctgcaggcgctcccggagacggaacgcggattcatcgcggacgaagatatcaagctggccatccagtatctggtcagtgatgcatacctgaatggccacaccgggcaatggctggaaaccgcagcagtgaagtatctccttttccctattcaggagcacaccgtatga

SEQ ID NO: 98332 - DNA, 339 bp, Enterobacter aerogenes
atgagcctgaaaccgggagagatgaactgccgcattacgattagctatcttcagtccggtcgtgggccgttgggcgaaccgctgccggaaaagttagttgaatcgggaaaggcctgggcaaagcgggagctggtatcgggtagaaaagtccgcacgatggaccaacagcaggttatggaaacctgtttgtttaccgtctatccgggcgtggtggtcgatatcgactggaaaatcacgacaaaagacctggtttataccgtccgaaatatcgaccgaaaaacggaccagatcatcattaccggggaggcagacgggcggcatgatagaactggcgattaa

SEQ ID NO: 98333 - DNA, 390 bp, Enterobacter aerogenes
atgatagaactggcgattaaaaatgagctggagcgcatcaccggcatgaatgcgtacccgcttttactgccggatacggtccaggaaggggtgacctttcagcgtatttctgacccggaaatgtactcgggaacattgcggacggggatcgtatcggcccgtatccaggtgaatctatatcgtgttgatgattacacctcactgctgcagctggataaaaaaatctggtcggaatggaagtcaatcgttcatggccagctggatagcatcccggtccaatatgttgagcgtggtggcattcaacaggataaaacgacgctgacgaaccgcagcatccagtaccgcctgattcgcgacttcatcattcactatgtggaggatacatcgtga

SEQ ID NO: 98334 - DNA, 402 bp, Enterobacter aerogenes
gtgattcggatggaagttaaagggctggatgagctggaacggcagttaaccgccctgggagaaaaggtcgcgacgaaggtgttacgggatgccggtcgcgaggcattaaaggtagtcgaggaggatatgaagcagcatgccggtttcgacgaaacgtcgaccgggcagcacatgcgggattcaatcaaaatccgctcctctacccgaaaggcgcaagggaatgcggttgtaacgctccgtgttggccccagcaagcagcaccatatgaaggcgctggcgcaggagttcggcacggttaagcaggttgcagacccctttattcgacccgccctggattacaacgtccagacagttttgcgcgtcctgaccgtggaaattcgaaacggtattcaaaacaggtag

SEQ ID NO: 98335 - DNA, 468 bp, Enterobacter aerogenes
atggctgagaatcagacatcgcctgagtatgcaatgttgcctgcaggcacgctaaccaaatgggggaaacccggcgacgcgctggcggcgttgaagccgcttgataactgtaaagcgttgggtgcgatgggccagaccggcgggtttgttgactgtaccacgctgaaggataagcaaaagcagtccatcagcgatctgccggatggcccggaaaaatcgctggggttcattgatgatcctgcgaatgcgagctttacggcgttacttaatgcggcagaggcccgcgagaccattcagctttatgttgagctgccgaacaaacgtaccgcaacaatgctgctggcattgtctggctggcagatgaatgaaatcaccgcgccagcgagtgaagtaattcagatcaccgtgcaaggcaagcaaaacagcattaagtggggtactgccggtgccgatgctggcggcgaataa

SEQ ID NO: 98336 - DNA, 369 bp, Enterobacter aerogenes
gtgaaagataaagattttgacctgtccgcgcttaagtccgcgcttcttaaatcagtcccgacggtagttaaaaccgagctattcggcgcaaaagtttatatccgccgcctgaccggggatgaactgattagctacgaagaaaaaatggtggaatcaacaaaagctggggtaccgcgtgaggcatccgagcatttagtccagatcattatcgatgcgttggttcagccagacggaacggctattcccgatgaattaaagccaacggctgcagagctgctgaaggcccatgaaaacccagagctgctggaagccgtggagaaggtgaaacgccactctatcgggacgctggaggaagcggaaaaaaactaa

SEQ ID NO: 98337 - DNA, 3378 bp, Enterobacter aerogenes
atgcgcggcagtcatgagggcattaaagtaatggcagacgtcgcatctttagcggtcgggctgcaccttaacgcagccaactttaaatcccagcttctgggagcgtatggcgacgcggagaaccagtccaaaaggtttaaccgcaatgcccaggcggacgcgaaaaagacggaagacgcctataaaaaggtcggcctgtcgatatccgggatggccagcaggctggcggggctggcaggcgccggtctttccataagtacgatcatcacaacgtccaggcagtatggccaggcgctatctgacctgcaggcgatcaccggcgcgaccgctgatgaaatgaaagcgctggatctggccgcgcaggaaatggggcgcacgacagagtacagcgccagccaggcggctgaggcgctcaagctgatggcatcggctaaaccggagctgcttaagacgtcagatggtctgcagcaggcgacgaacagcgcgctgattctggcacaggccgccggaacgacgctcccggatgcaacaaaaacgctcgcgctttcattgaaccagtatggcgccagtgcgcaggaagcggatcgttacatcaacgttctggccgctggcgcgaagtacggttcatccgaaattacggatacggcagcagccattaaaaatggcggcgtcgcagctgcacaggctggcgtcggttttgaacaactgaatgcggccattcaggttctggccgagcgtgaagtgaaaggtggagaggcaggaacggcgctgcgaaacgtcatcctgaatctggaaaagggaacagataaaaccctgaaaccttcggttgtcggcttaagccaggcgctcaatacgctggcaggcaagaacctttcaacggctcaggcggtgaagctgtttggcgtggaaaacctcagcgcggcttccattctcgtacagaaccgttcaaagcttgatgaattgaccgcttcgttgaccggtactcaaacagcgcatgagcaggcatctatcagggttaacaacctgaacggcgatctgcttgggctgagtagtgcgtttgaggggatggtcattaagattggccagagcagtaacggccctcttcgcagcggtattcaggccgctacggaggcgctgaacggcctggcggataactttaataccgtctccagtattgcgctttacagcctgattccggttctttccacaaaactaaccgcagggctccgggaaaatatctctgtctggcgggaaagccaggcggcggtgaaagcgagagcacttgctgatgcagacatagcccgtaaaacgctggattcaactgcagccatcctgaaacaaaacgatgccgagttcggttactaccggcagatggagcggacagctaaacagtacgggatgaatatcagttaccaggatgagtttacccggcttatccgacaggaaactgagcaaaccaatctggccagccaagcgaaattgaagttggcggcggctaaccggcaaatgtcgatatccgcccgtgcggcatcggttgccgtaggactggcaaaaggcgcgtttaacttaatcggtggccctttcggtgccgctatgctggccggttcagccattctttattttcatgagagggcaaaagaggcccggcaatcagccattaatttaaaagacgccgtcgttgaaaccagcgaagcgctgatgcgcctctctctcaaccagctaaatgtgaagcaattcgacctggaggatcagtatgaaaaccaggttgttcagcggaaccagctgattaaagagattcaggatgccgacagccgtattggcagtctaaaaggctttgaccccttcggccagctggatggggtgaaaaaagaccagacgcgagcgcgggcggacctcgatagcgttaacgagggattgcgtaaaacagaggaaaatatcaagcgtgtcagtgatgcaaaaacactggcccagcttggattgtctggaaaaattacgtccctgactgacgacctgaaaggcgcgctgagttcgccccctaaagagactggcgacgggaacccctggaccggggatggtggtaccggctccgggaagggtaataaggctaaggtcgaccagttcaaaacgttacggcaacaaattgaagaggcccatgcatccagcctggcccgaattaaccttcaggaaaaagacagcaacagggagctgcaggaagcagcgaagaagaatggcgccagcgatgccgaccttcaacgcgcgctattgatgaatgcggagaactaccagaagcagcgactggatctggccgcacagtattcaccggcgcaggaaaccttgcgcaaggaacaggaagtcagccaggaccttgccgagcttttcaaagcccgtcttcttaccgaaaaagattaccagactgcccgaataactctggccagggataccgccaaagagttactgcaggcgcaggctgacgaaatcgcggctcctaaactggatatcgccggtgaagttgatccactggtagcgcttcgtaatcagctagcacagcggcaggctttactgcagtcgtactatcagggcagcgcgattagcaaagaccagtacgaaatgctgatgcagaaggcgacgaaggagtccgccgatgcgcagtatcagacctcgctggagctatatcgatcgcagggtgaattccagagcctggccgttgggctattcgagacggcacatgagcgctccacgaatttcttaacgagcatgctgacgcgaacccaaagcttcaaggaaaacatggttggcctgttttcctcgttgacgcaggcagtcatcaaaaatctcattgatatggccgcgcaggcgctcgtcaccagttccatcatgcagaccatcatgggagtggttggaattggaagcagcatagcgggtggtgccgcctccggcgccgctggcgccagtaccgggacggcgatccagaatgcgggtagtagcttccagtttaacgccaaaggcggcgtctacgattcaccttccttaagtgcctatagcaaccaggtccacgataccccgcagttcttcgcctttgctaaaggcgctggtgtatttggtgaagcagggccggaagccattatgccgctgacgcgtgccggtgatggctcgctgggggtacgtgcggtcggaggcggacagaacgccagcaccaccgaagggccaaaggtctggatcactatttccggcgataagacgtctaccgagagctcgtcaggttttgaagagtttggccagcaaattgggtcgttcgttgagaagaaataccgtgagctgcaggcgaaagatatgcgcccaggcggtgctatctggaacgctttaaaaggacaacgctga

SEQ ID NO: 98338 - DNA, 339 bp, Enterobacter aerogenes
atggcgatagaaatatttacctggagtccccgagtaaacccaacgcaaaccgtgaatttccgtactcgaaaggcgcagttcggtgacggatatacgcaggtatcaggggatggattaaatccccggtcacaggaatgggagctgaattttgtcggtaccgaagactatatccgaccgataaaacagttcctggatcgtcatggcggcacaaagtctttccagtggacgccaccccttgaagatattgggcttttccgttgtgagcaatataaaccagtaccgatgggtggagggaactactccttgtcggcaacctttattcagggatttaaaccatga

SEQ ID NO: 98339 - DNA, 756 bp, Enterobacter aerogenes
atgagccttaacgcagattatcagaagctggagccgggtgattcaatccggctttttgaaattgatggccgttctttcaatatgggcgaggttctatattttcacggctataatattccgcactcagccgaggaaattattgcagccggtggtgatgagtcgaaattgccagctaaaagtatctggtggcagggcaccgaatataaagcatggccatgcgatatcgacggcatcgaatcgtccactactggcagcgatgcgcagcccacgctcaaggtgggtaacgtagacgggaaaattaccgcgttgtgtttgcattatgacgatctggcgatggcgcgggtcaccattcatgatacgcagaagcaatatctggatgcgcgaaacttccctgaaggtaatacaaccgcggacccgacgcaggaaaagcgccagctatttttcattgactccaaaagcctcgaaactgatacggatgtagagtttaccctttcaagcccgatggacctgcagggaatgatgattcctacccggcaatatcattcggtttgtacctggtgtattcggaataaataccgtagtggcgatggctgcgattatgccgggacaaagtatttcgacaagaataacaagccggttgatgacccatcacaggatgtctgcccaggaacgcttacggcctgcaaattacgtcatggcgagcataacgagctgccgttcggcggattccctggtacgtcgctgataaggagctga

SEQ ID NO: 98340 - DNA, 711 bp, Enterobacter aerogenes
atgcgccagaaaacgattaaggcgatacaggctcatgcggcagctgattatccgcgtgaggcatgcggattgattgctcaaaggggaagagtggaacgctatttcccctgcaggaacctggccagcgagtcgaatgataatttcgtcttgtctccagaagattacgcagaggtagaggattggggaacgattatcggcattgttcacagccatcctgatgcgaccacgcaacccagcgaactggataaggcgcagtgcgatgcaacgctgctcccctggcatattatcagctggccagaaggcgatctgcgtaccatccacccacgcggagagttgcccctcctcgagcgaccgttcgtgcttggccattacgattgctggggtttggtgatgagctatttccggcagaaccacggcatcgagctgcacgattaccgcgttgattatccctggtgggaaaacgactatcccgaaaacttctaccacgattgctggtatgaatgcggattccgtgaatttgatggtcccccgcagccgggtgatatggtgatcatgcaggtgcagtcggacaaatggaaccatgccgggattctgctggaaggtaacatgctgttgcaccacctttatggccatctcagccagcgtgtaccgtatggtggatactggttagacagaacgatgaaaatcgttcgatatcattctctgtgttaa

SEQ ID NO: 98341 - DNA, 600 bp, Enterobacter aerogenes
atgcaagaagtaatgacgcgaattgaattgagcggaccattaggtaaaaggtttggaaaaattcaccatcggctaatttcctgcacacatgaagcaggagaagcactggcaaaaaccatcccaggctttgaaaaattcatgatatccagtgaggagcgtgggttaacctatgcagtattcaaaggtgacaagaatattggagttgatgatttaggttttcctgtaaccggggaagtaattcgtattgttcctgtaatcattggtagtaaaaaagcgggagcattacaaacaattcttggtgcagttcttgtcgttgtcggcgtcattgtgggttatgtcagtggtgggactttatctaccgtggggtatggagcagccaaatttggcgcggccatgatgttaggcggtgtcgtccagatgctttcacctcagccagcagggctggcccgtaaagaatcccccgataataaagccagctatgcctttggcggcgtaaccaataccgcctcacagggttatcccgttggtttgctttatggtaaacgccggattggcggcgcgattatttccgccggtatctatgtcgaagaccagcaataa

SEQ ID NO: 98342 - DNA, 9354 bp, Enterobacter aerogenes
atggcaaataacataattaaagggcgcaagggtggcagctctaaacagcgcacgccgacggaacagccggacgatttacagtctgtagcaaaagccaaaattcttatcgcattaggtgagggtgaatttgcgggaggtttaaccgggaaagatatttatctcgatggcacccctctggagaatgccgacggttcgcaaaactttagcggagttgcgtgggatttccgaccgggtacgcaggcacaaaattatattcagggtattcccggcactgaaaatgaaattagcgtagggactgaagtttccagcgagacagcctggacccacacattcaccaatacccagctttctgccgttcgcgtccgcctgaaatggccatccctgatgaaacaggaagacgacggcgatgtggtggggaataccgttaaatacgccatcgatttacagacggatggcggagcctggcagaccgtactggaaaccgccgtctccggcaaaacgacttccgggtatgaacgtagccaccgcatcgatttaccgcaggcaggcagcacctggacgctgcggcttcgcaaggtcacgccggacgcgaacagcgtcaaaatcggcgatgtcatgacgctgcagagctacaccgaagttattgacgcgaagctgcgttacccacacaccgcgctgctgtacatcgaattcgactccagccagttcaatggttccatcccgcaaatctcctgcgagccgcgcgggcgtgtcattcgcgtcccggataactacaacccggaaacgcgcgaatataccggcacatggacagggggcttcaaatgggcatggactgataacccggcatggatttattacgacattgtcgttgaggggcgcttcggtcttggtgagcgtctgaccagcgcgaatatctccaaatgggcgctttaccagattgcgcagtattgcgatcagctgatacctgatggcaggggcggcgatggtatagagcctcgccatacctgtaacgtttatgtgcaggagcgcaacgacgcctacaccgtattgcgcgatttcgccgctattttccggggtatgacctgctggagtggtgagcagattatcgtgcaggccgatatgccgcgtgatgtcgatttcaactatacgcgcgcgaatattatcggtagtcctcgttattccagcagcaccagtaaggcgcggtacaccaatgccctggtttcgtggtctgacccggataacgcctatgccgatgcgatggaacccgcatttatcccggaactggtttcccgttacagctttaatcaggtggaagtcacggccattggatgtacgcggcagagtgaagcccatcgtaaagggttatgggccattctgaccaacaacaaggaccgcctggtcgaaattgatgttggccttgatggcagaattccgcagccgggttacatcattgggctgggcgacgaacggctggccgggcgagttaatggtggtcgtatcagtgcggtgaatggacgcgtcattacgctcgaccgtgatatcgatgcaaaagagggcgaccgtctgcatctgaatctgccgtcgggtatctcgcaggcccggaccattcagtcggtgaacggtcgtcggcaggtgacggtcacaacggcatacagcgagacaccagaggcggagtgcgtctggatcgtcgaatataccgacctggtgcctcagcagtaccgcgttatcggtgtaaaggacaacaataacggcacgctcaccatcaccggcgtggctcacgacccggataaattcccgcgtatcgataacggcgcgatcatcgaccagcgcccgattagtgttatcccgcctggcaaccaggctccgccagatggcatcctcctgacgtcattctccgtggtgaatcaggggatcagcgtcgaaaccctgcaggccaattgggacgcggtacaaaacgctatcgcctatgaggctcagtggcgccgcaatgacggcaactggattaacgtgccgcgcagctcgaccacgtcatttgaggtcagcggcatttatgccggtcgctatctggtgcgcgtccgtgcaatcaacgcggcggaaatttccagtggctgggcgtactcggaagagaagaccctgaccgggaaagtcggcgagccgctgccgccgctggcgctgacgaccgtttcactgaccgcaggtatcgaaattcgctgggaattccctgcaggcgcagaggatagccagcgaaccgaactgcagtacagcccggaccagagcgggaacggtgcgatgccgctgaccgatttagcgtatccgggcaaacagtatcaacagatgggcctgcagattgccacgcagttctggtaccgcgcgcgcctggttgaccgcctgggcaatgcctcgccgtggaccagctgggtgcatggaatgtccagcgataatgtttctgattattaccagcagctcgacgacgcgcttaaaggctcggatacatacgaggaactgaacaaaggcatccaggacaacagcgctgctgccgacgccgcgcaacaggctgcggacgccgcccagggaaccgctgaccaggcggcgaaggatgtcgccgcacagggggccatcgtcacgcagcagggcaaggacctggccaccaacatcgccaaaactaacgacacgaccaacaagctggcgcaggaagtgaaagaccgcgctgcaggtgatgccgccacggcgcagaaagcagccagcgacactgctgcagcggtggcgaaagctgaaacggacgatgccgccgtggcgaagcaggccgccgataacctgctgagtgccaaacgcgaagttgaagcggcgattgagacgacgaacgtcaccatgcagaacggccttgacagcctggcgcagcagatggcgtcgatttcagccggtaccggcgagcagttcgacagtctcaaaatctggtatttcgacaaggacaacgaggggtggagctctgacgatggcggcacgaaaccgctcccgacaaccgacgacgggtggatccttcctgcggatgccatttcgaccatgcgcagcccgtcgggcgctggcacgctgattgacggcagcgcctataagtacctccgcctgcgcatcaagaaagtcggcaacccggcctggggcggtcggctgtactggattggtgctgatgaaaccggctggaccgagggacgccgcctggtgctgccagcaccggattttgacccgtccacaggtatcagcattatcgcgatcccggatatcccgtggcaggcctccggcagcatccgtcgcctgcgtctcgacttctcacaggggggagcggctgacgaagataactactatgccgttaactggctggccgttgggcgcccgacccctggtgcatcgcaggcgcagattcaggacctgaaaacggcgatgactgctgccgattcagctgaggcgctggcgcgtaaccagctggcggtgcagctgcgcggcaacgaggaaggaacagacccgaataaactggtttctggcctgattttcgaagagcggaaaatccgcgtgacggcggagaaggccatcggctcccgcgtggatacgttgcgcgtcgattatgataaatccacggcagcggcgacccagcgcatggatacgctggcgagcgacctgcagtcgactgcctcgaaaacggatcaggttgcagcggaccttgtttcagcgaacggcgtcattgctggccatacgcgggccatccagaaaatcgagggtgacgtccagactatcgacggcaacgttcaggccaacgccagccagattgccggggtggaatcgaaggttgataacatccgaatcggcggcgtaaacctgatacccaactccggggaactgaccggcaaatcgccatctgcaaccgaacgttaccggggtaatgcggttcgcatcctgacgcgtgccgccggagcgactgatttcgccgtcctcgactacacgctggccgcgccggttgacggtaccgagtatgttctgtcgttctatgcgaaagcgaagacggacaagacgccggttcgttgtttcctgaatacgccggatgccactatccgcgctgaaaccagccagggcgttattgtggagcgtccagccgggtataacggcgatgtgaccgtgacgctctccacgtcctggagccgctattgggttaaatacaaacgcaaacctggcttgtccgggacggcgtatctcgttgtggccagactcgacggcgcagctgcagcgcgcgaagcgtggatcagctctccgatgtttgaatccggaaatattgtgagcgactggagccaggcaccggcagacagcgccagctcggatgccgtccagcaactgacgacccgcgtcacgactgccgagaatacgctggccaccacggcgcagcagacgacggcgcttaagtcacagattacgaccggcaacctcctgctgaatggcgacctgattaataaagcggataactggcaactgtccggcaccggcgcgggtgctccggtctatgacgcggtgatgaaaggtctcaccacgaccgagccggcgatgcggatcgccaacggaacaaaaatcccggttgaagccggtcagaaactgacgctcaccttcggattcaagacggacgacgcaacgatcagcatcgggacccagaattttacgatgggcctgattgagaattgggggaatccgactaactggcttgtccaggacaacacctggtttgcgggtatcaccaccggctaccagacccgcacgctgacgttcacgatcccgaatgacttcaaagggagatggtgttacctgcgcatggcctgcggaggatggacgccgtcaaccgctcgcgtttacctgcagggcttcatgctgaccgcctcaaacggtatcgctggtaaagccgatgcatcagcagtgcaggacctgcagtcgcaggtcacgaagaacggtgacgacattgccaccaacgccagcgcgatcaccagcctgggtgggcgtattgatgccaccaatgccgaggtggcgaagaaagctaccaccgccgcgctggatagcctgaaggccaccgtcacgcagcagggtaaggatattaccgcacaggcggagcggacgacggcgttaaccaataccgttaaccagaataagcagaatgctgattctgcgattgccgcgaacggccaggcgatctctggtttatcgcaaactgtttcacagcagggcgaccgcatcaccagccagggccagcagattacgcaggtcagcaataaagtcgatacggtgaatactgacctcggcaagcggattgaccagaaggccgataacaagacagtacaggacctcagcgccaccgtgacccagcagggcaaggatattacggcggcgaaccaggccatcaccagcctgaaagggcgtgtttcgacggttgaggaagggctggccaaagcggccaccgccgatgccgtgagtaaactggatacacgcgttacaaacgctgaggggaaaattgaatcgcagggaacggcgatcaccgggattaatgttgcgctgaactcgcagacggcagcgggtggcgactacatcctgaacccgacatttgaccccgcatatccatcgatgggctttacccgccgggatacggtagacagcaacgacgatgatggaatcccgtatgatgctgacatcccggcaggtgctccgcgtcgctatgtagcacgactggcctcacgcgatcaccagctcaatacgccaccgtggccggtaaaagcggggcaggtattcgagatttcggtctgggtagcggcaaaggcaggttccaacgccgcatttaacatgtacatcggctcggctacgggaccgaatacgggtgccgtggcgtacgctgcgttaccgggtagcgttgcgcccactcagacctggacggagaaaaaataccgctggacggtcccggctaacttcccgcgcggatatatgcgcccgttcctgcaggtgaaccagaacgcgccgtatggctccgtatggtatgcaactgattttcactgccgggagatcaccgccgcgcagggtgcgcagactgctgccgacgctgccgccggtgccgtcacccaactggatgcgcaagtgacgcagcagggcaacactatcaccagccagggccaggctattacagccattacaggtcgggtgtcgaaccttgaatccgggcagagcgcgaacagcagcgcaattcagtccctgacgcaacgaaccacggcagcggaagggaaaattgaaacgaacagccaggcgatcacctccgtcaccggcgcggtgaatgcgatgctcaatcgcggcgagaacctggcaaacgattttaattttatgagcggatcggcgctgtggggtgtccaggggaatacgcgtaaccaggtggagtttggcgactttggcgacggtaaacccggcgtccagatgacacagctcgacagcacgttgtataccggcctctttgctaaccagaaagcgccgctgccacacaataccccacgccgctaccaggtcatcgttaaggcgaagggcgtatctggcgcgatgaatttcatggttcgccggtttaactacctggggaatgtggccgggacttatgaaaaccgccagttctccgccacggatacctgggcgacgtacaccgctgagtttagcgcgtcatcgtcggcgacagtggatggttctgtttttgcactctactgctacccgaacgcgtcggtcattcagattgactatatcgccatctatgacatcaccgatgcggtggctatcgatgcgaatacgtctgcggtcacgcagctgcagcagacggtcacgcagcagggccaggatattgctgcgaatgccagcgccacgaccgccgtttctgcaagcctgaatgcagcgatggctgacgtggataacaaaatcacgggcaacctgattttaaacgggggattcgagcgcgacttcaccaactggaccgcgccagcacaggcgacagtgatgtcggcgcagaatccacacagcggcaaaaaaatcgtgaaatatgtcgctgctaccaacgcgactcttttgtcgagcgacactgttattactgccgttaagggcaggacgtacaagtttggtgcgtggttgcgggctaaggccgggtcgactatgcaaccgaatacgcagccgaataacaaggttcgatttgcttacctcgatagctctgtaatcgctgaggcgcgctttgacccggccacaatgccgactggcagcgtatggcaggagtacagcaacacgtacaccgccactaaagacggcaccatgtcggtcagcatcaacgcgtttttgaatgcaggcgaaatttatatcgacgatgtgtacgttatcgatattactgaccgggttgatctcgatgccacggctggcgccgtatctaatctgcagtcgaccgtgacacagcagggaaaagatattgctgcgaatgccagcgcgatcacgtcggtcaacgcttcaatcggtgcactgcagagccagggattaaacccctggtgtgatggttcctttgagtcgtacaccgcaaaccagcagctgggcagcagctcgctggcgcgcgtctcgaccgatgtttaccgcaatggccagaagtcgctcaaaatcacgcgtaacaacggcgagaacggcaacagcgacaagatgattgggaactggcttgctgttcgtggtggcggtaagtatcggttttctctctgggcttacatggccagtgatatgtcgacaccgaatggatggaacgtgtctgtcggactctttgctcgcggagagaatggcggcgcaaaccagtggccggaagccgtccgtatctccgagacaaacacctcgcgcggcaaatgggttctcctgacgggagtagcgaccgtcggtaccgaccggagcattgcgcagatgtggatctccaccagggggccgaatggtggagccggttattcgctgtatctggacgatatcagcattgtcgatgtgaccgacgcacaggaggcgcaggacaccgccaccggcgcagcgaacgccgttacccagcttactgcgaccgttacccagcaagggaaggatatcaccgcgcaggcagggcaaatcaccagcctcggctcgcgtgtgggcgatgcagagtcgcgtatcacgaagcaggacgaaaccatcgcctctaacggcctggcgatggcgaccggctttaaccagatgcgcagcatgattggcgacaacagcgcggcaatcaccacgacgaacaaaaccgttgccgacctggaaaaatcaaccactgagcaaatcaccacgctgacctcgcaggtcggggatatgtctgcgaccgttcagcagacggcatccaccgtggcggatttaaacgggaaattgggagcgcagtggggcgtgaaggtcaacacgtcttccggcggtaagaactacgtagcgggtcttcagctggggattgacggcagcggccagtcacagttcctggtgcaggctgaccagttcggcatttatgtgcctaacggcgataaaagcaatctggccttcggtgtcgatgggaacggtgcttatatgcagcaggcgatggcccgtaacctggttatcgatttcgcgcaaatctccgacaacatccgctcgacgaactaccagccaggccaggcgggtaaagggtggagcatctcgaaaggcggcggcgcggagttcaacgacgtaacggtccgcggtagggtatttgcaacagacggcgtcttcaccggcaccgtacgtgccaatgatggttactttaacggcaccgtgtacgcgtcgcggatcgagggtgacgttggctcgttcgcaatcaactgttacaaggccacgtacaaccgtgtgccaaaagcaacatggcagtggtgggatcttctgcgtattcgtaagcagggatttgatcaagtagtcgatatcaaaggcgcattacgtcaggcggataagtacggcgaccttcgtgctggtatgtcttatcagtccggcgcggatggcggactcaatccgggctacgtagggtacgcaatacttatgcgcccaggtggcgatacttccggcggtgggccgatgacaacggcgatatctattgacggacaaacattttggtcgtcaaaggaagggtacgcgacgatagaaagtctccgctttattgtaccggctggaactggtgatgcgattgtccgcttcggatgttatctcgaccgtaacggttcaatggaacttcgtactttgatgcgcttcgacgcttttgtcgcgcgcaacagtaacgcgataagcctactttaa

SEQ ID NO: 98343 - DNA, 978 bp, Enterobacter aerogenes
atgaaacagcgctcaattttgaaaggtgcccccaacatcgacaatattatgagtaaaacacaccacgcccctacatcggggtcagtgtcgccaatggttggtgatttacagcgccagcttagttccatgtcagggaatagcattactttgcctgttttggggcgcaacgtaagctttaagctggaaaccatcccggcaaacaaagtggaaatggcgacaatggtgtggctgggtaacgaacgcgatcaagagctattagacgaagctgcattggccgacctcgttccttcattccttacttctggtcagcagaaccccgccttcgctcgtagaacgtcaggtattatagaggtcgctgatggttcccgacgccgtaaaacggccataattactggttgtgactaccgcgtattagtcggcgatctcgacgatgaacagatgcagtggttatcgcaagtgggcaacgactatcgaccaaccagtgcatatgagcgagggaaaaaataccagcgccgcctcaacgatttcgatggcaacgtcaaagcattagcggaggccgagggggttgatcgcaatatcattacccgctgtataagtacggcgggtctgcctaaagatatcattgccattttccagcatcctggcgaactatccgcccgcgccggtcacgacttattcaaagtgtaccaggaaaataagcaagccatgctagacgctgcacagcagctgctgcgcatgaagaaaaagggtgaaaaattcgaaccaacgagaatcatccaggctctgcaggacttcatttcgacaaatgcagatgatacacaaaaaaccgagaagcggtatggtgatggggttgtcgcgaaatacaaaggcaactacgtcacattaaagcttgataaccgaaaaatctctccagacttaatgagtaaaatagaagcattactccagtctgagttagaaaaaacggaaaatggaaaataa

SEQ ID NO: 98344 - DNA, 1164 bp, Enterobacter aerogenes
atgtcacttatcaatttactgcaggaatgtatcagccgcggacaagagatgacgcaagccattgccatagcgcaatttggtgatgatagccctgaagcacgtaagattactcgccgctgggggataaccgaggttgctgatttaatcggcgtttcaccgcaagcgattagagatgctgagaagaatgggcggttaccaccacctgattttgaattacgtggccgcgtcgaacgtcgtgctggctataccatcgaccaaattagccatatgcggagcattttcggtaatcctaatcaacggccagccgataaaaatccagccgttttagctgttatgtcgcataaaggtggcgtttataaaacctcatctgcagtacatgaagcccaatggttagctctgcaaggtcaccgagtgctactcattgaaggtaacgatccgcaaggaaccgcctcgatgtatcacggctatgtaccggatttacacatccatgccgaggatactttgctcccgttttaccttggtgagcgtgataatgcggaatacgctataaagccgacctgctggccaggtctggacattatccccagctgcctggcgctgcaccgtatcgaaacggacctgatgcaataccatgcccaggggaaactacctcatccacctcacctgatgctacgggctgctatagaatccgtatgggataactatgacattatcgttattgatagcgctcctaacctcggaacagggacgattaatgttgtttgtgccgccgacattattgtcgttgctacccctgcagagctatttgattattcatccgttctgcagttcttcaccatgcttctggacctactaaaaaccgttgatttaggcggtttcgagccggtggtacgactgctgctaaccaaatacagcctgactactggtaatcagtctcgctggatggaagagcagataaggaatacgtgggggtcgatggttctgcgtcaagttgtcagggtgacagatgaagtaggaaagggccaaataaaaatgcgtacggtatttgagcaggccgcttatcagcgctcaacacttaacgcctggcgaaatgcagtttctatttgggagcctgtttgccaggaaatttttgatgatttgattaagccacgttgggaggagtaa

SEQ ID NO: 98345 - DNA, 138 bp, Enterobacter aerogenes
atgaacattaatatcccggcactcataaacttcgatcctgcaggtataaaaaaagcacctgcatgtatatttcagacctgcccggtattgtgctatatgacactataccattcactgaatattcagctgaattactga

SEQ ID NO: 98346 - DNA, 519 bp, Enterobacter aerogenes
atgcaaaaagtaactgatctgtatcctcctgaaattgctcgccataagctccagaatcacttcgccggtaataccgttatgctggagttaatccagaaactaaataaaaccagcctgtgtacttttgcggcgctctgtgacggcaacgtagtgaccacttccggctataacatcacggccgatctatgtgttaaccgtgcgtcagccgtggcccattcgcttaagcaaaaatatctgccagttacggccagaacgatttcgacaaaggctgatgtaggtggtgcggtaaagcaggcggctttctgtatcgatgaggacgatcttgcaaggctgaaatcagagccggaaaagatgatgaaagagtgcgaacgtaacctgaacagccagaagcgcaccaatgctcagaaggaaatgagccggttgtacaaggagtttggtgaagacggcatactggcgctgttacgcaatgttgcccagtcgaacggtacaccgccgccaggcgcacaccctgcaagttga

SEQ ID NO: 98347 - DNA, 258 bp, Enterobacter aerogenes
atggggcttaaattaaatttaacctggtttgataagaagactgaggaatttattggtgaggagtattctaaagactttggtgatgatggttctgtcattgaaagccttggaatgcctttaaaggataatattaacaatggcgggtttgatgttgagaaatcatgggttccgttgttgcagccatattttaaaaataaaattgaagtcgataagtactggtatcaaatttcatttgattatcgggacggtaactggtaa

SEQ ID NO: 98348 - DNA, 153 bp, Enterobacter aerogenes
atgcctagacaacatcaggatagcctcttagatgccgcaaggcaaggagaagaaggccatgaaactgccgcgaaacactctgctcgggtgcgtattaatagtgtgcctcacactgctgatattcacttacctcacccggaaatcactttgtga

SEQ ID NO: 98349 - DNA, 249 bp, Enterobacter aerogenes
atggaccataacgttttgtccccgcttgtatccctgccggatggcacgtttacccgcgagcaggctcaggttgtcgcagcgcagtatcagaatgtggcgattgaagatgaccaggggacccattttcgccttgtcgtccgtcatcaggatgacggcagcatgatctggcgcgtctggaattttgaaccgggcggcgaggacatgatgaaccgctacatccgggactacggagtacgcaaaacgaagtaa

SEQ ID NO: 98350 - DNA, 543 bp, Enterobacter aerogenes
atggcagcacgtggcgttaacaaagtcattctggttggacatctgggacaggacccggaagtgcgttacatgcccaacgggggcgcagtggtcaatctgacgctggccacgtctgaaacatggcgtgacaagcagacgggagagatgcgcgaaaacaccgagtggcaccgtgttgtcatgttcggcaagctcgcggaagtggcgggtgaatacctgcgtaaaggcgcacaggtctacatcgagggccagctgcgcacccgcaactggcaggacgatgccggagtcacgcgctacgtcaccgaggtgctggtcgggcagaacggcaccctgcagatgctcggcggccgccgtgaatccggagtgcctgagagcgccgcgcagccgcagaatcctgccaccccggcacaacctgctcaggccgcagctaaatccccgaaagcgaagggcggtaagaaaggccgtcaggatgccgccccgtctcagcaaccgcctcagccactcccggatgatttcccaccaatggatgatgaagcgcccttttga

SEQ ID NO: 98351 - DNA, 564 bp, Enterobacter aerogenes
atgaacgacatgaaagctgttcgtcaccgatataagcagagatatgattttgctgcgtcagaagtagtgggggcgtttgatgaacttaaaagtttggattggagtttagaaattgcatctttaagcgatgtggaaatgtcaaagagatggattggggctgttgatcctaacggtgttgcaagactaccacctaatggtggatgggactgggttaagctctataacggctatttgaagaaccctagcgcattcgtctgtgctattaaatcagaaggtaagctatgcgctctgattggtggtggggtttctgatagtaaagtggtaaccaagctgcattaccttgaatcagccccttatgacacggcgctttcaggatatgcactcgatatttctgttacgtatgttgttactgtcgcgaatgcgatgggtagcgagtacacagccatctatgagccaaatagcaaggtcagagatatagctataaatgattatggatttagcgaggacaacttgtttgggacaagtaaagatttcgctctgtatctaccaatgagccggggttaa

SEQ ID NO: 98352 - DNA, 519 bp, Enterobacter aerogenes
atgtcagagaaggcaaaacaagtaggtaggcgctctctatcaaaaagaagagaaaatctaataaaagagctttggggggatgagctttccgaactgaatatatggaacaggaaagaacacgatggatttacaacaatcccaagaacattgaattatatcaataggataatcgatcaccttgctggcgcgggatctcctgtatcacagacatacctcagtttatggtgtcgggtttttgacgagggattcgtcgaaattagggataaagatgctctggcatttgagtcagggtttagtgggcagcgagcggtgactacttggctaggaagaatgaaaaagttacgggagctgggactgatatcaacgaagcctggtacttctggtgagtttcattatgtaatcatgttgaatccactttacgtaattaaaaaatcatatgaatcaaacggatgggcaagagatgagcgttacaacgctctattttctaggatgcaggaagtgggggctgagtgggaatga

SEQ ID NO: 98353 - DNA, 162 bp, Enterobacter aerogenes
atggatagagaaaccctatacctgctcaaaacgttagaccgtaacaatgccttacttgacgatattgtccgaagaaagatgggcaggtactacaacacgaagattttgcgtgattcctgtgatgctattgaagccgaactacgacatcgaggaatcatttaa

SEQ ID NO: 98354 - DNA, 558 bp, Enterobacter aerogenes
atgagcagtcttttaacgctggcgaaggacttagagcagcaatcgaaagcgcagcagaagagtaccggcgagatgctgaaagccgcattcagcgagcacgagcagtctgtcagagcggaactgaacgcaagcgcgaggagaatcagcgacgccatcagcgcccacgagcagtctgtcagagcggaactgaacgcaagcgcgaggagaatcagcgacgccatcagcgcccacgagcagagtatgagcgaggcgatggagaaaaaccggcggagcgtgttgctgacggccgggaggacatggctcaccatcctgatggtgtcagcgctgctgatcgccacgagcgggagcattctgtggtggcagggacggcagataaccgacaattacacacatcttcgtcagcaggaagataccctggcgaaaatgaccgcccggacgtggggagtacgctatcaggagagcaacgacggccggaggttccttatcctgccgccggggatgcaagccgaagccatcccctacgacgggacgacctggatccgcctgaaacaggagtag

SEQ ID NO: 98355 - DNA, 402 bp, Enterobacter aerogenes
atggccagagtgtctattagtgaggctgcccgactgacgggtaagagtagaacaacactgcacaggttaattaaagcaggtgacctgtccacctgtagcggtgaacgcaatgcaaaaatggtagatacttcagagcttttacgtgtctttggtccctttgaacaaccgaagggtgaacaccattctggacaggtctctgaacagcgtgatacagcctctgctgaccatagtgaacaggtgattagtcatctgaaacaggagattgaacacctgaataccttacttttgtccaaggattcgcacattgacagcctgaaacaggccatgctccttcttgaaaatcaccaggcaaaattaactgaatccccggcgccatggtggaaattctggaaaaaatcctga

SEQ ID NO: 98356 - DNA, 192 bp, Enterobacter aerogenes
atgacgaaacaacagaaaacagcgctgaacatggctaaattcatccagaatcagtctctgctcctgctggagaagcttaacgagcttgatctcgatgtagaggccgacctttgtgagaaactccacgatgatgcggagcatcttttccgtacactgtcctcgagactggatgcattacaggatggtaactga

SEQ ID NO: 98357 - DNA, 258 bp, Enterobacter aerogenes
atggctggtaataaaatttcagattttacggaagaagaatttactgcttttgttagtaaaataatcgctgctgattttccaactgacaaagagaacgatgatgctatttattcgttcgcccaactaacagagcatcctgctggttggaacctcatcttcaagcctaagataggcgaagattcttcggcgaaagggattgttaaaaccgtaaaggaatggcgagctgctaacggtaagccaggttttaaaaaagcgtga

SEQ ID NO: 98358 - DNA, 234 bp, Enterobacter aerogenes
atgaataatttacttattatcatcttgtttatgattgtatgcatatttagtttgtttgtagtcggctctattttttatcttcttctggagacatttatgtacttttatttgaatgctccaatatcatttgaaattgttcagttttctagattgttaaaaatgagtgtgtatgggggggggaccttaggcttaggtattggtttgttacgtatcatgaaagttaagggattctga

SEQ ID NO: 98359 - DNA, 708 bp, Enterobacter aerogenes; identical to SEQ ID NO: 76373

SEQ ID NO: 98360 - DNA, 225 bp, Enterobacter aerogenes; identical to SEQ ID NO: 76372

SEQ ID NO: 98361 - DNA, 1062 bp, Enterobacter aerogenes; identical to SEQ ID NO: 76371

SEQ ID NO: 98362 - DNA, 474 bp, Enterobacter aerogenes
gtgagctatcgctatccgggcgaagaacgggacaaagcgagccgggaggcgacggccagacagcgcgagtgggagcagaaacagcaacaggccagcgtccagaaagcgctgaactcggcgcagacgccccgcaactggagttacaccaaatatccgggcacaggcagcttcaacattgttcctgattttgcttacgacgatggccgctttacgttcgtgggcttctccccgtctaagtccattccttccgtcaccaaagagctgaacggcaaagagcatgtggttaacagcagtatccagaagaaaggcgatttcaccgtactggtgattcaggaggtgacgccacgcctagtactgcgttccggtaatgccgttgtgggtctggaaaatagcggatttggcaaggtacacgccgccgatggttccaccgtatcccggcaggtggaaagagtggaaaaaccggaatccaattaa

SEQ ID NO: 98363 - DNA, 1251 bp, Enterobacter aerogenes
atgaacgacgaaaacaaaatgcctgtgccggatgaagcgcaggcattcccggcacacgctgaggatgatattgccacgcttgagcgggaagcccgcgctaaaagggaggccgagcttctcaatgcgcaggacgacgaagagaaagacccggtacaacccgccgttaacaagctgaaaaagcgcaaacggggcaaagcaaccgcctttcttgccattgtcgcggtcacgcttatcttcctggcatggggtggtaactgggtttatcgcaatatcctgtggcagcctacggaagaaaagaaacaggacacagccccgcagacgaacaaaaccgattaccggcagcgtaacgatctcggtatgtccaccgatacagccgaagaagagccagagcaacaggataacggccagagcagcacggggggaacagggcaggtggctccggccgccccgccagaactcaacaaagccagcttccttattcgccatgatggttcggccaccacacagaacccggtaaaaacccggcagcaggaaatgacgctgacatcggcaacgaccaccggacaacaggacagcagcgcggccacaaataccgccgcaccgccgccgggacaaagccccgcaccagtgcgccgcataccctataaccctgacctgtacatcccggaaaatacctcgatcccctgctcactggatcgccgctttgtatctgaccgggcggggaaacttcgctgcacggtcactactgacatctggagcgccagcggcaacacgaagctgatagagaaaggcaccaccgcatcattactttaccgcgccatagcggaagaaggtatgaagcacgggcaagggcgggcattcatcattgcgacgaagctacgcacccgccagccgccttatctcgatatcccgttggttgataccagcgcggctggcgatctgggcgaggctggcgttgatggctggatagattcgcacttctgggaacggttcggcggcgcgttaatggtcggcatgatccccgatattggcgcatgggcatccaacagcgcgggtaaaaaagaccgcaatacggactatacggaaaacagccgccaggctatggcagatatggcacgtaccacgctggagaacagcatcaatattcccccaacgctctataagaatcagggcgagatcatcaacctaatcacaggcgaggatattgatttttccaacatctatacactgaggttgaaaaatgaccgctaa

SEQ ID NO: 98364 - DNA, 267 bp, Enterobacter aerogenes
atgcgtaaagcccgattcactgaacaccagatcatcgccgttctgaagtccgttgaagccggacgtaccgtcaaggatgtgtgccgtgaggccgcaatttctgaagccagctattacaactggaaagcgaaatatggtgggatggaagcggccgatattaaaaaaatcaaagaccttgaggatgagaatcgacgtttgaaacagatgtttgccgacctgagccttgagaaccgggcacttaaagacgttatcgaaaaaaagctttaa

SEQ ID NO: 98365 - DNA, 546 bp, Enterobacter aerogenes
atgccattacctgagcgaatgaaacccgcacgggtcacccgtaaacagatgaaagaactgatcagtcagctgaatggcattctcgatcacatcgataacgggatggacgaaaacaatgaagaactaaaacagatgatggcagactggaatgcaaaggtcgtcatgccctgcgggttctctgattttcgtgatttttcatcctggacaagtgcactagatttcaccaggatggcgcttaatcaggaaaaatacctcgatgactttacatggacagaactgaacgacgttatcaacttcatacgcaaagcagaaggtagtgaatctgaccacagctatgcactccagttactggagattaatttcaaggcaaacccactggatctcatctatcaccctgactgctggttcaatgatgaagcattgtttcatgcccggctgactaccgaagaaattggtggctacttaatgaaaaaatcaggtcgatggctcaacgatgcaccggatatccaactggtgtatgccatccccctggatgtttatgattaa

SEQ ID NO: 98366 - DNA, 189 bp, Enterobacter aerogenes
atgctgttcccacatgccgttgattttggtatacagctcacctggacggttgacggcgatttccgtcaggccgggaagctccagaaagtcgccaaagaaacgctgtttatagcggtcgagggagatatttttagcggtcatcttttacctctttcatccgggaaaagacttcatcaacagaaagaatga

SEQ ID NO: 98367 - DNA, 252 bp, Enterobacter aerogenes
atggggtcaggtgggaccaccgcgctatcgccgccaggcaaattctttgtgctcgtcctgtgtcttttgcgctcatactgcgttggctgctctcgcgaatgtcagtcacatacttcagtatgctccttccatcgcttcgtttgccgccttgtctcagcgcaaaatccttcggactctgaatctaagctgaaaatcgtctcaatcagccaaaacatcttcggcgttgtaaggttaagcctcacggttcattag

SEQ ID NO: 98368 - DNA, 327 bp, Enterobacter aerogenes
atgaaaacaaacattactgaaaaagatttggttgataacggttttagtgataagaacatatcccgtctgaaagaaatcctgtcccgacaggaaaactctggtgaatcattaacgacattaattactgacctaagaaaacgtttttacgcgggagccctctgtttagctttactattttcgttagctattttcgcactaatcttctatcccatagcagtgggtttaagctatatacccgcgatgattatagggatagctatcatttattacgttatcccgttagacctctcatggaaggcctggagatttgttaagggttcgaaatga

SEQ ID NO: 98369 - DNA, 813 bp, Enterobacter aerogenes
atggatatttatattggcaattatcgtttctcaacttatttttctactttggccgcaatggaagctaatagcttgatgaatacagctgtggccgtgtctgcttttcatttaagcgatgcacttacacgtataagatttcaggaggaagtaaaaaactttgcgcaccaacaattactttttattaaaagcagcgctagtaatgaagaatgtcaacattacattcgtaatcttattgaagaaagaaataatcttaaaatacaggaccgcatgttaagaacaggggagtctgtagtcgctgcttcagttaaaatatatcaagagaatagaaaggtggccagctatatcatcgatggaataggtgtggtggtggctggactgcaaatggttgctggaactggcgtgtttgccacatcgttgccaaccggtaacgttataggaatgcttgcgggagcaactttatttctcaatggcgtttcgtctgtcgcagagggtgtccagaagctctccggttcagataatccttcgaatcttatgcgagatgcttatgaaaattcagcacaatttctagggtttgatcgcaagctcggtcttttagcataccagttcgttgatctagcaacatcatactatggacttttcaagctcacgttaaaaccggacgtctggcggttatatcgatataccgcacctgatttctatcggaaagtctcggccatgagtcgtgcagcccttgtaattaaaggtacaggtgctggttggaaaggactacagatagggaataacatttatgaaatacaacatggtcgaaattga

SEQ ID NO: 98370 - DNA, 510 bp, Enterobacter aerogenes
atgaatccttcaatcgttaagcgctgccttgtcggggcggtgctggctatcgctgccactctgcccggtttccagtcgcttcatacctccgttgaggggctgaaactgatcgccgattacgaggggtgccgcctgcagccttatcagtgcagcgcgggcgtgtggaccgacgggatcggcaatacgtccggtgtggtgccgggcaaaaccatcacggaacggcaggcggcgcagggacttatcaccaacgtgctgcgcgtggagcgggcgctggataaatgtgtggtgcagccgatgccgcaaaaagtctatgacgcggtggtgtcgtttgctttcaacgtgggcaccggcaacgcctgcagctccacgctggttaagttgctgaaccagcggcgctgggcagatgcctgccatcagctgccgcgctgggtatatgtcaaaggtgtgtttaatcaggggctggacaaccgccgcgcgcgggaaatggcctggtgcttaaaaggagcataa

SEQ ID NO: 98371 - DNA, 174 bp, Enterobacter aerogenes
gtggattacctctccactatcgcggtagtggcaactgccgacagcaatatcacccgcgttgagtggtccggcagcttcacgccggttaacgtcagcgacgcggatgccgaagcgctgtttagcggtatttatcgcgacggcctgcaggcgttgaaaaataactttagcgcctga

SEQ ID NO: 98372 - DNA, 234 bp, Enterobacter aerogenes
atggcgacgatccttaaaaaacgtatccgtatgcagggctttatcatcggccaggattacggccatcgcattgccgagtttcagcagcaaatggggcgctgggtacaggaaggtaaaatcaaataccgtgagcagcagattgacggcctggcgcaggcgccgcaggcgctgattggcctgctgaagggagaaaacttcggcaaagtggtgattaacgtcgcagcggaggagtaa

SEQ ID NO: 98373 - DNA, 1083 bp, Enterobacter aerogenes
atgtctactcaagagaggaatggtactattttgtgggttaacaccctcaaaggcgcatgcatactcctggtcgtccttcaccattcaataattaccaccctagcaccatctattgaatttctttcttctggaattataccagcaaaactctgggtgtttttcaaccagtccgtttctcctcttcgaatgccagcttttttctttgtttcaggtatgctcgcatcaagcgccataataaaaaagagatggccagatgtattcacaaaaaaagtatcaaacctattatatctttatattttatggggggtggtacaatggcttttcatcaaaaaaataattactgaaccattgggtgttcagttatcagactcagccaatagtgcgtacgctaattctttcattgatttttttgggttgatttctagtgcctcaaccagtttatggtatctttatgcattaggcggctattttttagttacgaaacttctcaataaaattaaatacgttaccatttttgttgctttcattttaaattacacggcagctctcggagtttttgaacactggggagtggctagtatcgctcaaaatataatattctttgtgatcggagtatacctcagcgaactggtaataaatctcagcgcaatcaacaagaaaaacataataccctttgttattatcttgtctcttgccgtattaaacttagcgtttggatttggtaagaacattttcctttgcgttaccgcaataactatatctatagttatatgtcaatatctgaatgacaagttcgatatggcatggttaaactggatcggtaaaaacacacttcaaatctatgtcatacataggatatttgtagaagtttttggcctgttattgctacatgtaggaatcgacttggagtggttcaaaaatacatcatactctatggtgtggggaactgcattcccgttaatggctgtattttcatatacggccatgtcgttatttacttggaaagtgttaaacaatggcgttggtaaaatgctattcacacacccaaaactggtatcaaagaaaaaacaggaaaccgcataa

SEQ ID NO: 98374 - DNA, 729 bp, Enterobacter aerogenes
atggctggcacgcgtattttctgtaatcagattatctctgttcctgactggaattatgactacgtaactattgaatcagaacttgagaaaaaatcccctctcccgaccattgccagtttcgacctgctgaacccactggacaacagcgggcacggctataccgtcaaaccaaacggcggtcaaatccgtgactgggggctgcattaccctaacggtgcaaaaccgtcagtgactgacttggtgaagaccgggcagggcgccgtatcgttcatcgtcgcgtttaagctggatgccaataatcgttatatcaacatcatcagcaaccgtaccaccggcgtcgggtttaacttttactacagcgctggcctttacatgtcctacatctatccgagcgggactactggcaccatcgccgccggcggtgtgatcgatgttgaagtgggcaaatggtatgtagctgtgggcgtatttgatcctgttactaaagcggccagcgtgcggatcagtgatgccggattgcagtatggtcctatcggtaccggcttcccggaaaacacgtcgctggatacggctgtcagcatcggtggcgatcccaacggcctcaccacctcgtctatgtacggtgacattgcatgtgttgcgtactatgacggcgcattcactgcagatcagcgtgatgcgatggtgagcgtcggtatgggcattctgcaagagcgcgggcttatctga

SEQ ID NO: 98375 - DNA, 159 bp, Enterobacter aerogenes
atggacatcattatcgaagccactctatggaatggcctctgtaatgcctataagttgccgtcacaagtagctttgttaatcaaagataacaatgttgtcattatgtctatcatcaatgtgaatgagttcactgattcgtttgactacatcagggtttaa

SEQ ID NO: 98376 - DNA, 486 bp, Enterobacter aerogenes
atgagttcactgattcgtttgactacatcagggtttaatgacatatccttttcccacttctcgacagctaagcaaacattttcggcaaataaatcaatctgtatagttgttttaccattgttctcgaaagtccctatattaatctccagcccggggatatttaaaggaggtcggaaagcccattcttgtactcgcccacgcgcttctgcacctaatccactatgcaaacatgcacatctaaaactccaacagtcagcccctgtaaagcctacatcttggccatgctcatctttaaatacatatttattatttagatatttcctgtaccactccctgtactttttgcctttgtctttagcatgtttacctgatggtttttctgtctgtgcgcatatatcaggcattgccaaagccagaaataatgcggcaaaccaatttttttgttcaactgatttacgtatggcactagtaaatctctgcatgtag

SEQ ID NO: 98377 - DNA, 387 bp, Enterobacter aerogenes
gtgattggcgcactggtaaagcgttactggttgcagttgctggtgatagccttaatcggcgcattgtcattcttcgtgaaccgctaccgtgaaaacgccatcacctacaaagaccagcgcgacaaagcgacggtcagggcagacacatcggaggcgatcaccagcaacgtgatcaccacgatgaacctcatccgtgacatctcacaggctaccaagaatgcaaagaatgaacttgctcaaaagggcgagacgcgcattgtctacatcaggcaggcgcttgaaggcgatcagtgtgctaagcagcttgttcctgctgccgctgctgacagcttgcgggaatacgcggacggtttacgtgccggcgccggtggccccgataagcactga

SEQ ID NO: 98378 - DNA, 450 bp, Enterobacter aerogenes
atgcaaaccagtgatgaaggcattgcgcttattaaaggtttcgaaggctgccgattgacagcatatcccgaccctggcaccggtggcgtaccatggaccataggttacggctggacattgccagttgatggcaagccggtgcgtccgggtatgacaatcgatcaggctaccgctgaccgactgcttaaaaccggcctggtgagctacgaaaaagatgttctgaaaattgtgaaggtgaagctaacccaggggcagtttgatgctctggtgtcgttagcctacaacattggatcccgtgcactctcaacctccactctgctgaagaaacttaacgacggcgatatcaaaggtgctgcagatgagtttctgcgttggaataaagcaggtggcaaagtcctgaatgggttgacccgtcggcgtgaggcggagcgcgctctgttcctgtcgtga

SEQ ID NO: 98379 - DNA, 207 bp, Enterobacter aerogenes
atgtactcgaaaccgacaaaagataaagctatgcgtcttactccgcgttcgctttcctctcaggaaatgttgcgcaatcaggcaattcatgatgccttgaaggaatcgctcgtttctgaactgaagcagactggttcgcttggtcaaaaagggcgtattgtctcgacaaaagcaccacgactgaaagtacgattgatcagctcctga

SEQ ID NO: 98380 - DNA, 486 bp, Enterobacter aerogenes
atgagaatacaggttcgtcagtatccatcggatatgaacccgctacgttatctggtcagagtggataagccgggaggacttctgagtgagtatgttgttgaattcacaagtggtgttgatcttgccgcatatctggacagcttttactccgtagaagaactgagtaataacaccctgatggtggattttttcgacatacaggcgctgtattcaatcagtggccgtgagaagtttgaacagtacactgatatgcattactccgaggaagagcttgaaaggctttttgtcgagggaattgctgaagctatttttgacgttgtcgaacgtaccggggcaactatcgtgttcgccgctccttataaagagacgctggcacgctattatcatcgactgttgaagaaatatgcggctgatgtaaactatacatacagagaagacattcgggaggaggtgaatttttatgtactcgaaaccgacaaaagataa

SEQ ID NO: 98381 - DNA, 195 bp, Enterobacter aerogenes
atgaacagcaaagcacatgaagtacagatccgctggcttgagagccggcagcctgatgagcgtaacggtaatgaagcggaaaaattttcggatgagtgctgggagaagggtttgcggctggataaaagcccgtctgtgcactatcaacttctgatggaaaccatccgctggacactgatcccgcagcaaaagtga

SEQ ID NO: 98382 - DNA, 330 bp, Enterobacter aerogenes
atgcgcatcctctggtcattcgctcaggcacaaacaaatgcttcagcccggaagaaagtactcaggccgtcctggaactctgtaatcgacgtggaaccgcacgtaatgtcgcgtaaaggatgctcgtcggataatgctgcgtgtgaaggcttcttcgggcgtgtcaaaaacgaaatattctatggcagaaactgggcgggtatcacgctggaagaatttatctgcttcctagacagttatataagctggtataacgagaagcgtatcaagctatcattaggtgcaatgagtccggtgaagtaccgacagcatctagggatcacaacataa

SEQ ID NO: 98383 - DNA, 267 bp, Enterobacter aerogenes
atgcattcatatgaggaccggatccgggccgtcgaactctattaccggtacggaaagaaagcctccgttgttgtcatggagttgggatatccttccacgaaacagttgagccgttgggttcggatttatgaagagaagggcgatttaagtcaagagtacgctattcacgtgcacagaaaattgctgctgttgagcactatcttactcacggtggatgcccgtcgtacactcgccgtgccatcggctaccccagtaacgaaattctaa

SEQ ID NO: 98384 - DNA, 1182 bp, Enterobacter aerogenes
atgccgctgaatgcgcgtcaggtcgagactgcaaagcccagagacaaagcctataagctcgctgacggcggagggctctatctcatggttaatcctaacggttcaaaatactggcgtatgaagtatcgatttgccgggaaggagaaaaagctctcatttggaacctatccggacatctcacttgcagaagcccgtactaaacgtgataaagcaagaaaaacactggcgaacgataaagatcctagcgaagttaaaaaagccgaactgcttgcccaaaagctctcagtaacgaacacttttgaagcgatagctctcgagtggtacaacgcgaaaatctctggctggtcaaaaaactacgctgactatgttaaccgggccttcaaaaacaatgtcttcccctttgttggatcgcagccggttaatgagataaaaccactggagcttctgactgtattacagcgtatggaaaaacgaggagcgccggagcttgccagtaaagtgcgccagcgttgtagtgaagttttccgatatgcaattgttactggccgcgccgaatacaaccctgcggctgatctcggtagtgctttacagggctacgagaaacaacattatccctttcttaccgctgcagagctgcccgagttcttgcagaagctttcacaatacacaggcagtcttgtaacgctcctggcgacacgattgcttatgcttacaggcttgcgaactatcgagctacgcatggccgaatggaatgaaatcgacttcgaaaattcgatttgggaaataccgaaaagtagaatgaagatgaggagacctcatatagtccccctttccactcaatccctggcagcacttcggcaacttgaacaattgaccgggacttatcagtttatattcgctggtcgaaacgatgttaataaaccaatgagtgaagccagcatcaatatggttctgaaaaggattggttacgacaagagagcgaccggacatggttttcgtcacaccatgagcacaatcttacatgaggaaggatttaatactgcgtggattgagacccaacttgcgcacgtggacaagaacgcgattcgtgggacatataaccatgcgcagtatctggaagggaggaaagagatgatgcagtggtatggggattacgtggatagttgcgagagtaacaattaa

SEQ ID NO: 98385 - DNA, 255 bp, Enterobacter aerogenes
atgaaggaacatccggacaaacatatcaggaaggcgattgccacggcgctggcgcgggggtggatattgcttcctgcaggtaaaagcgctcattgctttggccgcctcgtctgcggcgtggctgaacaccgtgaacatatgatgagcatttggtcgacgcccgccgtccctgaaaaccacgcccggcaaatcatcagaatggtcgaacggtgtcccatcccggctaccgcgcgcatcacgcataaggaacgctaa

SEQ ID NO: 98386 - DNA, 246 bp, Enterobacter aerogenes
atggcaggagaatatttttgcggttggaatgggctccacaagaagcgtagcaaggagagcgaggaattaacgatttgcgaggcggcttccgccccagggaagagaacggggagccgttgctccccgtttatcgacttagctcaacacatccttcagagcctcttccagatcgtaccagcgaaagctaaagccggcggcttccaggcgtttaggcagcgcgcgctggccgccgagcaccagtactga

SEQ ID NO: 98387 - DNA, 1341 bp, Enterobacter aerogenes
atggctaagtataaggcgtatccggagtataaggattctggggttgaatggttggggatggtaccctctcactggaatattaagcggcttggtcaattttttgaggaaagaagagataaagttagtgataaagactatcctcctttatctgtaactatgcagggtattgtcccccaaattgatactgcagctaaaacagatgcaggggataatcgtaagctggttttgaaaaatgattttgttattaatagccgttcagataggaagggctcgtcaggggtgtctcagcttaatgggtccgtttcattaattagcatagtaatggagcctaaaaggatagaccctaaatttgctcaccatttactccgcagttatccgttccaggaagagttttaccgctatggtaaaggcattgttgccgatctttggagtacaaactcttctgaaatgaagaatatcctaatccctgaattggcagacgatgagagtaatgcaattgcatgtttcctcgatcacgaaaccgcaaagatcgataatctgatcgagaaacaacagcaactgattgaactgctaaaagaaaaacgtcaggcggtgattagccatgccgtcaccaaagggctaaaccctgatgtgccgatgaaagattctggtgttgagtggctgggggaagtgccggagcattggacagtttgcagacttaaacaaatcattaaaagtggtacttcaatatcttatggaattgttcagcctggtgattctttagatgagggagttccattcatacaaacaaccaatatttcacaagggaatatacaattagaaagcctcccaaaaacctcaaaaataattgaaaaaaattatcctcgttcacgcctggatggaggagaggttattttaggtatcagggcatctataggttccgcatatgtagttcctcttgaattaaaaggtgccaatttatctcgtggagttgccagaattcaaccggggactaatatttctgctgattatttggtttggtacttaaaaaccaatgcagttgaacaatattgggcattaagtaagcaaggtagtacttttagcgaggtttcaatagagactgttagagaattaactgtctgtgttccccctaaagatgaacaatacaacattgcgtctcgtttagagggggcactagatagaattcataagctaattgttaaatcagaaataaaaatgaatttgcttagagagcgccgcactgcgcttatttccgccgccgtcaccggaaaaatcgacgttcgcgactgggttgcccccgacacgcagaacgttgaggagccacaggaggccagcgcatga

SEQ ID NO: 98388 - DNA, 144 bp, Enterobacter aerogenes
gtgaaaaaattacgctgggttttgctgatcgttgtcatagcgggttgtttgctgctgtggactcagatgcttaacgtaatgtgcgatcaggatgtgcaatttttcagcggtatttgcgctattaacaagttcatcccctggtaa

SEQ ID NO: 98389 - DNA, 1227 bp, Enterobacter aerogenes
atgaccctctttactcctctgcgactggcctctggcgtggtcattaacaaccgcatcgctaaagcggcgatggaagaaaatatggccgatgccgatcatgcgccgtcaacggaattactcaccctttatcaggcctgggcgcagggcggcgccggggtgattattaccggtaatgtgatggtggacgcccgggcgatgaccggcccggcaggcgtggtgctggaagatgaacggcatctggataagttccgcgcctggtcgcaggcggcgcgatcgaagggtgcacaggtgtggatgcagataaaccatcctgggcggcagatgcccggtggccttgggcaggagacgctggccccttcggcgctggcgctggatcttggctcgcagtcttcacgctttcgcctgccgcgggcgatgaatgataaggatatcgccgacgtgacacgacggttcatcaccacttcccggttagcggagcgcgccggatttcacggcgtcgaaatccatgccgcccacggctatttgctgagccagttcctctcgccgctcagtaaccagcgcaccgatcggtatggcgggagcattgaaaatcgcgcccgtttactgctggatattgtgcgcggcgttcgcgagacggtggcggcgggttttaccgtggtggttaaactcaattcagcagatttccagcgcggcggcttttcgattaacgatgcgaagacggtggtgcaactgctggcggaaagcggcgtcgatctggtcgaactttccggcggcagctacgaagcgccggcgatgatgggcgccatgcgcgatgaacggacgctggcgcgggaagcctatttcctgcagtttgccgagcaaattgccgacgtcgcgacgattcctttaatggttaccggcggcgtgcggcggcgtgaagtggcggagagggtagtgaatagcgggattgcgttggtgggcatcgctacggcaatggcgatagtccccggcttgccgcagtactggcgtaagggggagtacgatgcgccactgctgcgtcagggtaactggaagaacaaggctattgccgccaccgcgcatatggcggcggtgaaatatcagctgcagcggctaagccgccaccgcgcggtgcggccacaggtctcaccgctgtgggcgctgctgacggcgcaactgacagcaaaacggcaggctaaacgttatcggcgctggatggcgggcaagtaa

SEQ ID NO: 98390 - DNA, 234 bp, Enterobacter aerogenes
atgcctaaatacatcatcaccccagtcggaaaaccccgcatgacccgcgctgataattggaagcagcgcgcgccagtgatgcggtatcgcatgttctgcgatgaagcccgccttcatggaatccaggtaccggagaacggcgcccatatcaccttcgttttgccgatgccgcagagctggagcaagaaaaagacagccagccccatcagcaaaagcccgatctggacaacttaa

SEQ ID NO: 98391 - DNA, 348 bp, Enterobacter aerogenes
atgcgtgacatgtatgacgtaatgtaccgctggggagcatgggctgcagctgatagcagtggagtcgactggcaaccaatagctgctggttttaaaggcctactgccgcacggtaagaaatcgcgcctgcaatgtgttgatgatgaagggatcatgattgatggttgtgtcacgcgcctgaagacgtacaagcacgaagagtatgaactgattattgctcactttgttattgctatatccttaagggctattgcaaaaaaacgtaaatgctcagatagaactattcgtaaagagttgctaacagcaatggggtttatttctggaatgatgcatttacttaaatattaa

SEQ ID NO: 98392 - DNA, 1227 bp, Enterobacter aerogenes
atgagccagttaaaatatgtagtcgacttatttagagcatctcaagccccttcctttgatggggttaaaattaacgcgtccgcacagtacaccccgcatatttataacattctaaaagttatgttgtccgatgatttccatgagggcacatttaatgatattgaaattgatgggcaggatgtatacggaaaagaagatctacctttatcaggaagtattatcacctactcatttaacgttgcgcgtagaaacgccgatcgtttctataactccaaaagtgatttcgttaccattaattcacttaaaaaaggcataataccatctgatttttatattgtcgctgacaattactactcacacgacgaatctaagcctgattatattattaaagttgagaaaatatgcgcattaattaaacacctttcgaagatagcacattttcatgatatgcgaagcgataaaaatgttaatttctatcgacttgtatttgtattgcattcagaatcaaaatcctctacagctgttattgaaaccaatattacggatgatatttttgataaaaatgaagatgatttaaacattgatttaattgcagcactgtccacttctgatgcaagtaaggacaaccattacattgagaaactaaacacctttaggaatactttaattgaatatattgcaagctctaataatagcttttcaaacataataaataactggaatgaaattaatagattatacagcaataatcttgctgtttatatgtcagccttttctttccataaatcgcggaaagaggtaacagacgctgaaattgattatgcagaaaagatttcaaaaatactgtctgaaataacaaacaaatctttagcgattccaatttctttagtagctgcaatttcaatatttcagttttctgaaacaattgtcgcttatgtggctttttcaggtgtacttttaacctctctaattacaacatttgtttcaatatcattaaaaaaacaattagaccatgtttcacatgccagagacactctttttagctcattacaaaacaggttaacaactgagcaaaatgatttaaaaaacagattaaatcaagcaattcaaaaccttaaagataatgaaatattttgcattcggatcttagatctgatgaattgcttagcatggatgccaacatgcgttggcattattgcattaattttaaaaaattttaatatttaa

SEQ ID NO: 98393 - DNA, 1152 bp, Enterobacter aerogenes
atgaacaacattaccattaagcatgtgatcgtccacgaactgttaaaagtttctaatgaagattttgatcactccagaccttacaatctgcgcgagactgaattagataaaaacaacccaatcgttaagcagcttgtgaaaggcgtagtggatttatacggttcaaagggaaacgcggcacattatggtatcttcaaaagttcacgtgaagatcaggggccagttcctagcttatttcaccaatactatcaagtgcaagactctgtttcagatgatttcattatactctcgaaagaaataatgaaacaaatgtatctctcagcaaaagaacaaacttgggcatcagggggatacgtcgtattcagtgactatatttctttgggcttacgatttctgctagttacgatgataaaaaaaactaacggagtaacaattagtgaacgattagagcctgaggaaatgatccatcttgagatgaataacatcaatcaagcagccaaaattaatttccattattatcatcaataccaggaagctaatgaagtcgagcgaaccgaactcagctatttaagtttcattagcaaaacaacaggccaatccgctgcagcttatttcattgcagctttgggttgtgataaaggtatagcctccgctggtgcaacaagaaaattgcctaatgaagtaaggaagtttttcaaaaaaaataaagaaacaatgcctcacgcagatcgcattcggaacaaaataatcaaatatcttgaagtaaaatttgaaagcgaacaatcagcaaaactatctgatatagaagcagtagttactgctgaattatcttttttaccagatgataaacgtgaaccaaaaattcgtgaactgatgcagcatttaaacagcgaagaggtaagaatacccaccgaatttgttatcaataaaacctctctggataaaataagaaatgtcattttcaaaacggatcaatatagttttaacttcgataaagacttgttaggtgttactgcggatgctacaatattttacgacaatgcatctggcaatttaacatttagtaatttgccagttgaagctaaaacaaaaataacaaatgcacttaaagaaatgaatattacacttgataataacgacgcaagagaatga

SEQ ID NO: 98394 - DNA, 234 bp, Enterobacter aerogenes
atgtccgcagaaccaataactgcaacggtaacggcgggcgtggctgctggtacaaccggaatcacattcgccacgctttttcctgaggctacgctcgcagtgatggtctgctccctggcaggggcggcgctgtatatcctcagttctgaggaccacaaaatctggaagcagactctttttgcgctcatttcctttatcggtggcatttactgtgccggtacccaggcgtgctga

SEQ ID NO: 98395 - DNA, 1737 bp, Enterobacter aerogenes
atgaagattgacaaactgatgagtacgtttcgcagctacatctatagcgcttttgaagactacttaagaagcgaaaaagacgaacaggaaaaaatcaagctggttgaaccgaagattgccccttcatcttacaacatcaaaatgaaagcgagcgggatctatagccaacctaaccacatcatcgacttgatgttttggccaccaaacgtatacatcatacttgccggtttattagagaaaaaaggggggtatcgcctacttatatctggcatcaatggagttcactggaaaaaacaggacgtaaaagatgctcgaaaaattgcggaatcatggaatcacattctcagcaactctatcagtaatgtgaaacaaaatcgtacagatgagatagtacaggcgcttcaaacggtatttagttatcaaaatcttcagagcgccgtcactgatctaatcgctgatgaaaaatttatccttgaagttttaaggctcatcgtagcagcagatgaggcgtttgcacttgatctttttaaaaaagcaaaaaaaggtagcctcttcaggcttgttttggaacagatcaaggtgactcaaggagctacagattatcaactgtcatttgcggataaacatgttggtgctgttcatgttaaaagcacagtttgtcaaagtggtgtatcattaaacagcattacgcataacatggcctttatcaaaccggagattaacttaaaaatcattgatcgggatgaaggacctattgttaaagacgttttgaacattttgatcttgccttggccacttaatgtgccccgagagtcattcacgcccatcaataatgggcatcatatgttggaaatggaaaatgatttcggttttttttcatatgagccacatgaaaaaattgaggtggatgatattttaaccaccattcacgaagccaatgaggtcatgggaagtattgatctcgtagtgttaccagagtgcgctcttgagcaaaaattggcgcaggagttagcagacaagctcattattgacagtaaagaacgtggttacaactgccctgcattcatcagtggcacttatgaagttagtaatggggcatacggacgaaaccaactaactatgttcgtgccgcctgacactgaaaatgaagaaatagagcgtgctgaaccagatattttggtgcaaaacaaacaccatcggtggttccttgatcgccctcagctgtttaactacaagttgggaagtttgctaagccctgccaggaaatggtgggagtttattgacgtcagcgatcggagtctgataacatataagtgccatcagcaatctgttcagatctctcctctcatttgtgaggatttggcaaggcaggacccagttgcaccggccgtcagggccctggggcctactctgatcgtcgccttacttcttgatggtgcgcagcttaaaaatcgttggccgggacgttatgccagttttctttcagaggatccaggttctagcgtattgactgtctcaccattgggtatgactttgcgctctgatggtactggtttcccgcccagtcgaggagtagcattttggagcgaacctggtgattatcgtgagttgagtctcgaaaaggataagaaggctattgttttgacattagaaaaaaggtcgttacggcagtggacagctgatggacgtcgacatgaacgcgtatctcttcactatgcaggtaacatttgtttataa

SEQ ID NO: 98396 - DNA, 273 bp, Enterobacter aerogenes
atgaataacgctgaaattcgccagcttcgtgttttgggtggcatgatgtcatcgcaaaaaagtcgagtgaatgaactccttgagcatgatcgcttacagatgccttctgaagttattgctttctctagagcagtgatggctgaagcagcatctgcaaataaagtcaatcgttcacacattaatacagcgtatgagcgcaattttattgctgatgatcaagacggtgaatatgcattgatagttaccgtgcttaataatgagcttagtaagtaa

SEQ ID NO: 98397 - DNA, 672 bp, Enterobacter aerogenes
atgtgtggacgttttgctcaagcccaaactcgtgaagaatatctggcttacctagccgacgaaaccgaacgcgctatcgcgtatgacacggaacctattggtcggtacaacgtcgcgcccggtaccaaagttctgctgctgagcgaacgcgaagagcagctacatctcgatcctgttttctggggctacgcgccagggtggtgggataaaccgccactgattaacgcgcgtgttgagacggcggccaccagcaggatgttcaagcctctctggcagcgtggccgggcaatctgctttgccgatggctggttcgaatggaaaaaggaaggcgacaagaaacaaccctacttcatacaccacgccgacggccaaccgatatttatggcggcgatcagcagcacgccatttgagcgcggtgatgaaacggagggttttctcatcgtgacatcggcagccgacaaaggtctggtcgacattcacgaccgccggccacttgttttgtcaccagaagcagcccgcgagtggatgcgccaggatgtacgaagtaaagaagcggaagatatagcagccgacggagcggtgcacgcaaacaagtttatctggcacgctgtaacgcgcgccgtgggaaatgttaaaaaacaggagccagaattaatcgaacctgttcaatga

SEQ ID NO: 98398 - DNA, 540 bp, Enterobacter aerogenes
atgaaaataaccaaagatcgggtggtttacgccatgtcgcgcgataacgttcctttcgccaccgtcaacagtggaagtgaagtgttattcgaaacctgcgactgcttctccgatcaaatcacctcagccgatgccgtctttaatgaactggactggcagcgcattaacccggcgaccggccccgtctttattgaaggcgcagagccgggcgattgcttaaaagtcagcatcaaacgcatcaccctgacggctcaacaggcggtgatggtgaccgcgccgcagctcggcgtcattggtgatgaactgcatgagcccacggtcaccatcgtcccaatcgtcgaggatcatgcggtcctcccggggaacgtgcgcgtgccattgaagccgatgatcggcgtcattggcgttgctccagcaggagaacccatatcctgcggcacgccggatagtcacggcggcaatatggactgcaaaatgatcgccgccggcagcacgctgtggttgccggtcaacgtgcccggcgctattcgggctgggtga

SEQ ID NO: 98399 - DNA, 258 bp, Enterobacter aerogenes
atggtttgcccctgcctgttcgcaggggctttttttcgtctattacgccgttatttgccgggtggcggctacgccttacccggcctaccgttcgcgcggtcactgccatttgtagccccggtaagcgacagcgcgaccggggagcagtgcagaaaaagcaaatatttaccgcgcctgctgctgcgcctgagccaactggcgggcaatcgcctcgcggcgggcatcgccctccggcaacaacatcagcagctgctgtag

SEQ ID NO: 98400 - DNA, 699 bp, Enterobacter aerogenes
atgaactattacggtgatttacgcagttatatcgatgccctcgacgccatgggcgacatcatgcacgtgacccgcgaagtggacggtgattttgagccgagcgctattacccgccgcagctatgagatccagtcccctgccccgctgttccataaggtggcaggcgtggcccccggtttccgcctgttcggtgccccggccagcctctcctcccgtcaggagatgccttatgcccgcgtggcgatgtcgctcggcctggccccggaatccaccgggccgcagatcgtcgaagcgctgtcggcggcgcgccataagcccggcattcccccggtgcgggtggagtctgcggatgccctgtgtcatcagaacatcctgcgcggtgaagaggcgaacctcgatcgcttcccgatcccctttgcccacgacaaggacggtggtcgctacgccaacacctggggcacgctgatcgtcaaaacgccggacggcaaatgggtgaactggtccatcgcccgcgtgatgaaggtcgacggcaaacggatggtggggctgattgtgccgagccagcatatcggccagatctggagtgagtgggtcaaactcggccagccgatgccttacgccctggtgcagggcccggctccggcgatctcgtgcgtgtccggcattccgatcccggcccacgccgacgaggcggattaa

SEQ ID NO: 98401 - DNA, 714 bp, Enterobacter aerogenes; identical to SEQ ID NO: 15698

SEQ ID NO: 98402 - DNA, 303 bp, Enterobacter aerogenes; identical to SEQ ID NO: 15689

SEQ ID NO: 98403 - DNA, 996 bp, Enterobacter aerogenes; identical to SEQ ID NO: 15684

SEQ ID NO: 98404 - DNA, 1089 bp, Enterobacter aerogenes; identical to SEQ ID NO: 15683

SEQ ID NO: 98405 - DNA, 495 bp, Enterobacter aerogenes; identical to SEQ ID NO: 15682

SEQ ID NO: 98406 - DNA, 1881 bp, Enterobacter aerogenes
atgacgacagtaactcccggcttacgcttgcgctttctcggtttttttgggccacaaaagccacccgctacagtgaccttcggtactggcctcaatgtcatttacggcgcatcaaacactggaaaatctttcattgtcgaagccatcgacttcatgctcggtggaaagccgcctctgcgtgatatccctgagcgcgttggctacgaccttgttctattggggcttgaaacccttgatgggaagtcatttacactctggcgcagcatagatggcggtggttttcggctctacgaagacttgcaccagacgccaccaacaaacgaaattccgtatacgcagcttgacgaaaaacacagcgataagaacaatacgaacctttcatcattcttgctggatctatgtagccttggtggcaagcgtgttcgcaaaaattcccggaacgaaaccctcagtttaagctttcgcaacattgcgcgtttgatgatcgtcgatgagacggagatcacacaacaaagctcaccgcttattgatggcaatcccaccgccaacacgccgaacttggccacattcaagttacttttaaccggagcagacgactccgcattggtcgccaccagtaataagagtgagccggaagagttatcgcgcaaggcacaattgcgtcttctcgatcagcttcttgaagactatggtgaccggctcaaggagttgacaaagagtcctaaggaactcaaggagcagctagagaagattaacacctcacttcgtcaacaggcggcccaggtaaacaccaccgaagatgagtttcaggaggctgccgggaagcgacgagaattacgcaaaaaactggaagaaagccgagagcgacgtgcagaggtaagtgcgatgcttgagcgattcaggctgcttgatagacactacttgtccgatattgaaaggctacgtgccattgaagaaggcgggacgctctttagcgtactgagtgccgggcattgtcctctttgcggagcggcccccgatcatcatccccccgatactgggtgtaatggagatactgatgccgtcgttcaggctgcacgtgtggagattgccaagatcgaagttttgcgcacggaacttgtagctaccgtccaaagccttgagcgcgaaggcgccaactttgatcgcagaatacccactgttgttcgagaattagagtcgatttcggagtcagttgaagaattcctcgctcccaagctctcgacccttcgcaagtcctattcagactttgccgacaagcgggccgaggtacgcgaagcgctggcactctatgccactgttcaagacatggagcgccgtcgggctgatcttgagaagggcactgaggacgagaaggctggggtggttactaacgcagatctctcaagcactgtggcccatagttttgctaagactgttgaaggcatactgactggttggcacttcccagaggttggggatgtgtacttcgattccaagtctcgagatcttgtaattgctggaaagtcgcgtagtgcttttggtaagggccttcgcgccattacgcatgcagctttcaccctcgggctgcttgctttctgccgtgagcgccacacaccacacacgggattcgttgtactcgattctccattgctggcatacagagagccagatggaacagaatatgatttgaccggtactgaccttaaagatcagttttacgcgtaccttgaagcgctgcctgaggacacccaagtcatcgttgttgagaacaccgacccgcctgatgcaatcatgaagcgtgagcagtctcttatgtttggcaagaatccgcatcatggccgttacggtttgttcccttttatagccgaccctgcacaataa

SEQ ID NO: 98407 - DNA, 1020 bp, Enterobacter aerogenes; identical to SEQ ID NO: 15680

SEQ ID NO: 98408 - DNA, 867 bp, Enterobacter aerogenes
atgtattacctgcatacccgtactgccgatgacgtgcttaatacacttaaagcataccgtgatgacctccacgaacattcgctgcgaaaaccgcactggccgttgctggacaggcttatttcccgtgaaacagaaatgatgccggtatgggaaaacattgcgcagcagcggctcagctggcagcagtgccacaccctgctggagcagattttttttgcgggagcgtatggcactcaggatcataacagccggctgaaagctgactaccgcaggctgaccgagctgaatgagaaaatcgccgcgcaggcggcagcgttgtctgcgctactgacagagcagggccagatactcaaccgtaacgccttttcactggagcgcacgacgcacattgtcgatctgattgagatggcctcagagcagaacgggcactatcgttcgtatttgcgtgatcctctcgacgccttgcgcagccagtatgacggcaaatactggccctctcttgaacagatcctcaacgtcgccgccagggacattcctgaagccgaatttttacaccggagcgaggaggctattgtcgacggcagaggggaagccgtgccggactacctgcgggtgctgtttgaaggcattgaaacagcccggagcagctgctggaaacttccggctcgctttaccctcaccgacgccagtctggcaatactggtcacggtatcactcgataccgataacatcagtaatgagcgggtcaaaatgatacgcaccaggctgtataaagaggggtttccgggggcatgggcaacccctcgcaggacccctcccctgcggtcagctgccggcggggagggcagtaaacactgcatccggtga

SEQ ID NO: 98409 - DNA, 594 bp, Enterobacter aerogenes
atgaataataaccacggtattcctgaccatcttttcaccgtacagaattctgataacacatacagctggaccctgggaacgcgtatgggccagtttctctctgagacagaaacgctctatggtgcccgggacaccacctggactcttctgggctttgagtttaacgaaggaaggccaaatatctactttccaggctacccggcccgccggcagattattatccggctgggtgagaaagcctttaagtctgctccgcaggctatatatcaacttgctcatgagtgcattcacctgctggcgccggtagtgggtggagatgcgccagttttagaggaaggactggcaaccatgtactcagaagacaaagtcaaagcgttgtatccttcgccccaggatgcgatccgtaccagttcgcaaaactatatggatgccgccgccagggtccgggagttacttcagcttgagccggacgccatccgcaagcttcgtgctgttgagccggacttttacagaatgacggaacacacgtttgctgatgccggtctggaccagatcccgcaaccactggtggctgagctgctacggactttttaa

SEQ ID NO: 98410 - DNA, 1062 bp, Enterobacter aerogenes
atggtgtttatgttgctatgtagaagcgaaattaactgtgtggcatatttactacatcagtatttgatggtaaaaaataacacacgggcaaacaagagagcatataagatggcagccataaacataaagatagatgatgtactcaaggatggcggagatgacgttctgcgggagcatggtctgaacacaacgcaggcgattacacttttctggcagtatctcgtccagcaccgcaggctgcctttcatcgctgagacccgacttttcacagcaaccgatcttaccctggccattgccgcccagtatggcgatgcgctcaaccagctgcataaaatccaggacatgctcagttccggcgcgacagaattcgctgaacttgccgccgctaaactcgagctctcccgtcaggctgcagccattcagcagaatggctggcgactggagtccctgcccgaggacaatgatttatctgcctcagcacggcggatgctcccccgcattcactaccacctgaccggatgtgactttgcattgtctgacttaccgtcctgctccccgatcccggtccgggtggttaacgggtttggcactgcactacagcaatacgaaactgagttttccaggctgcaggcggtactgcgtgattcaggcctgctggcacgccctgagccgctgcgtgaatttgtttaccgggacgacaacgtcatgatatcggtcatacagcagcatgattatcagcacggggcatggattgtgcggatgcaggccaaaaccctggaacatgaaaatgccctggaggatgccggcctgacgttcccggaactggagggcagggtgtttctgcccggtagcgtgtacggaaaagcggtacgcaattcgcagaccggaaaatatgagatgggattccgctttctctccggcgtcacagagtttcatatgtactccagcgggcacgaggaggacgggaatccaacctcagcggatcaggtggcggccagcctcgccgtaacggtggacacttatcttgtaacgttgctccatgaaatggccggcaaaaattaa

SEQ ID NO: 98411 - DNA, 1572 bp, Enterobacter aerogenes
atggcagccaggcaaaacattcctgcacaattacgcttgaaggaaatacagattcagagcctcaaggggatatcaaactgcaccatcacatttcctgctgacacaaaagtcactgctatcatggggatgaacggttccggaaagtcaacaatcattcatgcccttgcctgctgctacaaaccgcgtaatgcaacttcgaaagaaaataaccggttctctgatttctttacccctcacgttgataacaactggcgtgacagtggctttacagcccatttttacgcgggaaccctgaacaatcagggtaacaaaatattatttgtccccacacctgcaccgaatgacacctttactcagtcttattataaagtcgcacgctggcagccagtgtatgatcgtcgacccgtcaaggaatccatatacctcggacttcagacactcggtaccttatctgatgatctcgctgcttcccgtcacgcaaagtatgccagccatgttttcgtccctgcacacctcaaacaaaaaatactggattcaatgtgtcgagttctggaggctaattactccgatttgatggtctgtacgacccaaaagggctacaccttctataagttcaccaaaaatggtatctcctataccgagcacaccatgggagcaggtgagaaacgtgtgtttgaagtgcttaaagctgcacatgacgcctctattctaccaaatgggctgcttcttattgatgaacttgatgttctcctccatgagaaagccttcaaaaaactggtcaccgagctgatcaaaatagcggatgaatctctgctcgaaattgttttttcaacgcacagggaatctattgttcagttcaagagagtgatcaatattgtcagtattttcaatatgggaacaggaatccaggctttccctggagtgtcagcggatgccctgcgtcagctgactgatattcagcctgaaatggttagtgtttttgttgaagatgaactggctcgtacggcaatcaacgtgcttcttgagcgagaggctttgaccgataaggtcgatgttcagatttttggtgcggcagaaaactctgctgttgtgcttgcgggtctcttactttccggcaaagatattggaaaagtcatgtgtgtgctggacggtgatgtgtatcgtacggtacaggaaaagttgaaaataattcagaaatgcctgacaggaacggatagcgtcaaaaagcaacaacgtcgagatgttctgagcaggctctttgagtttaatctacggacacttcctcaaaaaggcgccccggaatataatcataaactttggtttgaagcgatagatcctgccactatttcggcagaagagtctgctgaatatatcaagcttagaggcttttctatgtcaatcaacggactggcagactggcatgaatattatgaaagactgaacctttttgccagaaaatccaatatagaacataccgtcctgagctatatcagcaaatactctccagagtgggataattatatttcagcggtccgtcaggaaattattgtaagagctgccgaactggaataa

SEQ ID NO: 98412 - DNA, 870 bp, Enterobacter aerogenes
atggtgagttttaccttactggaaaatgcactggactctgtagaaattggactggaatatttcagaaaatcccgggaaagtcagagccggcgtgattacaaacaatgcctcctgaatctcttccaggcagcagaattgttgctgaaggctgtcgtttcacgtgaggatgccggccggattttcacgcaaaaatctctgcagaagcattgcagggatcctgcctgccccaccgaggaggagttgcaccggtgccagtctgtgaagattcgcgaattatgtgaactgataaaaacacatcaccggagtgaattttcggatcacgggttacagctgatgggtgctgtcgcacagatgagaaataatcttcagcattttgcgctggacgtcagcccgcaaagtctggcgatgcagctgtctgaattatacagattggtctttcggcctgcgttcatcctgctacaggccaatgaagaggataattcctgggactcagccgcgcgtagacaatttattgagctggaatcccggtttatggagataaccacacccgaagaatatgtgctggcactatgcccggtctgcaggagctggtcgcattttattgtctatggcggtgagagttaccccgtcagctctcactgtatctgctgtaatttcagcctgaccgatctgaaagtgtgggattttcaggaatgcccggagtgtagctggaattcggtgatctatgtaccggaacacagggctggagtatgcctttgccatacctgttactacagcaaggagggcggatttgttccaatggagccctgcagatgcggtgggttccgcattgaagaacattgcagtaactgcgatccagaggaagagtaa

SEQ ID NO: 98413 - DNA, 285 bp, Enterobacter aerogenes
atggatacaaacgagatgatcgacgcgcttatcgctgagggctataaaaaggtcatcctctatacgaaccatttgctgaccgatgacgaaagtgcagtgcagttttttctgacggatgaacaggggaacctcgtcggcaggaaccgacggatacctgactgtcagggatgggtgttgatcaactggcctagcgacccggcacgttgtacctctcccgcggaaatctgggaaatagatctgacaaacagagaggatgcagttctccgactctgtatgttttattaa

SEQ ID NO: 98414 - DNA, 810 bp, Enterobacter aerogenes
atgaaaggcatcatgattgatattgaagcggaacgatttaataaatggcttgaggaaaattacccggatattgtccccgagtctgaagcatgggagcaggccgtgaacctgtattactgggagcaggaggcgcttgctgatcaggctcggtgggattatgaacacggactgttcgtggtttctctgaatgatgttcatcagcgttaccgacacgcaagacaggagctgaagaagctttatgccctgctcgatagagagcagcctgaactggtgtacaggatgtctttcgtccatgccgtgactgtcatggaagcatacctgatgtactgcgctagggctctgctggaacatgactggcctcttaaacgcttcagggatgaatattacttgaagtccgaacgcgtcaataaaaacgaaaagcagtcggtacgtgagatggaacttgatatgttcaggcccgccgcacgcaattatgtttcccgaatgacgtatcataacgttaaaaccattgagcgctatttcagcgccgtgctgcatacaccgcccgtctggccggttaagcctctgggcgttattgctgactggcgaaacgacctcgtgcaccgtaacggggtggatgaacataatgtgccaagagatatatcagctcagcagctacaaaatgctcttctgagcgtgtctgatcttatagaggcagcacacagatccctgtgccaggagttggactatttcggaaactggcgtagtgaggaaaaccgggaaattattgcttcggcgctgaacataacatcagacagagatgtatcatga

SEQ ID NO: 98415 - DNA, 1329 bp, Enterobacter aerogenes
atgattgtcagtgtcaacataaaggctttgcaacatcttggtgatctcaaggtatctttcgatttttcccgcgatccacttatctgcatgaccagcaaaaatggcgtgggaaaaacctctattatcaaggctcttgccctgctcagggatacggctgtcatcagtaaaacctcatccgttttcagcatcagcgaggagacgcagattgacgtcacgttaaacagtgatgtttataccttccgctacagcaacggagatctagataccagagatattctgcgggatgagtcgtttatcagcgttgagcttccaatcccctacggaaagcgattttctgaattccctgcgctggggaacatcgatatgacgctgagggagatgttcctgaaaggcgactaccaggatgcgtctgatctaattgcgtttatgaagtccgtatacagagatgacgacaagtttcagaatctaaaagtcgttcgtattaaaggcgaaaattactatttcctcccactggacaataatcgctatatccgggaggactatttcagctcaggagagttctttgttgtcagtatatttaaaatgataatgtctccaagccgatttctcataatagatgaaatagatgtttctcttgattcatcagcgcaggtttcgctgatgaatgcagtccggaatatctgcgtggaaatggaaaagaaaatcctctttaccactcattctcttgccatcatgaaaactatttatgacttcggtacgcccattatctatctgaaaaatgaaggcggtgaaataagtcacaatctggtatcgtacagctttattcagctcgaaatgtttggctttcagggttatgataagttcctcttcactgaagatatcacgcttgaacagtatattaactacagattaacaggtctgccgatacgcaaccgctacaaggttatttatatcggcggttgcgacaacgtcatcgatttactcaaacgtaacgctctgaccaacttcatctgtcagcccgcagcggcaaaagccatactggacggcgatgccgcaggtaagtatgggcatcggccggatgtaattattagcccttttgatgatatagaggatgaaatacacagaaagtataaggaagaaaacgcagtgcataatcttcccgatgtggctcctgaaaacgcaaaatcgaaagcttactggaaaaagctgcatgagaactgtgagcagcatggtctgacccgggaagacatctttcgcatcctcgaaacgggctttgagcagaaggcagatgattttactcaggcgttgcttaaattcattgatggctaa

SEQ ID NO: 98416 - DNA, 972 bp, Enterobacter aerogenes
atgaagaataaaagcctggaaaatgtgtttaacgcatacttcaataacaaaaaagacttttccgattttcataaaatccgcacagaggaagaagcccatcttattcccctgaagagaaatagcgccgagctttaccagtgctccgacaaactcaaggcaatccataactttctggctcgttttgtcttttctgaaatgcccgtcaggaaggatattgttttctcttatcgtaaagaggtcaatatcaccgatgctgtgcgtccgcattgcgaaagcgactacatttacaaaacggatatatcaaaattttttccatctatcagcgcggacgctgtatcggaaaagttgaaaaaatactgtgcacatataagcacggtggatgcagaagacgtaagggaaaacatcggaagaattgtttatctgtgtacgcttaataatcaactaccagtaggttttgcttcttctccctctatcagtaatttctgtttttacgattatgacaatcttattgagtcttactgcagggaaaaaaattatatctacagccgctatgcggatgatctgattatatcttcacagagtgaaattcataaagaaagcattacggccgacctttcggtcatcctgacatctgacgcgttgctcaggctcagtcttaatcataaaaaaaccaaggttatcacgaaaaagtacgagagaaagatcctcggggtcagcattctgaataacggaaaaatgacggtcagcaaaaccacaaagaaggacatagaagtgaaattgcatctgctcagaacagaccgggtaaaactggtagactacaccggaatggatgagatgtcgtctatcctgtcaatcgcaggcgtgctgagtcagattaacaatatcgataaagactacctttaccatcttcgcaggaagtatggtaacgccattatcagcaagctgctcagaggcaaggagttgcttaaatga

SEQ ID NO: 98417 - DNA, 372 bp, Enterobacter aerogenes
atggaagtgtatacgcgggtatttgcgctggacatggcagccaggctcgaagtgccgtttaccagagatggtcgtaacgcagcggaagtgtcagaaattttaatccatctggcgttctactcaggatggctaaatacgatgtcagccgtcagcgcgaccaaagcgctatttgaatcacgcggcgtcaaggaagatgcgcttcctgcggcctctcctgacctggcccccttaaccaggaggcagaaaagcagtgttcagaaaagggggaaaaatgtgggaccaaactctctggcctggttaaattcactgctgatccactatttctggatctgtggcaaaggcctgcgcttaagctacgcgacagaagtctga

SEQ ID NO: 98418 - DNA, 573 bp, Enterobacter aerogenes
atgaacaattgcgctgaaaatgaagcgttaaagacgaactctgatggtaataatgtcatgcttattcgtagagtgttgcagcaagcgactgatcattacccacgactgtctgcgctggggtttactctacagtatgcgaattgccactcctgcgacaacgaacaacaaggtaatgcccagttgctacgttttcacgctgaagcctattgcagaattggcgattattcaaagatacgtattgaagcgggtaaaccgtctcagcctacggttcttcgctggttgtgggaggctgaaagtagttcaacatgtcggatgatgatgctattcaatcaggctgtttgtagtcatccccgacatgactcttcagcaatggatggaattcaggaagtcatgtcgttgctggtggctgcatggcgtgaagtagaaccgggcggggaattaacggaaataaaagcacatcgggcagagagaacgaagctagcaactttcgataaacgttatgcagaattacgagatgcagcattgcaaataacctcacctgttgcttttgccaaaagctgttcgacagtgtaa

SEQ ID NO: 98419 - DNA, 483 bp, Enterobacter aerogenes
gtggcattaaaattactccaattaacaattgagacacctttacacccccaccaatatagtaataacctaccatatcttagccctggcaatgtctctccactatttggcctcttattaaatgaactgaaaagattgaatgtcattggcgtaaatgattcgatgttaaaactcgctaaaaaatataaaaatgaatcctttacgttagagttgatagctattcatattatttttaacatggcaagaaatggcacccccgaagtttattcatttttatcaaataagtttgatgaaaatggctgtttgtacagatccgtaatgattaccttcatgatgcttgagttgaatttggattcttattctgaattagtggggctttacaattctttctttagtacggatgtaatcaaaatcaaaggtaatatattgctatgggcatcaggtaagaaagaaaaactcccttttgaataccgacctggaatttaa

SEQ ID NO: 98420 - DNA, 819 bp, Enterobacter aerogenes
atgcgactagcatcccgctttggtacggtgaaccttgttcgccgtgaccgtcccttaacccgtgatgaacttgctcactatgttcccagcgtgtttagtgaggaaaagcatgaatcgcgcagcgagcgctatacctgcatcccgaccatcactctgttggataacctccagcgcgaaggttttcagccgttctttgcctgccagacccgtgtcagagaccagagccgtcgtgaacataccagacacatggtgcgcctgcgacgcgcagggcagatagccgacaaacaggtaccggagatcatcctgctcaacagccatgacggcagctcaagctaccagatgttgccgggattattccgagcagtctgcgccaacggtctggtctgcggtcagtcgtttggcgaagtcagggtgccgcataagggcgacgtggtgggaaaagtcattgagggggcttacgaagtgctggagatttttgaccgggtggaagagaagcgtgacgccatgcagtcactggtcttgccgccaccggcacaacaggcgtttgccagagcggcgctgaggtatcgcttcggtgaagagcaccagccggtaacggaaacacagattctgtctccacgccgctggcaggacgaaagtggtgacctgtggaccacctaccagcgtattcaggagaacctgattaaaggcggtctgccgggcagaacaacgcagggcaagcgggctcgcacccgtgcagttaaaggcatcgacggtgatatcaggctgaaccgtgcgttgtgggtaatggcagaagaactgcagcagacactgagctaa

SEQ ID NO: 98421 - DNA, 477 bp, Enterobacter aerogenes
atgacccgtgatacattgccactttttacgccttcatctgtcattccggttgctgaccagaatcgtattaccacaacacaggtagccgatgacgaccgtatcagcttctggccacagcactttggcagcataccgcagtggataaccctggagccgcatatcttcgcatggatggaccgcttctgtgagaactacaccggcggcatctggcagttttacacactcagcaacggtggggcgtttacggcgccagaaaccgacgacgggaacgatgaaaaatggatgttgtttaacagcatgaacggtaacggcgcggagatgagcgccgaagctgccggaattgccgtctgtctgatggcttacagccaccactccatacgtactgaatgcgatgccatgacggaacactattaccgtctgcgggactacgcgctcattcatgctgaatgccacgctattatgcgcattattgactga

SEQ ID NO: 98422 - DNA, 480 bp, Enterobacter aerogenes
atgaaacaacagctcccgctgtttgcccgtgaattagctcccaccgaccagcaaaccatccggacggcattaaccctgctggagcgtcagttacgcgaacccggcgcatcatttacctccagccacgccgtccgggactggctacgtctgcaactggccacacaagaacgcgaagagtttaccgtactctttctcgataaccagcaccgactgattgcgcacgaaaccctcttcaccggcaccatcaaccatacgcaggtacatccacgggaggtggtgaaggcggcactgaaacataacgcagccgccattctcgtggcgcactgccacccctcggggcacgccgagcccagcgacgcagacagacggatcacagaacgtctcaggcaggccctggacctggtggatatccgcctgcttgatcacctggtggttggcgggatggagatcgtctcactcgctgaacgtggctggctgtag

SEQ ID NO: 98423 - DNA, 360 bp, Enterobacter aerogenes
atgcagaacacaacaaatccagcaaatcatgatattgccgaaccctggtggggacttaagcccaccgtcatcccgtgttttggcgcacgactggtgcaggaggggaaccggctgcactatctcgccgaccgagccagtatcaccgggcagttcagcgaagcggatttacgccatctcgaccaggcgtttccggtcctgctcaaacagctggaattgatgctggtttccggtgaactcaatccccgccatcagcacggtgtcacgttgtatgcaaaagggctgacctgcgaggccgattcgctcggatcgcatggctacatttatattgcgatttatccaacaccagcagcaaccgcataa

SEQ ID NO: 98424 - DNA, 378 bp, Enterobacter aerogenes
atgcagacccaacccgtatccccggaacagatggctcagtcctgcccctcacctgtcgacatctggcagacactgctcacatatctgctggaacagcattacggcctttcacttaacgacacgccgtttggcaacgatggtgtcattccggagcacattgacgccgggatctcactgtgcgatgccgtgaattttatcgtggaacagtacgatctggtgcgcaccgatcgtcccggtttcagcgcagaaacacagtcccccctcatcagcagtattgatatccttcgcgcccgtaaggactgtggactgatgacacgcaatagctacagactggtgaccgatatcaccacgggcaaataccgcgaggttcagctatga

SEQ ID NO: 98425 - DNA, 492 bp, Enterobacter aerogenes
atgaagctgtccctgacgttagaagccgataccctcaacgttctggccctcaacatgggccggatcgccgtgaatattgacgggattgagctggccgacctgatcaacgtgatcggtgataatggctactcgcttcgtgtcgctgatacccccgggaagctgattattgaagatccgctcccgtcagcaacccgactgaacggcatccagtgcagtatcacgcatatcaccggtgaggataacactacccttgaccacgtaacccttcaacgtcatgacggcagcaacgacgactggatactgtataccggctatggctatctgctcagactgaatgcccgtttacatcctgtgctggaactgaagcgactggggttatcaaaagcatgtcgccgtctggttgttacgctgatgcgtcggtattccgccgacatcatccattttgatgcttcaggtgaagtgctacccggctttgccacctttgactggtaa

SEQ ID NO: 98426 - DNA, 204 bp, Enterobacter aerogenes
atgccaccattaaccactgaaaccgtcctcaatattctgatcgactggctgcaggacaacatctgttgcgacagcaacatcatcttcgataacaatgaagacaacacagattcagcggcgctgttgccatggattgaacaggctctcagggatgttcgcgatcttcgtcatctgcagcttctgcacctgaccagaactgattag

SEQ ID NO: 98427 - DNA, 849 bp, Enterobacter aerogenes
atgtcagacctcactttcaccgaacccgaagtgttaaccggtaacaccgacataatttgctcgaccagcattgaacgcatcgtcaccggacgtaacgctgcgctggcacagattgaaaccctcattcatcaacttaccgatgtatcgacactaactagcagcatcggtggcaaaactgccctggactgggctatgaaacaggacttccgctgcggctgttggttgatggagaaaagagaaacagcaatgaaagccattacccgcaacctcgatcgcggtatttggcgggatttgatgaagaagtcagggatgcttgcaatcatggacgcccaggcccgtgaccagtggtataacagcctggaaaaggacgatattccggcggtcagcgaagccaatatcctcagcacgtttgagcaactgcatcttaataaaggtgaggtctttgagcggggtatcattaacatcttcaaaggacttagctgggattttaagacgaacagcccctgtaaatttggagggaaaatcatcgtcagtgggctggtcaaatgcgaccggtggggatttgggcttaactggggctggcaacgtgaccggctagcggaccttgagcgcatgctgatgcttctggacggaaagccggttcccgacaaccgtgctgacgtcactcgtcgcttgggcgaccatatccatgagaacaggcatagcaatcgttacgaggatgagatgtttgccatcaaatactttcagaagggaacagcacatatcacctttaagcggcaagaactggtcgataagctcaatgacatcatagccagacattatccaggggcgttgcccactaaacagtaa

SEQ ID NO: 98428 - DNA, 1122 bp, Enterobacter aerogenes
atgaggccattacctgaatatccgccttaccaggttgccagcccgccatatggtgtgctctggttgtcggtaagcttgatagtggtggtgttctcgggaatcggggcgctaatacttcagcctgttggaaacgttgtcggcatagtgtcatgcggcagtgcgatagtgatggtgatgctgtggatgcttcgtctcctctattatcggctgtcggttcattacgctcaatactattaccggctggtcagtcagtatcagcaggagtggtggacagagcatcagctgcattttacgttaagtgacgtagtgttgcttgggccgtctggatcaacgaatacgcattggtggcgcctgctcaaacatgaacagcgtcccgcagaggtaaaaaacgaggcgaacggcaaggcattacgagttgcccgtaccttggttgagcctgcgcatgaacgcgaggtacagctcgcgaaaatgctggtgctgcaatggaaggaacaacgcctccacgccgggttacccgatttacggtgctgttactggcaggggtcgcgccgcgcctggcaggcattttgcgctcagatgcaggcggcatttcctacagtcgggttgcctgctgagccacggttgtggagaggcgaacagagccttgcggaatttgctgcgataagcgacaccttagcgagcaatgaagcgattctggtggccgggtgccactcgctaatggcttccttttactcggtactgccagccggcgagtcggcggcattatggctggttggtaagggcggctccgtctgcctcactcgcggtgaagtgtacgatgttacagataaagaaacattatcagagacttgctctcgagcggagcggcaaatcgggctcgaagagccacctgacgcctgcatactgtttgcgcagcctacgctatctggctgcggctggaatattacccgccatcggcaggatgcttattggggcaactgtggcgagatggaaatgttaattgtcatcgcgcttgccgcgataagtgctgagtattttcgccgaccttgtagttggatagcccgcgatccgcaacatacgctggcacttgggattgttaaaccgggtggggaagagaattga

SEQ ID NO: 98429 - DNA, 477 bp, Enterobacter aerogenes; identical to SEQ ID NO: 15675

SEQ ID NO: 98430 - DNA, 1119 bp, Enterobacter aerogenes
atgtctgaagataacgaaatttcccaaaatgaaaccactccagaagttgcatctgaaacaacgcctgtagttaaagtaaggaagcctagaaaaaaagcgaccaaaccaaagcgtgacttccctcaatactctctagaagattgtagaaaaatagctgactgtctgaaggaatttaacgccggtaacccatgggcaccaggtgaagttgctaaagcactgggtttaggtaaagggccaaattttttctacatgactgcgtctgctcgagattacggcataaccgtgggtactcgcgacacaagcaaaattgaacttacggaattagggaagagtttagtatatcctaaatcacagaaggaagaaggcaatgcaatattaagtagcttcttaaatatagacttatttaagaaagtatatgattactatcaaggtggtaacctacctgagattgaatatttaaagaatactctaaaaactgaattcggtatagatgatcaattacaagacgacttttataacttatatcaacaaaacctcaaatacgttcgagaaaaagtcgctagagaagatagcattagtactaactcagttaatgacaaaactgccacagctagtagttccattatgctcggtgaatctcaagggcaaagtaaacttattgcatttgttgctatgcctttttcagaaaaaacgtctaactacccgcatggttattttgatgaagtacttaaacatctcattacgccttctgcggtgaaggctggatttaatgctaagacggcaaaaaaagcagggagtgaagttattcaatctacgattgtcaacgatcttgatgctgctgatcttgtgatagttgatctaactgaacacaatccaaatgtgctttttgaattaggtatgaggattgcctttagtaaacctgtctgtttgatcagagcaaaaggtactgcacctatatttgatatagaccacatgttaagagtctatgattataatccttgcttatggccttctacgctagaaagcgatattccacaattgtcagagcatataaaagaaacatggataaataggagagagcgttcatacctcgatattcttagagaaaataaaagctaa

SEQ ID NO: 98431 - DNA, 684 bp, Enterobacter aerogenes
gtgtggtcagagaagacgggcgtatggggagaaaaagaggagatctacgccgatcgtatcagcaacccgctgcgttttcagggccagtattttgacgctgaaacggggctgcactataatcgacatcgttactatgatcctgaaattgcgggatttattagccaggatccgattgggttagccggcgggctgaatgtttatcagtatgcgccgaatccgctgggatgggtggatccgtgggggctgagcgctgatgatttaatcagatacaagccatatgattctttaaatgctcagccaggggctagaagtactgcaatatctagagcatgggtccatgagaaagcgttattacaaaacggtggggttggaacacgcaattggagtagtgaagaaagagatttaattttaaaaacatccaataaagatcttacttcagtaacgtcaagggctggctatacaggacatcatataaattcagttgaaggaaacggttcattaggtgcaaaatggcaaggagaaccaagaaatattatattcttacaaaatcataaccatcccagtggatttaatgaacatgttcatggactgagggggcatagaggtaatactcaaaacgttacaaatggacgtttgatagatagagaatccacatcaagaatgcgaagtaaatgtgaggggtag

SEQ ID NO: 98432 - DNA, 426 bp, Enterobacter aerogenes
atgaaagaactcgaaaatccaagaattgaatccaaagttaactcctttgttgaaaaaggaaatgagttgcatgatgataaaaaatatgcacaggcgttagaacaatatgaaaaagcctggagtattttgcctgaaccaaaaccagaatggcaagttgctaactggatttccgcaaatatattcagcgcttattttgaccttggtgattacaatgaggcaaaaaaatggggcgaaatgacgttgcaaacgagagggtcggagatagatacagcgccatcgatcgatctgggtatggtttgttatgagctagaacaatttgatgaagcttacaaatattttaacgacgcttatagctatggaaaagagagagcatttaaaggcagacctaagaagtaccttgagttttttttaaataaaagggcatag

SEQ ID NO: 98433 - DNA, 1653 bp, Enterobacter aerogenes
gtgactctgattcggacagcgattcggatagcgacagcgattcggactctgacagcgattcggatagtgacagcgattccgactccgacagtgattcggactctgacagtgactctgactctgacagcgattcggattctgacagcgattcggactctgacagcgattccgactctgacagcgattccgattctgacagtgattccgactctgacagcgactcggactctgacagtgactcggattccgacagcgactcggactctgacagcgactccgacagtgactccgactctgacagcgattcggactctgacagcgattcggactctgacagcgattcggactccgacagtgacagtgactctgacagcgattcggactctgacagcgactcggattcggacagcgattccgactccgacagcgattcggatagtgacagcgattccgactccgacagcgactcggattccgacagtgactccgattcggacagcgactcggattcggacagcgattccgactccgacagtgactccgattctgacagcgactcggattccgacagtgactccgattcggattctgacagtgattcggactccgacagcgactcggattcggacagcgattcggactctgacagtgactctgactcggatagcgattcggattctgacagcgactcggactctgacagcgactcggattccgacagtgactccgattctgacagcgactcggactctgacagcgactcggattcggacagtgattccgattccgacagcgactcggactccgacagcgactcggactccgacagcgactccgattctgacagtgattccgactctgacagcgattccgactctgactcggactccgacagcgattcggactccgacagcgattcggactccgacagcgattcggactccgacagcgattcggattcggacagtgactccgattcggacagtgactccgattcggacagcgactcggattctgacagcgactccgactccgacagcgactcggattctgacagcgactcggattcggacagcgactcggattcggacagcgattcggactctgacagcgactcggattctgacagcgactcggactctgacagcgactcggattctgacagcgactcggattcggacagcgactcggactctgacagcgactcggattcggacagtgattccgattccgacagcgactcggactccgacagcgactcggactccgacagcgactccgattctgacagtgattccgactctgacagcgattccgactctgactcggactccgacagcgattcggattcggacagcgactcggattccgacagcgattcggactccgacagtgactcggattctgacagcgattcggactctgacagcgactccgattctgacagcgattcggactccgacagtgactccgattcggacagtgattcggattcggacagtgactccgattctgacagtgactcggattcggacagcgattcggactctgacagcgactcggactccgatagcgattcagattccgatagcgattcagattccgaaccgcaggcaaatgatgatacgcatacggcagctatcgataccgtag

SEQ ID NO: 98434 - DNA, 255 bp, Enterobacter aerogenes
ttgttaaagagtagcgaagttaaactagctaagatcattgcggatctggctattttcttagaatttacgagtgaagagcttcttgatcctgatgctgctgtagaagcaatggaacaagtagcagcagaacttcagttgttagatgatgaagaacggagcaatcttgctaatatttttattgatttatcaaatgaatatgaaggcgataaatcagaatatgttagggatttacccgaatctttaggtttaatatga

SEQ ID NO: 98435 - DNA, 840 bp, Enterobacter aerogenes
atgggtgggcttagcggaggcagcagcgcggatgcggtggcgggtgcgcaggccgggaagaacgcggtggagaataatgcgctgagtgatattgcagagcaacttgcttcggggcaatcaccggcggagaaactcgacaagctgaataaggcagaagaagagcgattcagtcgggaagaatgcgccggattaagtccagacgcctgtggcgccaaaatgtacgaccatcgccgggaagccctgaaggatatggcatcgcttggtgtggacttcttgcccattgccggggatatcaagggatttgcggaagcagaaagtgcgatagattatctggccgctgtaataggaatatttccggggttaggtgacggagcaggtaaagcgattaaagcagcggagaaggcactggcaaaaggtgatcttgaatctgcttccaagctgattaataaagccagcgatgatatacaggtaaaatgggttgatgaaaatgcgggaatgagccagagagcaagagattataacgactctgcaacaggtgcccggtcaaatattgacacccaaaaaggtcaagctcctaccattgatagaattgatgctaatgggaatagcaagccggttcggttcgatggagtggatggcaatgtcatgatagatagaaaaatatctgtagtgacaactcaaaaagcgaaaaaccaagccctgagacaatcagaagcactgaaaaacagtggtattacagggcgctgggaagtgccaaatcagactcaggctaatcgtgctcaaaagatgtttgatgatttagggatcaagaacatagaggtgaaaattgttaaagagtag

SEQ ID NO: 98436 - DNA, 720 bp, Enterobacter aerogenes
atgtcgctttctgatgagcagaagcaggctttccgcttccatcacatttccaccgacgaagtgtatggcgatctgcatggcaccgatgatctgttcaccgaaacgactccttacgcgccaagcagcccgtattccgcctccaaggccggcagcgaccatctggtccgcgcctggaaccgtacctatggcctgccggtggtggtgaccaactgctccaataactacggtccgtaccacttcccggaaaaactgatccccctgaccatcctcaacgccctggcgggtaaaccgctgccggtttacggcaacggcgagcagatccgcgactggttgtatgttgaggaccatgcgcgcgcgctctataaagtggcgacagaagggcggagtggtgaaacttacaatattggcggccacaacgaacgtaagaatatcgatgttgtccgcactatctgcgccattctggaccgcgtggtgacggagaaacccggcaatattaatcagtttgctgaccttatcacgttcgttaccgaccgtccgggacatgacctgcgctatgccattgatgcggcgaaaatacaacgcgatctgggatgggtgccggaagagacctttgaaagcgggattgagaaaacggtccactggtatctgaacaaccagacctggtggcagcgtgtgctggatggctcctatgccggcgaacgtcttgggctgaataaataa

SEQ ID NO: 98437 - DNA, 567 bp, Enterobacter aerogenes
atgataaagcatatccgtattttacccggcggactggcggtgttggccgccgctttgctctgcctgctgacggcctgccgcgatcacagtcgcgacggcatgagcggcgctgatataaatgtctataaccacggtccggatgccattgtttcgatgcaggtgaacggttacggcgggccaagagctaatccctacggcggcggcggcttctgctgcgtcatggtgcctgatgtctggcgcccagggctgacggcaaaaatcacctggacctccgaccctaactcctggatgaaatccagcaatatgcctgacaattattcgcaatactatcagcgccatggaccaattaccgtgccgattgagcgctgggaggaggagcaggcctgcggtttcgacgtgcatattttcccctgcgataaggtgcggatagtccgttcctgtcatatgcgtgattcccctgaatacccagtacaacctgaacctgacgaagaaaaaaaagcagatagcgttattttcaaacatattaaggaggaagttgtatgtccgacaccgcagagtccacgctga

SEQ ID NO: 98438 - DNA, 609 bp, Enterobacter aerogenes
atgtaccagcggacctgtcgtttttctccgccccagagcctgtctgaacgcttttaccacgttttctgtctgcaggttttccccgacatggtaacccacgatttttctggagcaggcatcagtgaccagactcagataagccgtgccgctgcgcagcggaagataagttatatcagcgacccagacctgctctggctcaagggcggtaacctgatcagggccgggtttcagcagatttggatgccggtaaaagcgatgatggctgttggtggttttgtgatatgcccgtttcactggcaccagaagctggtattcatccagcaggttaaacagacggtcccgtccgatattcagcgtgttatcggcctgaatgttcagcagatagtgcagtttacgcgtaccgattcgcggctgacgacacctgacgcgggtaacaaaatcaagaacctgagcatgatgttcctggcgttttctgcgccttgtgttgtcctgataccatgcctgtctgctgtgtcccaggaactggcatacgcgggtaacggttatttttggggccggactttgcgcgaggacttgccgggccgcttttttacaacgctcaccccgtaa

SEQ ID NO: 98439 - DNA, 426 bp, Enterobacter aerogenes
atgaaagaaaaaataagcaagattgataaaaatttctatactgacatttttattaaaacatcatttcaaaatgaattcgaggcagggggagttataccaccaattgccaagaatcaagtatcaacaatcagtaacaaaaataaaacattctattctctagctcactcatccccacactactctattcaaaccagaattgaaaaattcttacttaaaaatatacctttaagtgcatcgagttttgcattcagaaaagagcgctcatacttgcattatttagagcctcatacccaaaatgtcaaatattgtcatcttgacattgtttcattctttcatagcatagacgtaaatattgtacgtgatactttttcggtatactctgtctcttatacacatctgacgctgccgacgactccttacgtgtag

SEQ ID NO: 98440 - DNA, 423 bp, Enterobacter aerogenes
gtgctgtcgacggtgcgcgaagtcggccactactcctgccgttcgatgaccggcaactgcgcggccttaaccaggcttgccgatgaaccaggctatgcgcaaatcaacaccgccgacgccgaacggttaggtatcgaggatgaagcgctggtgtgggtcaattcgcgtaagggtcgcatcatcacccgcgcgcaggtcagcgatcgaccgaataaaggcgcggtgtacatgacctaccagtggtggatcggcgcctgtaacgagctggtgtcggagaacctgagtccgataaccaaaacgccggagtacaagtactgcgcggttaacgttgagcggattgccgatcagcgcgcggcggagcagtacgtgatcgaggagtacaacaaactaaaagcccgcctgcgcgaaagcgcgatgggttaa

SEQ ID NO: 98441 - DNA, 195 bp, Enterobacter aerogenes
atgacctaccagtggtggatcggcgcctgtaacgagctggtgtcggagaacctgagtccgataaccaaaacgccggagtacaagtactgcgcagttaacgttgagcggattgccgatcagcgcgcggcggaacagtacgtaatcgaggagtacaacaagctgaaagcccgcctgcgcgaaagcgcgatgggttaa

SEQ ID NO: 98442 - DNA, 294 bp, Enterobacter aerogenes; identical to SEQ ID NO: 31064

SEQ ID NO: 98443 - DNA, 846 bp, Enterobacter aerogenes
atgttcaatgaaaatgcagtacagtcggcacatgaatatttcagaaaaatttatgatttaaaagatgctgaggttctttcagaggatcttccgcttgttcaagggctttctaaggagggcgctgttcaatatcaaacatatcaatttaatgatgctccagaagcgttgaaggaacaggtcaaagtaggccgtttattaatggaacgcttcgtaggtgtagccagtgcggctgttaataaaaaggcacccagcagcaccgacaagtataatttcgagcaatggcaagaagtcactaagcatcttactaatgcgtttttcacagatcctgtttcaggtgacagaagtttaaatacgtcagtacaaggtattgagattgcaaaaagtgtaattaactttgcatgtaacgttatagcaggcgatgttacagccttcgcaaatttcctgaagggatttggtgacggcctcagtgcacaaatgagtaaaacgcaagctgcctataattatttatatgcatattctactcatgatttattcaaagatcaaagcggtaacgtattttacaaacctagctttcttgtatatggaacttactttagccaggagcaaaagaaaatatctacatcctgtgcttcatataatgaagtcaaccttaactttggtgtaaacacaatcggcgggacatttaaaattgaagaatacatgagcaatgataagtttaaggcagcagttgatgattttcttgataaatatgaaggaaaatcaattaaagatacagattcatactttgacggaatatttaataactcatccccttctgcatcttatcaatacaaaaagtcagaataa

SEQ ID NO: 98444 - DNA, 441 bp, Enterobacter aerogenes
atgagaacatctaatattctgtatgttatagctggcattatcttcattatgtcaacaacgacttacgcaagcgaaaaagtaccgaaaggtgcgttagttgttcgttacggcgccgcaaatatggatgagaattatgaaaatcaggatggataccctgataatttgcaaaatgtttcggctctttgctcccgaaaagactctggcgcgaaccaggatttagtaaatgagttaataggctcggataagacccgaaagagcatctggaaaaaagcaggagcgactaaagcctcaactttaataaataaaaatgccaaaattgaatcagacccgctaccaaagaatccgaatcattgtttaattagcaacattagcttagcgaatatcaaagggacatgggttatttatgttaaccccccagagttaagtgttcctggacaataa

SEQ ID NO: 98445 - DNA, 621 bp, Enterobacter aerogenes
atgtctgttaccgattcacttctcgctttttcccttgctgcgcttttgcttaccctgactcccggcctggacacggcactcattttgcgcaccgcctgtgctgaaggtggtaaaaaagcatttcaggcggcgctgggcattgatactggttgtttcatctggggagcgattgttgcactgggcctcggcgccctgctggcggtttcaacgttggcttacacacttctgaaaatcggcggagccgcctatctgagctggcttggcatacagcttctgatgcggcctcgttcgtctttcaaccacgataatggcagcgtagcttcacacaacaactggtttatcagagggatgcttgggaatgtgcttaaccccaaaatgggcatattctatatctcgtttttgcctcagtttattcctgccgggcactcccctttactatggacatttatcctggtcagcattcacgtcacgattggcactctctggtcagtgacgcttatcttattcacgcattttgcttcaaccatcctgaaaaaaagcagcgttgttagcatcatggacagagcaaccggcggtttatttttgtgttttgcggctaaactggctatcagttcgagataa

SEQ ID NO: 98446 - DNA, 1347 bp, Enterobacter aerogenes
atgatgatatcccggagatcgcttatcggcagcgccattgccagcagcgcgctaatggccgtagcgagtggacgtgcgtttgcgcaaaatgcgccagcgcaggcggccgacaataagccgaagctgcctgcgtcagcgtcgccgattttgctaaagaacatcgttattggaacggcaagcgcgccaacggatgtcctgattgccgaaggcaaaatagaccgtacgggccacgccttatccgccgcgaatgcgcaatcgatagattgcacgggttgtctgctgttaccctctttcattgatacccacgtccacctcgacaaaacgcgcttcggcgcgccggagcgtctacaccatatcgccaccgccagcgtagcggaacgagcggccaacgaacgcaaactgcgcgtagagcttaaacatgacccctacctttatggctccaaccttgtacggcagatggcggcaatgggaacgacgcatctgcgtagccatatcgacatcgacccgctaactaagctgtccgacgttgaagcgctgatgcgcattcgtgaggattttaagggctacatgagcatggagttcgtcgcttttccgcaatcagggattattaaatcgccaggcgttgcggattacatagctcaggcgctgaatatgggcgtggaatacatcggcggcctcgacccgcagggttttgataacgaccgcaaaggccaccttgatgtcctctttgccctggcggaaaagaccggtaagccgatcgatattcatttgcacgagccgggtcagatggggctggcttccatcaaagagattattgttcgcggcaaggcgctggggatgaaggataaaatcactctctcgcacgcgttttcactcggacaaatatccgaaagcgaactgaacgccgttctggccgacatggctgacttaggcgtccgcgtcatcggcacggctccgggcaatgtcgcattcccgcctatcgaaccattattagatgccggaattctctacgctgcggcgaacgacaatattcaggatatgtggtccccctggggagatggcgatcagctacaacgtgcgaaaacgttcgcctacagcgccaattaccgtgcagatgcgccgctgatgcgccccttcgagatgataacgcgtattccggcccagcatattaatctgccgaaccacgggctggaacatctgaaggaaggtaacgccgccaacctggtggtgctggaagccagcgacgtgccggcagcggtgttatacacgccgccgcgcaagctggtattgaaagacggtattattattggtcgtgacggtaagagcgcgataccgcagaaaatctga

SEQ ID NO: 98447 - DNA, 786 bp, Enterobacter aerogenes
atggatgtattcttcgggaaaacgcgtttttccaattattttatggccatggcgcaagctgaaactaacggattaatgaataccgcgctggcggtttctgcttatcaccttcatgatcccctgacccgagtcaggtttcaggacagcgttaaaagatttgccctttcacagattaacattatccgtcatagcagtgatgataagcagtgccagcagtgcattcaggcaatcagacaagagcgggaaaatctgcttattcaggacagaatgttgcgaaccggtgaagccatgctcactgcctccgtgcggttctaccgggaaaatgaaaaaatcatcggctatatcatcgacggaatcggtgttgttcttggcggtatgcaggttatcggaggaataggactagtgcttggttcagtaggtaccggaaatgtcattggtattgtagctggagcaacgcttgtattccatggggcgggaacgatacgagagcatttaggtaaagataattttgcgattaacgcatatcaggatacagcctcctttttaggatttgataaaaaagtagggttactagcctatcaggttgttgatctttcaacgtcactttatggagcctttaagctagcattaaaacccgaagcatggcggctattttattataccggaccggacttttatcgaaaaataactacgatgagcgcccctgcgctggctcttaaaggtgtttcatcaacggtaaaaggaatacaaataggcaataccatatatgaaattgataataagtaa

SEQ ID NO: 98448 - DNA, 750 bp, Enterobacter aerogenes
atggcacgtttagcaggtaaatatacgctgattaccggcggtaccagcggtattgggttagccaccgcgcaagcgtttatcgccgaaggggcgaaagtggcaatcaccggtcgcaatcctgacgcccttgcacaggcacaggcgcaattaggggaaaacggctgggccatcgcagcggatgccggcgatattgtcggacagcggcacctggcacaagtaattagccaacgctggccacagctggatgcggtatttatcaatgcaggggacgttacccatggcgcgattagcgactggacgcccgcgcagtgggatcaactgatgaacatcaacctgaaaggaccgttcttcctgctgcaggcactgctgccgctgctggcgaatccgtcatcggtcatcctttgcggatcggtaagcgcccatatcgggctgcccgccagcagcgtgtacgccgccagtaaagctggaatattatcgctggcgcgcacgctgtcagcggagctgctgtcgcggggaattcgcgtcaacggcctgagtcccggcccggttcgaactccggcgctgaacaaacttgggctcggcgcagatgcgctgcaggcgttacaggaagagattaaagcactggtacccctgggccggatgggcacgccagaagagctggcgaaagcggcgctgtacctggcgtcggatgaatcaagctacgtggtaggaaccgagctgctggttgatggcggcaccggcaacttgtaa

SEQ ID NO: 98449 - DNA, 360 bp, Enterobacter aerogenes
atgacggtaaagactgcgcgggcggcgcaaaaaaaatttgatccacaaccttgtccgatgacggatttcgttaatctgatcgccgggaaatgggcgattccgattttatatcggctgatcgtgcttaatgaaccggtgcgatttggcgaactgttgcgggcggcggccccgatcactcaaaaagagttgacccggcagctccgcttgttcgaacagcgcgggttggtctcccgcgaggtgtacgctgaaataccgccacgtgtggagtaccagataacgccgctgggcctgtcgatgcgcagcgcgttgcaaccgctggcggaatggatgcgcgattatggcgaccggctgaagcgctaa

SEQ ID NO: 98450 - DNA, 168 bp, Enterobacter aerogenes
atggataaaggaactctcgggccgctaacgctgcatgtgccatacaacggtcgtgaattttgccgttcacaactggaagcgcactccttcagttacaaaccgaaccccaccggaaagaaggggaatgcgctttcagttgtttcttttgggtacattatgtatctgtaa

SEQ ID NO: 98451 - DNA, 348 bp, Enterobacter aerogenes
atgcgtgagatgtacgaattattagaccgttggggggcttgggctgctgcggaaagtagcggtgttgactggcaaccaattgcagctggatttaagggattgctaccacatggcaagaaatcacgtatccaatgtgatgatgatcaagggattatgattgacgcttgcgttgcgagactacgtaaatataaaccggaagagtatgaactgattatcgctcacttcattattggcatctcgttgcgtactattgcgaagaagaggaactgttctgatgggacaattagaaaagagctgcaaactgctatgggatttattgatggtgttatttgcatgctctttccttag

SEQ ID NO: 98452 - DNA, 885 bp, Enterobacter aerogenes
atggctctttttgctttaatggataatacaatagcaacaaagattgttaggatcgaattagataaaggggcaagcacagctgcaacgtcaatttttcagcaacagaaaaaatattttgaatcacatcataataataaaatagcattttatgctgggtatgaaccaaaatatgatgaatgttttgaaataaataacttcgctgagtcagcaatattaatcgatgccgttaagagaccgactgcaatacctgtctgggatcctagtaaaatagatataggtagcatcaaagctttatttgtaggtgtggatgccccaaaaaaccctaatataatagcattgcaaacctttaataagaaacaaatacttgacacatcaaaatcctttctcgcaagtttaatcggaagtaaaatgacttttagcaaggctgttaatgttggttttaacattgatgataagttggttgcaattatagacaataatacactttattttaaaagcttttttaaattaagaagtgttttcgatatgacttcatattttaccgccgctactgatcaagatcttgatacttttagcaaactaccaattttctctataaatcaaggatttagcttaaaaacagtagctgacaccgtgataagaaataaagtcacccttataaatcaaaccggtatgctaacagcaaaaaatctgccacttttcaaggcggaagctcacaaagtaaatttcccattacaaacaaaaataataggaaacactgaaaaaatagtgatgccatcatcaaagaaagaaataaaagccctcctcgactttatagaggaggacatatggatttcaggaatcagtggaagaagattcaaatcaagttcaaaacgacctatataa

SEQ ID NO: 98453 - DNA, 519 bp, Enterobacter aerogenes
atgaacaagctagcgcggttgttgcttacagcaagctccatcgctcctgtatgtgcaacactttttttcataggttttattaaagagactgtatggctaatgaactacagtctatatgtaggcttgttaagttggatcttggcaataggattagtaaaatattctgagtggaagttagaacccctctacaagaatatcagttcactatctccagctaataaagaagtaaccaattattttttaagttatctgttccctttacttggaacagactctatagctgagaataaatcatatgctttattcttttatggctcactgcttttttatatatgcttttctgagaactataattttaaccctgttctttctctacatggttataaattttatgaagcagaagatgatacgggtgtcggatttgtgctaatttcaaagtccgtcattaccgatattaaagacacatctttcagtgttgttaaattaacagactacacctatcttcatgtaaaaggataa

SEQ ID NO: 98454 - DNA, 204 bp, Enterobacter aerogenes
atgaaatacaatttagataacgttggcggtattaagagagcatcacatgatcatgaactttacgtggttttggtcggagatgacggctcaacgcacaactttactataaaagtggaaggccgagagataagcagccttacactcaaggacatcgaagcaatggcaatagagcacgcgcgtcaaagctttgctaattgcaattaa

SEQ ID NO: 98455 - DNA, 2103 bp, Enterobacter aerogenes
atggcaaagcgggcatccgccagggggatccgacgggatgtctccggaattttacgcgcgccacgccgcatgctggttgccgacgcggtagccgagtatatgcgtgtgccgatgggcgctggtaactcggtcccatgggatcctaatctggccccatatgtgatagagccgatgaactgtctggcatcgcgtgagtacgatgctgtggtattcgttggtcccgcgcgaacgggtaagacgattggcctgattgacggatggatcgtatacagcattgtttgtgatccggcggatatgctggttattcaggtatcagaagaaaaagcgcgtgaacactcgaaaaaacgtcttgaccggacattcagatgcagtcctgaagtaaaaaccagattgagtccgcgtcgtaacgataacaacgttcacgatcgtactttccgcgctggtaactatctgaaacttggctggccctcagtcaatattatgtcctcgtcggactataaatttgttgcgctaacagactacgaccgcttcccggaagacatcgacggggagggggacggattctcgcttgcctccaaacgtactactacgtttatgtcttcgggtatgaccctggtcgaaagctcaccgggccgcgacattctcgatacgaaatggcggcagagttcaccccatgaagcacctcccacgacgggcgtgttgtcgctgtataaccgcggcgaccgccggcggctttactggccttgcccgcattgtggggaatattttcagcctgaagttgccaacatgacgggttaccgtgacacgacggacctggtcacagccagcgaagcggcctatctgcaatgcccggcctgcaaaggaaaagtgcttcctgcgatgaagcgcgagctgaacatgaaaagcgtctggttacgtgacgggcagtcaattgatcgggaaggaaacattacaggggagggccggcggtcacgcattgcttctttctggatggaagggccagcagctgcttaccagacctggtcacagctaatttataaatatctgacggctgagcaggaatacgaaaaaacccaaagcgaagagacactaaaaacggtcgttaacactgactttggtcgcccttatcttccgcgcgccagtaccgaacagcgtaaaagcgaattgctcgaacagcgggccgaggatgtcccgaaacgttgtgtgcctgatggtgtttgtttcctggtggcgacggtcgacgtgcaggggggacgtaatcgccgctttgtcgttcaggttactggctacggaagcatgggcgaacggtggctggtggaccgttacaacattcgccagtcactccggtgcgacgcgaacggtgaaagcctgcctatcgacccagccagttacccggaggactgggatctgctgctgactgatgtcttttacaagacgtggcgaatggcatccgatccccgccggtgtatgcgcctgatggcaatggcagtcgattccggcggtgaagatggtgtcaccgataatgcctatcgattctggcgtaaatgccgtcgggagggaattggccggaatgtttacctgtttaaaggtgacggtcatcgacgcgaaaagctgatcacccaatccctgccagataacaccggccgttcagcgcgccgggcgaaagccgccggggatgttcctctttatctgctgcaaaccaatgacctcaaagaccgggtaaacaacgccttgtggcgcgatacccccggaccgaactacatccatttcccgaagtggctgggaagctggttttacgacgaactgacttatgaggagcgtgattctgatggcaaatggagtaagccagggcgcggcgccaacgaagcttttgacctgctggtttacgctgatgcgctggttatccttcgcggatacgaaaaaattaaatggcctgatgcgcctgaatgggcgaggagggaaacgtggatggagaacgtgccgcaggaaactggcgaagaagcacccccggcgccagcgcctgtccagaccaaaaagcgcaaacgcaaaaaaaccgtaacagatgacgctaacccatgggccacctcaggaggctggttgtga

SEQ ID NO: 98456 - DNA, 213 bp, Enterobacter aerogenes
gtgaataaaagtgatattgaggccatgatccagcgctatgccgaagcggaaatggcggtactggatggcaaatccattaaatttaacggtcaggaaatgaccatggaaaacctgtcggaaatccgcaaaggacgacaggaatgggagcggcgcctttcttccctgaataataagcgccggggacggcctggctacaaactggcgaggttgtaa

SEQ ID NO: 98457 - DNA, 1503 bp, Enterobacter aerogenes
atgtctctacttgatgatgcgattggtgtcatttcccctggctggaaggccgcaaggctacgctcacgcgccatgatacaggcatatgaggccgttaagcccacgcgcacccacaaagcccgtcgggaaaatcgttcggctgatcaactcagccagatgggggctgcctcgctgcgggagcaggcgcggtggctggataataaccacgatttagtgattggcattttcgataagcttgaagagcgggtggtaggtaaaagcgggattattgtggagccgcatccgaagctcaagaacggcaagatcgctaaaaagctggcggcggatatccgtcagaaatggggtgaatggtctattcgaccagaagtgacccatcagtttacccgccccatgctggagcgcctgatgttacgcagctggttgcgcgacggggaggtttttgcacagatagtcagcggcacaggcaatggcctgacgcctaccgccggggtgccgttctggctggaagcgctggaagctgattttgttccccagaccagcagcgagtcggacaagctaaatcagggggtatataccgataactggggcaggccgaagggctatctggtctataaaagccagccggtctctggtcgtcagatggataccaaacggattgatgcagaaaatatgctgcacctgaagtttgtccggcggctgcatcagacgcgcggtacctccctgttatccggggtgctgatgcgtctcagtgcgctgaaagagtatgaagatgccgagctgacagcagcccgcatcgccgccgccctcgggatgtatatcaaaaaaggggatgggcaaagctgggatgaaaacgccggtaaggatgatgatcgtgagctgaatattcagcccggcattatctacgacgacctgctgcctggcgaggatatcggcatggtgaaatccgatcgcccgaatcccaatcttgaaaccttccgcaacggccagctgcgtgccgtgtccgccggcagccgcctgagtttttccagtaccgccagaaactacaacggcacttacagtgctcagcggcaggagctggtggaatcgacagacggttatctcattcttcaggactggtttattggggccgtgacgcgtccgatgtatcgcgcctggctgaagatggctgtcgccagtggccaaattactttaccacgcgggctggatatcgagtctttatacaccgcagtgtattccggtcccgtgatgccatggattgatcccgtcaaggaggctaatgcctggaaggctcaaatccgtggtggcgcggcgacggagtcagactgggttcgcgccagtgggcgacatccggatgatgttaaagcgcgccgcaaggccgaaatagacgaaaaccgtgagcaggggctggtatttgatactgatcctgccaatgacagaggaggcaccagtgccgatgccaaagatacgggcgtatcaacgtccgaaagccagcgtaaaaagtaa

SEQ ID NO: 98458 - DNA, 2022 bp, Enterobacter aerogenes
atgccaaagatacgggcgtatcaacgtccgaaagccagcgtaaaaagtaattcatggttccgcatgaaggcaagcgccaacaatgaagcggatatctatatctatgatgaaattggttattggggagtaacggccaaacagtttgttaacgatcttaaagcgctgggtgatgtcagccacattaaccttcacattaattcgcctggtggcgatgtctttgatggcatcgccatttttaatgctctgaaacatcacggcgccgcgatcaccgttcacatcgatggcctggccgcctccatggcttctgtcatcgcaatggtgggaaacccggtcatcatgccggaaaacaccatgatgatgatccataagccgtggggctttgctggcggcgatgccaacgatatgcgcgactacgctgatttactggacaaagttgaatcggtgctgatccccgcctatgcagcaaaaaccggaaaaaccgcggatgagattgcggcaatgctggaagacgaaacctggcttgacggcgctgaatgccttgccatgggttttgctgaccaggtgatcccatcccttcaggccatggcctgtatccattcaaaacgtattgaggaatttgaaaaaatgccaaacagcattcgtaacatggtcaccccgccgcgtaactccactcagcgcgaaccgcagcaaccagcaccacagcctcaggcacagcagccgatcgcccctcagcctactggcgcggatgagaatgctatccgggcgcaggtttatgccgaacagcgtaaccgtgtgaacgggattaatgatctgttcgctatgtttggcggtaagcaccaggatctgcaaaaccagtgtattgcggaccccgattgcactgtggagcaggcgaaagatgtgctgctggctgctctgggcaaggttgccaccccatcgaacaaaagcgatcagccgcacatttatgccgggaacggaaattttgttggcgatggcatccgtcaggcactgatggcccgcgcagggtatgaaaatcaggaacgtgataacgtgtacaacgggatgacgctgcgcgaatatgcgcgtatggcgctgaccgaacgcggcattggtgtctcaagctataacccaatgcagatggtcggcctggcgttgactcacagcacctctgattttggcaatattctgctcgacgtggcgaataaggcgcttcttcagggctgggatgaggcagcagagacctttgatctgtggacgaagaaaggccagctgtctgattttaaaacggctcaccgcgtgggaatgggtggttttaactccctgcgtaaggttcgcgaaggggctgaatataaatatgtgaccacgggcgataaaggtgaaacgatcgcactggctacctatggggaaattttctccatcacccgccagtcgattatcaacgatgatctgaacgcattaaccgacgtcccggcgaaaatggggcgcgccgcgaaagccaccattggtgatttggtgtatgcgattctgctggataacccgaaactgtccgacggcaaaccgctgttccatgccgatcacaaaaacctctcctctggcgccatttctgtttcgagcattgatgatgcccgcaaactgatgcgcctgcagaaagagggcgagcgcactctgaacattcgtccggcttatatgctggtgccggtgggtctcgaaacgctggccaatcagacgattaaatcggcaagcgttaagggtgcagatatcaactccgggattaacaaccctattcagaactttgcggaagttatttctgaaccgcgactggaccacaaggatcctaacgcctggtatctggctgcggctaaaggcaccgataccatcgaagtggcatatctgaacggtgttgatacgccttacattgaccagcaggaaggtttcaataccgatggtattgctacgaaggtacgcatcgatgctggcgtggcgccgttagacttccgcggtctgacgaaatccactggtaagtaa

SEQ ID NO: 98459 - DNA, 327 bp, Enterobacter aerogenes
atggctaaaaattatgtgcaggaaggaaagactatccctgtggagaatgccggacaggaaatcatcctgagcggggcgccggttgttatcggtcaaatgattgcggttgcgatcacggatattccgggcggcgatacaggtgatggccttaccgaaggtgtattccagttgccgaagctggccgccgatgaaatcagcgcgggggaaaaggtgtatatcaaggcgggtaaagtacaactggaagccactgatgccgtcctggcgggtgttgcctgggaaaatgctgcggctaacagtaccgtcattgacgtaaaaatcaatgcctaa

SEQ ID NO: 98460 - DNA, 276 bp, Enterobacter aerogenes
atgcctaaccctttcgacaagatggcggcccggatggatgccgccaccctcaaaaaaatgggcagggaagcggtcattaacggcataagcgttgacgtcgtgcctgctgaattgctggaggagatgggcgtgttgtccggtaccgcaacggtgctggttgtttttgctgctgactatcggcccgccagaaacgatgctgtcgaatatgacggtaaagactggatcgttacccgttatcagctttttaacgggaagcctcaaatctggctggagtga

SEQ ID NO: 98461 - DNA, 579 bp, Enterobacter aerogenes
atgtcactgaaaggtcttgagcgtgcgatccagaacctgaacagtctgagccgtctgatggtcccaacggctgccgcccaggcgctaaatcgggtcgccgggcgggcgattacgcagggcagcagaaaggtcgcaaaagaagcgacagtgggtgataaccacaaaaaggggttgccggtgaagctggtccgccagcgttcgcgtcttaagcgtgcgaagcctgaacggctggtggcggcaattcgtatcaaccgcggaaacctgcctgcaatcaaactgggcgcagcgcgtgtgcaactttccaggcgaaaaggagaaaagcgcgggcgcgggagcgtacttcgtattggcccgtacattttcagaaatgcgtttattcagcagctggagaacgggcgatggcaggttatgcgccggctgggtaaaccccgttacccgatagatgttgtcaaagttcccctcgaaaccccattaacccaatccttcaccgcgatatcaaagcagcttatcgacagcgatatgccgaaggagctgtctgccgcgctgaaaaatcaactgaggatccacctgaagcgatga

SEQ ID NO: 98462 - DNA, 402 bp, Enterobacter aerogenes
atgagcaaacacaccgctattcgtcttgcggtactggaacaactaaaggcgtccattccggatcgtgtgacatggtttgacgggcgccctgtttttctggaagagcaggacctgccggcgctggcaatctatctgtctgatgccgaatacacgggagacagccttgatgaggacagctggcaatcagtcctccatatcgaggtatttctgaaatccaccacgccggatagcgcgctggatgcgtggatggaggaaaaggtgtacccggcccttgagactatcccggcgctatctcccttaatcgaaacgatgatccccatgggctacgactaccagcgcgatgacgaactggccacatggggatctgtcgatctgacttacaccctcacttacctgagataa

SEQ ID NO: 98463 - DNA, 744 bp, Enterobacter aerogenes
atggctactccaaatccaatggccccggttaaaggggcgggcaccacgctctggttatataccggaacgggaaatccctacgctaacccactttccgatgccgactggcagcgcctggcaaaaattaaggagctcacgccgggcgaaatgacggcggagtcctacgatgacacctaccttgacgatgacgacgcagactggaccgcgactgcacagggggcaaaatcggcaggggatacatcattaacgctggcctggaaaccgggtgaagaagggcaaaagtcgctggtggcctggtttgtcgatggcgatgtgcgggcctacaaaattaaatacccgaatggcaccgtggatgtgttcaaaggctggtgcagtagcctgggtaaagccatccccgcgaaggaagtgatcacgcgtaccgccaaaatcaccaataccgggaaaccagaactggcggaagaaagcggcaacccgccgatcgcagtgaccggcatcaaactcgacaaggcaacagccagcgtggccgtcggcgcaaccacaacgctaaacgtcaccttcctgcctgccagcgcgtcggaacagtctttccgtgcgtcgacctcggatagcacgaaggcgaccgtggccgtgagtggcaaatctctgattgttaccggcgtggcggctggcacggccgacattattgtcatgagcaatgacggtaattttgtggcgacctgcaaaaccaccgtgacggcgtcctga

SEQ ID NO: 98464 - DNA, 429 bp, Enterobacter aerogenes
atgagcatgtttttgaagaaagacgaatttacccataacggcgctacggtgacgatcaccgaattgtcggcactgcagcgcatcacttatctcgaatatctggccgcagaagaaaaagccttatctgccatttctgatgacgtggatgaccagacaatgtccgccgggctggtcagcatgagtattcgcgcaggcgcgcgcctgattgcgctctcgctctggcataacgatccgaaggggccatctgaagaggaactccaccagcaggtgatgagtacatggccggcggaagcgattggcaaagcggaaatgcagatcaagctgctctccggcatgctggcgcccgttgtcgaagaagatcaacccattgatgccactgcgctgggcgatgaaccaggcgatgaacctgttactgcggaaaagccctag

SEQ ID NO: 98465 - DNA, 9354 bp, Enterobacter aerogenes
atggcaaataacataattaaagggcgcaagggtggcagctctaaacagcgcacgccgacggaacagccggacgatttacagtctgtagcaaaagccaaagttcttatcgcattgggtgagggggagtttgcgggtagtctaaccgggaaagatatttatctcgacggtacccctcttgagaatgccgatggttcgcaaaacttcagtggtgtggcctgggaattccgacctgggacacaggcacaaagttatatccagggtattcccggtactgaaaatgaaatttccgtagggacggaggtttccagtgagaccgcatggacccacacattcaccaatacccagctttctgccgttcgcgtccgcctgaaatggccgtccctgttgaaacaggaagatgataacggtgtggtgggtaataccgtcaagtatgcgattgacctgcagaccgacggtggcacctggcagacggtgctggaaaccgctgtcacgggtaaaaccacttccgggtatgagcgtagccaccgtatcgatttaccgcaggcaggcagcacctggacgttgcggcttcgcaaggtcacgccggacgcgaacagcgccagaatcggcgacataatgacgctgcagagttacaccgaggttattgacgcgaaactgcgttatccacacaccgcgctgctgtacatcgaattcgactccagccagttcaatggttctatcccgcaaatctcctgcgagccgcgcgggcgtgttatccgtgtcccggataactacaacccggaaacgcgcgaatataccggcacatggacagggggcttcaaatgggcatggactgataacccggcgtggatttattacgacattgttgtctctgatcgtttcggtcttggcgatcgtctgaccagcgcgaatatctccaaatgggcgctttacccgattgcgcagtattgcgatcagttggttcccgatggcaggggcggcgatggcatggagcctcgttatatctgcaatgtctatgttcaggagcgtaacgacgcctacaccgtactgcgtgattttgccgctattttccgggggatgacttgctggagtggtgaacagatcatcgtgcaggccgatatgccgcgtgatgtcgatttcaactatacgcgcgcaaatattatcggtagcccgcggtattccagcagcaccagtaagtcgcggtacactaatgccctggtttcgtggtctgacccggataacgcctatgccgatgcgatggaacccgcatttatcccggaactggtttcccgttacagctttaatcagttggaagtcacggccattggatgtacacggcagagtgaagcccatcgtaaagggttatgggccattctgaccaacaacaaggaccgcatggttgaaattgatgttggtcttgacggcaggatcccacagccgggttacatcattgggctgggcgacgaacggctggccgggcgggttaatggtggtcgtatcagcgcggtgaatgggcgcgtcatcacgctcgaccgtgatattgatgcgaaagagggcgaccgcctgcatctgaatctgccgtcgggtatctcgcaggcccggaccattcagtcggtgaacggtcgtcggcaggtgacggtcacaacggcatacagcgagacgccagaggcggagtgtgtctggatcgtcgaatataccgacctggtgcctcagcagtaccgcgttttcggtgtaaaggacaacaataacggcacgctcaccatcaccggcgtggctcacgacccggataaattcccgcgtatcgataacggcgcgatcatcgaccagcgcccgattagtgttatcccgcctggcaaccaggctccgccagatggcatcctccttacgtccttctccgtggtgaatcaggggatcagcgtcgaaaccctgcaggccaattgggacgcggtacaaaacgctatcgcctatgaggcgcagtggcgccgcaatgacggcaactggattaacgtgccgcgcagctcgaccacgtcatttgaggtcagcggcatttatgccggtcgctatctggtgcgagtccgtgcgatcaacgcggcggaaatttccagtggctgggcgtactcggaagagaaaaccctgaccgggaaagtcggcgagccgctgccgccgctggcgctgacgaccgtttcactgaccgcgggtatcgaaattcgctgggaattccctgaaggtgcagaggacacccagcgaactgaactgcagtacagcccggaccagagcgggaacggcgcgatgccgctgaccgatttagcgtatccgggcaaacagtatcagcagatgggtctgcagattgccacgcagttctggtaccgcgcgcgcctggttgaccgcctgggcaatgcctcgccgtggaccggctgggtgcatggaatgtccagcgataacgtttctgattattaccagcagctcgacgacgcgcttaaaggctcggatacatacgaggaactgaacaaaggcatccaggacaacagcgctgctgccgacgccgcgcaacaggctgcggacgccgcccagggaaccgctgaccaggcggcgaaagatgtcgccgcgcagggggctatcgtcacgcagcagggcaaggacctggccaccaacatcgccaaaaccaacgacacgaccaacaagctggcgcaggaagtgaaagaccgcgctgcaggtgataccgccacggcgcagaaagcggccagcgataccgctgcagcggtggcgaaagccgaaacggacgatgccgccgtggcgaagcaggccgccgataacctgctgagtgccaaacgcgaagttgaagcggcgattgagacgacgaacgtcaccatgcaggacggctttgacagcctggcgcagcagatggcgtcgatttcagccggtaccggcgagcagtttgacagtctcaaaatatggtatttcgacaaggacaacgaggggtggagttctgacgatggcggcacgaaaccgctcccgacaaccgacgacgggtggatccttcctgcggatgccatttcgaccatgcgcagcccgtcgggcgctggcacgctgattgacggcagcgcctataagtacctccgcctgcgcatcaagaaagtcggcaacccggcctggggcggtcggctgtactggattggcgctgatgaaaccggctggaccgagggacgccgtctggtactgcccgtaccagattttgacccgaccaccggcatcagcactattgcgatcccggatatcccgtggcaggcctccggcactatccgtcgcctgcgtctcgacttctcacaggggggagcggctgacgcagataactattatgccgttgactggctggccgttgggcgcccgacccctggtgcatcgcaggcgcagattcaggacctgaaaacggcgatgactgctgccgactcagctgaggcaatggagcgtaaccagctggctgtgcagctgcgtggcaacgaggaagggacagacccgaataaactggtttctggcctgcttttcgaagagcggaaaatccgcgtgacggcggagaaggccatcggctcccgcgtggatacgttgcgcgtcgattatgataaatccacggcagcggcgacccagcgcatggatacgctggcgagcgacctgcagtcgactgcctcgaaaacggatcaggttgcagcggaccttgtttcagcgaacggcgtcattgctggccatacgctggccatccagaaaatcgagggtgacgtccagactatcgacggcaaagttcaggccaacgccagccagattgccggggtggaatcgaaggttgataacatccgaatcggcggcgtaaacctgatacccaactccggggaactgaccggcaaatcgccatctgcaaccgaacgttaccggggtaacgcggttcgcatcctgacgcgtgccgccggagcgactgatttcgccgtcctcgactacacgctggccgcgccggttgacggtaccgagtatgttctgtcgttctatgcgaaagcgaagacggacaagacgccggttcgttgtttcctgaatacgccggatgccactatccgcgctgaaaccagccagggcgttattgtggagcgtccagccgggtataacggcgatgtgaccgtgacgctctccacgtcctggagtcgctattgggttaaatacaaacgcaaacctggcttgtccgggacggcgtatctcgttgtggccagactcgacggcgcagctgcagcgcgcgaagcgtggatcagctctccgatgtttgaatccggaaatattgtgagtgactggagccaggcaccggcagacagcgccagctcggatgccgtccagcaactgacgacccgcgtcaccactgccgagaatacgctggccaccacggcgcagcagacgacggcgcttaagtcacagattacgaccggcaacctcctgctgaatggcgacctgattaataaagcggataactggcagctgtccggcaccggcgcgggtgctccggtctatgacgcggtgatgaaaggtctcaccacgaccgagccggcgatgcggatcgccaacggaacaaaaatcccggttgaagccggtcagaaactgacgctcaccttcggattcaagacggacgacgcgacgatcagcatcgggacccagaattttacgatgggcctgattgagaattgggggaatccgactaactggcttgtccaggacaacacctggtttgcgggtatcaccaccggctaccagacccgcacgctgacgttcacgatcccgaatgacttcaaagggagatggtgttacctgcgcatggcctgcggaggatggacgccgtcaaccgctcgcgtttacctgcagggcttcatgctgaccgcctcaaacggtatcgctggtaaagccgatgcatcagcagtgcaggacctgcagtcgcaggtcacgaagaacggtgacgacattgccaccaacgccagcgcgatcactagcctgggtgggcgtattgatgccaccaatgccgaggtggcgaagaaagccaccaccgccgcgctggatagcctgaaggccaccgtcacgcagcagggtaaggatattaccgcacaggctgagcggacgacggcgttaaccaataccgttaaccagaataagcagaatgctgattctgcgattgccgcgaacggccaggcgatctctggtttatcgcaaactgtttcacagcagggcgaccgcatcaccagccagggccagcagattacgcaggtcagcaataaagtcgatacggtgaatactgacctcggcaagcggattgaccagaaggccgataacaagacagtacaggacctcagcgccaccgtgacccagcagggcaaggatattacggcggcgaaccaggccatcaccagcctgaaagggcgtgtttcgacggttgaggaagggctggccaaagcggccaccgccgatgccgtgagtaaactggatacacgcgttacaaacgctgaggggaaaattgaatcgcagggaacggcgatcaccgggattaatgttgcgctgaactcgcagacggcagcgggtggtgactacatcctgaacccgacatttgaccccgcatatccgtctatgggttttacccgccgggatacggtagacagcaacgacgatgatggtattccgtatgatgctgacatcccggctggcgctccgcgtcgctatgtagcacgactggcctcacgcgatcaccagctcaatacgccaccgtggccggtaaaagcgggacaggtattcgagatttcggtctgggtagcggcaaaggcaggttccaacgccgcatttaacatgtacatcggctcggctacgggaccgaatacgggtgccgtggcgtacgctgcgttaccgggtagcgttgcgcccactcagacctggacggagaaaaaataccgctggacggtcccggctaacttcccgcgcggatatatgcgcccgttcctgcaggtgaaccagaacgcgccgtatggctccgtatggtatgcaactgatttccactgccgggagatcaccgccgcgcagggtgcgcagactgctgccgacgctgccgccggtgctgtgacccagctggatgcgaaagtgacgcagcagggcaacaccattaccagccagggccaggcgattacggccatcactggtcgggtgtcgaaccttgaatccgggcagagcgcgaacagcagcgcaattcagtccctgacgcaacgaaccacggcagcggaagggaaaattgaaacgaacagccaggcgatcacctccgtcaccggcgcggtgaatgcgatgctcaatcgcggcgagaacctggcaaacgattttaattttatgagcggatcggcgctgtggggtgtccaggggaatacgcgtaacaaggtggagtttggcgactttggcgacggtaaacccggcgtccagatgacgcagctcgacagcacgttgtataccggcctctttgctaaccagaaagcgccgctgccacacaataccccacgccgctaccaggtcatcgttaaggcgaagggcgtatccggcgcgatgaatttcatggttcgccggtttaactacctggggaatgtggccgggacttatgaaaaccgccagttctccgccacggatacctgggcgacgtacgccgctgagtttagcgcgccatcgtcggcgacagtggatggttctgtttttgcgctctactgctacccgaacgcgtcggtcattcagattgattacatcgccatctatgacatcaccgatgcggtggccatcgatgcgaatacgtctgcggtcacgcagctgcagcagacggtcacgcagcaggaccaggatatcgctgcgaatgccagcgccacgaccgccgtttctgcaagcctgaatgcagcaatggctgacgtggataacaaaatcacgggcaacctgattttaaacgggggattcgagcgcgacttcaccaactggaccgcgccagcacaggcgacagtgatgtcggcgcagaatccacacagcggcaaaaaaatcgtgaaatatgtggccgctaccaccacgactcttttgtcgaatgacaccgttattactgccgttaagggcagaacgtacaagtttggtgcgtggctacgggctaaggccggttcgactatgcagccgaacacgcagcagaataacaaggttcgatttgcatacctcgataactctgtaatcctcgaggcgcgcttcgacccggccacaatgcctactggcagcgtatggcaggagtacagcaacacgtacaccgccactaaagacggcaccatgtcggtcagcatcaacgcgtttttgaatgcaggcgaaatttatatcgacgatgtgtacgttatcgatattactgaccgggttgatctcgatgccacggctggcgctgtatctaacctgcagtcgaccgtgacacagcagggaaaagatattgcctctaatgccagcgcgatcacgtcggtcaacgcttcaatcggtgcgctgcagagccagggattaaacccctggtgtgatggttcctttgagtcatacaccgcaaaccagcagctgggcagcagctcgctggcgcgcgtctcgaccgatgtttaccgcaatggccagaagtcgctcaaaatcacgcgtaacaacggcgagaacggcaacagcgacaagatgatcgggaactggcttgctgttcgcggtggcggtaagtatcggttttctctctgggcttacatggccagcgatatgtcgacaccgaacggctggaacgtgtctgtcggcctctttgctcgcggagagaatggcggcgcaaaccagtggccggaagccgtccgtatctccgagacaaacatctcgcgcggcaaatgggttctcctgacgggagtagcgaccgtcggtaccgaccggagcattgcgcagatgtggatctccaccagggggccgaatggtggagccggttattcgctgtatctggacgatatcagcattgtcgatgtgaccgacgcacaggaggcgcaggacaccgccaccggcgcagcgaacgccgttacccagcttactgcgaccgttacccagcaagggaaggatatcaccgcgcaggcagggcaaatcaccagcctcggctcgcgtgtgggcgatgcagagtcgcgtatcacgaagcaggacgaaaccatcgcctctaacggcctggcgatggcgaccggctttaaccagatgcgcagcatgattggcgacaacagcgcggcaatcaccacgacgaacaaaaccgttgccgacctggaaaaatcaaccactgagcaaatcaccacgctgacctcgcaggtcggggatatgtctgcgaccgttcagcagacggcatccaccgtggcggatttaaacgggaaattgggagcgcagtggggcgtgaaggtcaacacgtcttccggcggtaagaactacgtagcgggtcttcagctggggattgacggcagcggccagtcacagttcctggtgcaggctgaccagttcggcatttatgtgcctaacggcgataaaagcaatctggccttcggtgtcgatgggaacggtgcttatatgcagcaggcgatggcccgtaacctggttatcgatttcgcgcaaatctccgacaacatccgctcgacgaactaccagccaggccaggcgggtaaagggtggagcatctcgaaaggcggcggcgcggagttcaacgacgtaacggtccgcggtagggtatttgcaacagacggcgtcttcaccggcaccgtacgtgccaatgatggttactttaacggcaccgtgtacgcgtcgcggatcgagggtgacgttggctcgttcgcaatcaactgttacaaggccacgtacaaccgtgtgccaaaagcaacatggcagtggtgggatcttctgcgtattcgtaagcagggatttgatcaagtagtcgatatcaaaggcgcattacgtcaggcggataagtacggcgaccttcgtgctggtatgtcttatcagtccggcgcggatggcggactcaatccgggctacgtagggtacgcaatacttatgcgcccaggtggcgatacttccggcggtgggccgatgacaacggcgatatctattgacggacaaacattttggtcgtcaaaggaagggtacgcgacgatagaaagtctccgctttattgtaccggctggaactggtgatgcgattgtccgcttcggatgttatctcgaccgtaacggttcaatggaacttcgtactttgatgcgcttcgacgcttttgtcgcgcgcaacagtaacgcgataagcctactttaa

SEQ ID NO: 98466 - DNA, 1080 bp, Enterobacter aerogenes
atgagcattatttcagaaaaaatatcatctaggataaaaacattaaaacaagagtttgctgtaaataaaaatgtaaaacaccagggggtgaaggggggtttgaatgaagaagagttgataaaaataataaaagacgtcattccaagaaagtatgagatttcaagaggtataattgagaactcacgtggagatcaatcaaatgaaagtgatattattatttatgataatgaaatcttaccgccatatataaacaatgatcttgcctttgttcctatcgaagcagttagatataacattgaggttaaatcaactttaacagcgaaagagctagaaacaacaattcaaaaatttagaaaatttcgatcaattggtggaaaatctcctactgttctatttgcattttcaagtaatgccaagaaaagcgaactgagcagatattatgataacgatactaatttcttggcaaatccagccattggcgtactctgcatttctgataagtgttactactacaaacacacagagattaaatatttaaaagaccaccttagcaattctgatatttttaaaagtttcataaacgatgataatatcaaaatatcaaatttcacagatgtcattcaagacactttaaaaaatgatgatattctatctagtttaacgagatctcaatttgctttattattgcaatcttctattcaagccaaaaaaatagtttctgattttgacacaaaaaaaatgacaataaacggaattaattttaatgaaataacttttaaaatacatcaatggattggagttgagtgcaacgataatgatgttgagttatcacttttttctggaatatcaaacacattatctaaagaatcatttggtaattatttacttaacgaaaggaaagcagaatacaaggttttttcgatatgctgtgaggatatgtggggtaatttaagttgtcagaaatttgataaaaacggtctgggtgacgaatttaaaaatttcagtttcagttttgaaagctcagctgaagaaagtaaaataaccttttactttaaacaaaacccaccacaggaagaataa

SEQ ID NO: 98467 - DNA, 141 bp, Enterobacter aerogenes
atgaaaaatccgcgccggggcgcggattttatcgtctacgtgaaagcggtcaaatgcttgatatacctcattggacgccgctcgatctgcatcgtacagtacgaacgggattatctcgtttgcagtgtccaaatgagatag

SEQ ID NO: 98468 - DNA, 468 bp, Enterobacter aerogenes
atgacagtaaacgtagaagcattactgaaaagcatcggtaaaacctatcaagatattttcgacaatggcttgatcccatacaaaactaagccaactggtgattctggggaccccgttcttgaactagatatggtcaaggaaggtgtttatctggcattccatcgttcatcccgaaaactattctgtgtgacgctcacgcttttggacgaggataaaccgtcagtacgattcccaaatgaattgccttcaccgctacagaaagaaatgagtcttagctggatgcatgagcaatttgacgccccagataagtccattccgcccaaaataattggcggtcttcagtttggaatgaaagaacgctatacacttgagggtttccacatccctctatctatgcaggccgcctacaccacaagcaaccaagtagaatcgcttacgtttatgccactcgctgattctacttggtaa

SEQ ID NO: 98469 - DNA, 1683 bp, Enterobacter aerogenes
atgaccagagcactggtgaggcttggagacaagaccacgagcggtggggaggtaatttcagcttcctcgacgattattgaagaccggaatattgctctgaatggcgatatggcatggtgtccaaaggaaacgtgtaatgggccatttcagataaatggtactgcataccacttcacggaagacaaaccctgtgttgccactggcgatcaggtgctttgtaactgcaaaaataatcaggtgctgggcagcacgacactttgggtggaagatagtcccggcgatccttttgaggagcaccgcgagcgggcagcggaatggcccattaccagaatagctgccaccgccgctgtagccgctatccctgtgttcgcaaagtctgccctgcgtggtactggtaataccgatgcaggggtgtcagaagagccacaaagcaacatcggcgaaatgagcttctatcagtcacaacccgctcagccagccccggaacctgaacagcacgctcaggctgcgaagaagaaaacttcaccgccaccagaaccgccaaaggaaaaatccctatttgataaagtgtctggcttcttctttggtgaagcggaagctatgccacttcccccaccgccagtagttatgggcggtaccacggaggccggaatggcagcagcaacgggaggtgcaacgactaaatcgaatcaggatgcagcaagagcccttactcatacgatgaaacgcctttctggccctgaagtctggagcgggcgactggcgatgaatctgccgttcgtggtcatgggtgccatcattcagtcgaatctcaaaggcgagcagagcgacctgctgacacctcagaaactgctggaagtggctcacagtaagggcacagtccctactcgcgtccgatataactggatcaccgacgacgatagcggaaagctgaaagcagttggttatcacaccagttccgatagtggtcgtgatcaggtacgagtcaggttgctggagaagcagagcgatggcagctatgaattctggggagatgaacgaagcgataagccgttaatcacatggacgccagcaaacacaccggggtcgcaaactagctggaatacaggcaataacaacccacaggcaggaaccgtcacgatacctggacttgagcagccggatattcagagcgtaaccatcaccaccacaccgctgccagaggaaaaggacttccgggattacattcttgtgtttccgggcaacatccatccgccgatctacatctacctcagcaagcccccggtagaattccttgaggtcaagctatacagtgattttgatggcagatcgcggcaaggtgagctagaggttgaccatattccctccgctgccgcagtgaaagcgcactataagcggttgcaccctgaactcagccctaaggagctgaaaaagctctctaaaagagtagctgctataggtattcctaaagggatacatcgaaatgatagcgaaacttatgggggccgaaacactcctgaaaagataattgctcacagctatgatctccgtaccgcagcagatcaaaactttgacgctgaaaaaccagcactcaaagagtacggggcttcagatgaacaattagaggaagcaagggcagagctacatcagattaatgaaagcgtggggttatataaaaaatga

SEQ ID NO: 98470 - DNA, 318 bp, Enterobacter aerogenes
atgaaaagaacaatgcttctagtattaatagccgctggtttactggctggttgtggcgagaaaacaccaaaatgcaatagcgatgattctaaaaatctggttgtgaacattgccagaaagacaatcgaaaagggcatgacactggataaggatgtgcgaattacagtagaaaatgtcagaacgataagtcatgaatcagggcttgatatttatcagtttgcggctgatttaacgttcacaaaaactgatctgcaaaactctttaccaatcacataccggattcaaaaactgatgaaggtaaatgtcagttccatatga

SEQ ID NO: 98471 - DNA, 1176 bp, Enterobacter aerogenes
atgatggataaagtaaataattcaaataactatacagggccacattttattctaaatgtagattatctgcagtcgggcgatatcattcttgagaggggatatgaatggtattcagaaaagatttgtgaacagaccggtagtcgatattctcacgcaatgatatgcgttggtggcactatcattgaggcaacacgagcagggggggtgtttagccgaattcctaatcgttcaacagtgcgcgaaataaatgattttttggtgttgaggcttaaagaaacacctgaacctgaagtaatagaaaagatatgcggacatgctcgttatcttgtcggaagccagtactccgtatccgaagcgctatctgtcaaaggaccacagtttttaaagcaattctctgaaaatagtagaaaacagttttgctctcgcttagtagcacagtgctataaagaaggtggcataaatcttgtcgatgatattaatttttgttcgccagcagatattgaaaaaaatgacgacttattgcgtgtagtcgagggggcagtcaatcttgcttcagaagcagaagtccggcatgcgctggaattaactcctcacacggcccacactgctaatactgttaattttattaacagggcaatggatattttcaaaaaccatggtattaaaatggtaggttctccccacggtgaagtagttatcactactctaaatgatattagttgggcattatatcaaaataaagccgtgcctggacttgacgatgagcttactgaagctatgtatgcttctggctatcttgcccacataaatatagatagagagcgcaatctctacaggtatgattacacattgttcaaattacatgttgaatttgcatctggtggagataaaaatgagttatttgaaattcttcggcaggagctaactaatactgttagtgtttttaagcaacggttgcaaagttatattgcggggcgaggaaatcttgaaacagggcttaagtatgcagaggctgactttcaagtgccaaaaggaatgctgcttataattaaggaccgactcactattattgaaaggtattcggcacagtttaagaatacacagggtttcaaggaaattaatgaaatgtccataaaattcattgattacataagagaatatgcccctgaactttaa

SEQ ID NO: 98472 - DNA, 390 bp, Enterobacter aerogenes
atgaaagactgggccgaaatcaccaaaacgcgtcgactggatatgcttgaacgtgaggtttttcccgcaattggtaagcccccagtcagagataatccgctaggttcaatgacatctcactcgctgcgccagctacttaaaagcctcggatggagtggcatttatagcccccatgctaccagaactacaggaagtacgcgtttaaatgaaatgagctatcgacttgatactattgaggcccaacttgcgcacgctgataccaacaacgttcgtcgcacatacaaccatgcaacttatctcgatgagcgtaaactgatgatgcaggaatgggctgatagactggacgaatgggtagacatagacaaaaattttgatattgataaacaatga

SEQ ID NO: 98473 - DNA, 195 bp, Enterobacter aerogenes
atgcttacagacacccagtgccgtactgcaaaaccgaaggaaaaactttatcgcctcaatgacgctgatggcctctatctggaaattaaacccaacggcaaaaaggcatggcgctatcggtttaaactcaacggtaaatccagcatgtttgcgctgggtgagtacccgacggttaaacttgccgaagctcgctag

SEQ ID NO: 98474 - DNA, 324 bp, Enterobacter aerogenes
gtgcaatacgtcggtggtgaagagttcaccggtaaaaagacgattgcccccgctgtgagttttcccggaggcggtgctgcgcacctgtccgggctaccaaacggcaccacctgtagcctcgctaagcgaagcgcgagcgaggagatagcagaacaggtggctgaagagagtgcaacaggagtggggaaggattactcggcgctaaagcgcctcgcccttcgggccgttgcctgcggcagcgttctctcgctgacgctcgagtcgaaccttggtcgaagcttctcatccttccccgtagggcagaatattaagtattgtaggtag

SEQ ID NO: 98475 - DNA, 1041 bp, Enterobacter aerogenes
atgaccttgggtcaatatgaccagctatctctaaaagaggcccgcgaactggtcagcgaataccggaaactggtttctgtaggtaaagatccgattactgttcgtgacatgacggttgaagccaatgtgaaagcagctaccgtggaggattgcattaaagcatggctggcgagcgctgctgcaagccgtcttgttaagcgcgatgaatgggaaagagcgctaaatcgccacgtcgttccgtacgtcggatccatgcttgtggatgaaatggcaatatctcactggcagcctgtattcaaacgcatgcgagacaatggggcggaaacatacgccggcgagatactctccagaatgaagactattttctcttactgcattcgaattgagttgatcaaacgtaacccggtgagtgatttgagagtcattgacgttggtaagccagccaggaaagggaagaggaatctgaacgataaggaaattggtgccttctggcatgcagtagaggcatcaacgataacacaccagaataaattactgctgaagctgctattactgacgggctgtcgcggtgttgaaatgcgtctggccaagaagagggattttgatttggatggcagagtgtggcgcgttcctgatgaacattctaaaaccagggagccatttgaaagggggctttcatctgcggcggtggaactattgaaggaagtgtttgaactctatcctgactttgagcaggtatttccgcctgcgtccaaaaaggaagatcgcccaatggctgccagcgtaatactgaacctggcgatccagttacgtgctgacatgaccattgagcattggtcgatacatgatttgcggcggacggcaaaaacgaagatggcagagctgggtgtcctgccgcatgtttctgagaaagtattaggccataagttgagtggagtcctcgcaatttatgaccagcatagttacctgcgtgaacagcaagaagcactggatcttctcgccgcacatattcagtcatgcgttgactcaaccaacccctga

SEQ ID NO: 98476 - DNA, 243 bp, Enterobacter aerogenes
atgaataatactcaagtcgcagtaaatccggtgattgtaaaccgtgagacagtccagcagatgctgggaggcatatcccgcacaaccttctatcgtaagcgccaacaatggagcgccgccggtaccccgttcccagaaaaagcaccaggtacaaatccaggtcgcggtggtgagcaataccgatattgcgatgtgatgcgtttcatggaggctcaggggttggttgagtcaacgcatgactga

SEQ ID NO: 98477 - DNA, 240 bp, Enterobacter aerogenes
atgttcaggataatccagcctaatacctggtacgccgatcccaacggcaagccctgcaaaatcctccgcactacccacgaagcaatcctctacatctgtaacggccgcacctacatcgccagcatggcccgatttcagcatgaattcgagccactgaccaaagcacaggccgagcggatcgcagaagaaatcgaaacagcagaacacctgaagaagctgcgcgctcagcgtgcggcgtaa

SEQ ID NO: 98478 - DNA, 1137 bp, Enterobacter aerogenes
atgaacgcggcagcttactacaacgagatcgacccattcgcggcgcagtggctgcgtaacctcatagctgccgggcatatcgccccgggcgaagttgacgaacggagtattgaagatgtcacacctgacgacctcagaggatttacccagtgccactttttcgccggaattggcgtctggtcccattccctccgcctcgcaggatggcctgacgataaaccggtctggactggctcctgcccgtgccagcctttcagcgcggcaggcaaaggagatgggtttactgacgagcggcacttatggcctcacttcttccacctcatcagcgagtgcagacctcagcatgtctttggcgaacaggttgcaagcggttacgcaaacacatggttcgaccttgtacaagcagacatggaaggagtgggatacgccttcgggcttgtgccgtttacgtcagcgggcatcggtgcgccgcacattagagagcgggcctactgggtggccaacgccgacagcgtcatcagtgaccggagcgggaacgtctgggcgccagggcgggatgaatattcaaacagcggcgatgatgtccggctggccgactccggtcgcgaatacaaaggatcagccagaaacacagagagggctggagaatcttgccgggctggtgaagatggcgggctgggtaactccaacgtcgcgcgactggaaggactcagcgggaatgacggcgcagagggacgggaaggaaaggctggaccagctgccgcgccaggcgttcatgacgggctggccaactcctcaagtgagcaatatcaccaatgcaactacagtgcagatgagcggagatggtcgagaaactccgaacaaaatcggctgggcagcgagcttatgcggccccttgaggttaacggtttttggcgagatgcggactggctcttatgtcgagatgggaaatggcgtccagttgaacccggcacattcccgctggttgatggggctgccgcgcgcctgggacgagtcgagcccggggtggcaagagtggcaagcagcaaccgtgtcggcagactcaaaggctacggcaacgctataaacgcccaggctgccgctgagttcattcgtgcttatgtggggggcgcatga

SEQ ID NO: 98479 - DNA, 354 bp, Enterobacter aerogenes
gtgaccgacttttacgacttcctcgccctgctgaatgcagagacgcgcatgaacggcggcaaccacactcgcgccaacacggaagacgtgctgattgccacccgcggcgccgggctggaacgcaagcatgccggcattaagcaggtggtctacagcccgctcggcgctcacagcgagaaaccgtgggaagttcgccaccgcctggagttgctatacggcgacgtaacacgaattgagctgttcagtcgcagcgcggcgccaggctggcatcactggggaaaccagtgctgcaccgcttccgttgagctgatccccggatgcgccatcgacgttgtgaaaacggaggcagcatga

SEQ ID NO: 98480 - DNA, 207 bp, Enterobacter aerogenes
atggaacgagatgaacttgcagatgaccgtatggccttcatggctggagaggttgggtgtgtagtattcgagctgatttataatggcattgagatcaacaaagagaacattgtcggatttctggagggaaagcgtaaggctgtaggcaatgtcattcacaaggggttgctgcgcgacgccgcagagatggtgcggaaagggaagtag

SEQ ID NO: 98481 - DNA, 336 bp, Enterobacter aerogenes
atgctttctgtatgtttgcggcatgctgccaataactttgccgaacacaaaaacacgattcatctcgtctttttcgatgggttcccacggtacataggttttgttatccgatatcacaataagcttatccttcatcatttgaaggcgcttaacgtgagctgtctcatcgtagaggaatgcataaatcccatccccatcgaagcgctgaacgctgatatcgacgaaaagaagatctccaggctcgatagtcccgctcatgctatcgccacggacgttaattattctgatttgatcagccttacgtccattaaacatctggcgagcatcagattctga

SEQ ID NO: 98482 - DNA, 1125 bp, Enterobacter aerogenes
atggttgaccaaaaaagcaatgcacaagtttcaaacggtgttaacgacgatatttcagaaatgaaatcactgaccacactgcgtaagcgtgtggtttctgatggcgaggtagtctctaaatcccagaatgcttttcgtctggctggtggcaatacgggtgttatcctgcgtaatgacggtaatgacttttatgctcttgtaactccagaaggtcaggcacaagacggactatggaacactcttcgtccattatcttttaatctcaaaaccggccgagtctctctacgaaatggtgtcgacatttctggtggtgctctggtttctaataacgctggtattgcggctcataccactggtccttccccgctcattgctggacaaatttatgactccccggctgtgcagactgcttttaccagcggtaatgtcacgacgagaatgctggtgggtaacaggacggttgctggcagagaggattacggcatcctttcctaccagggttgggattcgtcatggaatgaaattcaagtaagagcaaacagtgaattatcagcaggccagttcgtcaagcgtaatgcagggggatggttcactgctaagggcgttgtcagtttaaataataacgccgaccacaccacttacgggatgcatattcagggcgctggtgacctgtttgctgacatttatcattacgagcgcattaataagcatcatttcctcggaatgcatgtcgggaatggcggctcgcatggctggtatgaattccgccacgacgggagtgctttcactaatggtgcgtggctcaccagttctgattcccgcatgaaatctgacgtttctcctatttccggtgcgttggataagctttcaacccttggcggttatacctatctcaaacaaggggctccggaagccggggtgatagcacaggaagtggaggctgtgttgccacaggccgttagtcagacagaattacggatgaatgatggttcactgcttgaagatgcgcgcagcgtcaatatcaatggcgtggtggccctgctggttgaagccctaaaagaagagcgacaactgcgaattcaactggagcagagactgactactctggaatacacgaagccgtaa

SEQ ID NO: 98483 - DNA, 2043 bp, Enterobacter aerogenes
atgggtggatttgattacggtggttttggggatggtacgacatggagtcctgagcgtggagatggaccggatccgggtggcggcagtagcggaactggtggcagtgacagcagtggatcatcccctggtaaaacagctgcgcagcgtcagtatgatgccgcgatgcgtgacccggcggtcaagaataaactgcaggcgatgattaaaggggcaaaagcgatttactccggtgcttacctgaacacttacgggttgactgaaacgggagctctttccgtcgtcattacagggattagcaatgtgcaggctgaagcgctgggcatgacgggaccaatgatgaccatgcgtgacctggacggaatattacacacggcaggggttcttgagaccggacatgtgttgggagaaattcctcatgataacggtaccggcgggggcaacgacagtggcactattgccgcagagaataaagtgacgctggaagcatacgtgtctgtgctgcagggcgatatcccggcgggattctggctgaatggaaacagagtcatgacccgaaccaggatcccttacatcatcaatggaggggggaaaggtgacgaccgtatcggataccgtgataaggatgttgaggttccatctctgacggaggcgtaccgtgatggtcagcggattcaggcggaactagcagaggcggcgcgacaggctgaagaagccaggcgggctactgaggaagcccgtaaagcggaagaggcccgacagacggaagaggcgagaaaggccgaggaagcccgccgggcagaagaagctcgcaaagcggaagaagcacgaaaggccctttatgctaaagcgggaattttacccactccaatgtatactgccgaaaaagcagcggcagggagtgctgcactagcgaaggcaggaacaaaggcgcttagccgagctcctggtaccttacagcttacaacgttggccgaaggtgtcatgactgtagctagtgaaatggctggctggatggccggtgtcttctggaggggagctgtagttttgtccgatattgctctcaccagcccgtatggggctgtaatcggtgcacttgctgtcggattcaccccgttgcctgctggcactggcagtagccgtgttcctggacgggatattggtatgctggcagtgcaggcccgattgatggcggctggaaaggttagtattgagccagggatgaccagcgttaacttaccggtacgtagcttcattaccaccgatgatgatggtcatcagtcagtacatatggttaaaactggtgttggcggagtgtctgcagctgttccggtgcttaatgcagttcgggatgaagcgactggtcttgaccgtataacagttccggcagtggcgggcgcaccatctcgtaccatcctgattaacccggttccaagtgggccatcagtaccagccagtaccggtaatacgggaccagtgccaaagactcctgtacatacggggacagatatcaggcaagcagatagcatcgtaacaacgacctatccagctgcggaagagctggcgattcaggactttatctactggcaaccagatgcgctattcacaggcgttgaaccaatatatgttatgttggctagccctcgagacttgcctggcaaagtcactggtaaaggggagcaggttggcgatggttggttagacacagcaggtcaggaactaggctctccaattccaagccagattgctgacaaattacgtggtcgtgagttctcgaactttaattcgttccgcagagctttctggaagactgtttctgataccccagagctaagtgagcagtttgatcaagctagcttaggtagtattaagttaggaaagtcgtccttcgttcgcaaaagtgagcgtgttggagggaggctaaaacatgagttacatcacgtaaaagctattaaagatggtggtgatgtatttgatgttgataacttgcgtgttatgactccaaaaaaacatattgaagtacacaaaagtaatggtggtaaatga

SEQ ID NO: 98484 - DNA, 195 bp, Enterobacter aerogenes
atgaaatcacaatcaccagtgcagcatgacgttcacatcgacggcaaagagtgtgttgtcacgatagtccaaaccggcaagtcaacgtggagggcatggggagattcctgggggcaccatatcgtcgaaataggttctagcgaacagagtgcgctttctcattggaaagccaaagctttagttatgaatgggtag

SEQ ID NO: 98485 - DNA, 519 bp, Enterobacter aerogenes
atgtctggttgggataacggtatagatgcagtttctgcgattgcagctatcgcatctgcggcagcaacttatttagcttggcgatcctcagaagctagcagggccacatccgaaaaagctttgcagatgcaaggaaagcagtatttgtacgagacattaaaagcttgcgctgagagagcgaattcatactcaaaaggaaagaaaggggctgactggagctttcatgacgcagccaatattgttcgatgtttgaacttggcaatggggagcataataaattactcagataccaacaatcaggatgcaatgaagggtctgaagcaattcttcattagccaattaaacatggagctttttgaagagctcaactatgaggttgggcctgatgccttctttcacggagaggagctaaccagcatgacgagcgatatttactcgcagtggttaaacattatttcattctttaacctcatggttgtcacagatgacgacctcgctgatgaatctaagcgagtttga

SEQ ID NO: 98486 - DNA, 690 bp, Enterobacter aerogenes
atgaacagtcagcaactggaatacgtacgtcagcagctcattgtggcgaccgcagatctgagcggtgcgacgaaagggcaactggtggcctttgctgagaacgcaatgtttgaagcgacggcgcgcagcaataagaggatgaaggtagtcgacccggcgaccgggagaatggtcaagccgagtaatcctccggttcccggcaagcagtcccgagccaaaggctcagccatagccctggtgcaacctgttgagtattcgacggcaagttggcgccgagctttgctgtcgctggaagagcatcagaaagcctggctgctctggaactacagcgacaatatccgttgggaacatcaggagacgatcactcggtgggcgtgggagcaattcagcgagaggttggccggcgtgcgtattgcaaagaaaactgtcggtcgccttcgtcaacttatctggctggcggcgcaggatgtcaaagctggactggcggggcgtgagacctacgaatataaggcgctggcatcgctggtgggcgtaacaccaaagaactggtcagagacctttacagaccgctggatggaaatacgccacatcttcctgggcttggatagtgaagcattagtgcaggttacgcgatcacgttcacaacaaaaggcgacaaatttggatgtaagtcttgcaaaactggattga

SEQ ID NO: 98487 - DNA, 330 bp, Enterobacter aerogenes
atggtgaagcttaaagatgtactgcgcaatgtcatctccggagcgaataaacagcttccagaccactcgacaacacaacctacggcgtctactgccctagcaactgagatttacaccaaaatctcttgcataggtcccaaagtgttaggtattggtggagataagcaatctgattttgccaatcaagccgctgaactggtgacaaatgaagaatttcttgacgagcttcaagataaaattggcccccctcaagccaatgagaatgaagacgaatttactcatagagcaaaaaaagaaatgcgtaacctattgaaatcaaaattaaaataa

SEQ ID NO: 98488 - DNA, 210 bp, Enterobacter aerogenes
atgattctatctttctgctcgttgcttagacctgcccatatggaggcaaaaaaactaaaaattctcagaaaaatgtttatcactgcaatacctcgtggctggatggtgggaacattattaataagtatcttacatgccattgctttgaataaacacgacattacttcacagatacagatagcgaataactctaacaagtgtttttcgtag

SEQ ID NO: 98489 - DNA, 513 bp, Enterobacter aerogenes
atgaacattacacctcaggaagcgggttcgttttttctggcgctgattgtaccaatcgtaacaggtgtcgctgccgcgtggtttacagcgcgatttgcgttaaaccggttttaccatgaaaagtggtgggagaaaaaacatgcagcatacaatcaactggttgatgacttaattgagcttaagtcattatacggacaggctcattactatgccgaggaagaatataatgcagggaaaaatgataagccgcggaaaggtcgaactgtagattggaaaagataccaccaattattaaggcaagttcaacgccactatgtactggctcctatctcgctaagtcaaagcacgaaagagctcttgagtcgatttatagaaaaggacgctgacatagaacacaatgttgttgtcgatggatacccagaatttagggcatatagtgacatgtctggtgaggctcaaaaaatcatagatgccattgtcatggatgctgaaaaagaacttaaattcagataa

SEQ ID NO: 98490 - DNA, 174 bp, Enterobacter aerogenes
atgaaatggatatccgtaaaagaacgccatccgcggtcattcgtccgtgtctgggtgatgaccgataccgggcgggagactaccggatacgtgaaatcggacggcgagtggttcatcaactgcctgcgcatccgggcgaccggcgcgaaggtgctgcgctggaaggagggatga

SEQ ID NO: 98491 - DNA, 441 bp, Enterobacter aerogenes
atgggcatcaaagtgaagggcatcagccaggcgaaaaagcacctgaacgatgtcatcaacgacgtgaaggggcgaaaggtaatccgcgcgctgcagtcggcgatgattctcatcggtgcgcgggcggcctattacaccccgatcgacacctccacgctgattaacagccaatttcgggagatcgacgctggcggagtattcattaccgggcgcatcggctactcagcgaactatgccgcgtatgttcatgaggcgtcaggtaagctgaaaggtcagccgcgcgcgcactttggtacgacccgttccggtcagcagttcggcggagggacaggaacgggcaactactgggaccctcacggtgagcctcaattcctgaccaaaggcgcgaatgatgagcgcgataacgtagacgcggtgatgcgcaaggagctttcgctatga

SEQ ID NO: 98492 - DNA, 354 bp, Enterobacter aerogenes
atgaaaaaactaattttacttatttttattggttccgttcttagtggatgtgtgtatagaagtactgcccacagtggtcgtgatttcgatgaaactaaagcaacacaaatagtaccaggaaaaaccactgaagctgatcttattaagaacattggcgagccgatgaagaaagaaatcgtaggtgaccatgaggttaaatggatttatgagtatgtaacttcaaatgcagctgtccgcgtcttctcagctaagccaaaggttgacgtcactaagaagactttagaagttcttatcagggatggtgtcgttgttaattccgcattgtccaatcccggaactactcaataccgataa

SEQ ID NO: 98493 - DNA, 3108 bp, Enterobacter aerogenes
atggcaggtgagaaagatgcaggtagcatcgtctatacagtaagcgctgatatagcccctttacttcaggctggacggcaagccattgagtcgcttgatggaatgggtgatggcgcagggaaagctgctgataatttttccggtcttgagagagctactgataaatctgggaaatcgattgctaggaccgcggatgacgcgagcaatgcagcaaaaatcatggaacggcttggtaatgaaatagctgttcttgaagaagcaaataaaaacggagcccgcagcgcagctgccctggcagctcagattgcagcatcaggagatgcgtcagaggcgcaaagcagggagatcggtaaccttgccgtcaagctttttgacgtaaaacaggccgcgattgatgcagccaaggcgaatagtgatagtgccgctgcttacagagcatcagaatctgcgatctcatcacttgagagcgaattatccgtcctaaatgcggagatgattgagggttctcgcagtgccgctattctgtctgcacaaatgaaggctgggaatggcgcaacggaggagcaaaaggcgcgcatatcgcaactggctggccagttatatgacctaaagtctgctcaaaatgcctcagcaaaagcatcatctgaagcagctaagcaggctgctcaacaagccaacgacgcggcaaggttgcgtacaatttcactgggtctcacgcagcagattgcggttctcaatgaagagcaaaagaatggcgctagaagtgcagcaatgctatctgccaggctccaagctggctctacggcaacggcggctcaaagaaaagaaataggcgagcttgccgggaaattatacgacctcaagcaagcgcaaaatcagataacaaaatcttcgtccggattaaaaacaggactttcagccatagcttccgcaatagcggtttctcaggtggttgattatggtaagcgcttccttgaagcagctgacgccatgtctcaattacaggccaggatcgagaggttaacaggcagcgccgcgagcgccacccagacgatgcagggtttgatgcgcatcagttcggcaactggcggttcgctacaggagactgctaagttgtgggaaactctcagcacggcgttgcgagataccggagcgactaacggccagataatccaactcacagaaacacttcagaaaataggacgtataggcggatcctcttccgaagaaatggcgaatgcactccgccaattcggccagtctatctcctccggcactgtccgtgctgaagaatttaactccatccttgagcaaatgcctgaactggcacgccagattgccgccgggatgggggtaagcataggagaactgcgccagttgatgctggacgggaaactgacagcagaagatgcactaaacgctatccagaaacaaaccagttcggtgaatgctgaattcgagaagctccctcgaactcttgctcaggcaaacactgcactgacaaactcattcttatccatgattgactctgttaaccaggcgacaggtgcaagctctggtatggtggctgttattgattcattgacggctgcgctcgacaggctggcaggaaaggcaatttctgcagatgctcagatctctgatctgaatagcactgcagagatgttcacgcgcagggcccgcacttggtcatggctggggctagacggctgggaggcgcaaaacaaagcgcttgccggtcttagcaataaggccgccatgttggtcggtgatctggctgctgtttccaaggcatctcagaccgcggccaacacaaaaccaatcgagattaaggccactgggactactaccggtagcaagggtaagggcggcaagtcagcagctcagaaggaggcggagcaatacgcaaaagcgcaggaatcaattaaccaaaaactggacgaactgaagcaaaaggccgaattgtcagcaagtagtgtcggtgagctttcgcgcgctcaggccattcttaatgctcagcaatcactcggtaacaccgcaacccaagatcagctcatgctggcagggcagtacgcggcaaaagcatgggataacgcaaatgcattgcgagcgcaggccaaggcagaaaaggaaagaactgacgctgccaataagttcagtacaatccggggtaaaaccagcaaaacggcggggctggacagccagtatcagaaagatatcgcagatattgaccagtatgccaagctttacccgcagaagataggagaggctgaggctgcgcgcgctgcaatcgagcagcaataccgtgagcagcgtaacgcggcaatgtgggaagagtgggcgaaacagaacgcagctacgcaagcaacggcagctgtattcgactccctagcaggtaatgcctctaatgctttgaccggaattataactcaaagtatgagtgccgaagatgcgctgagatctatcggtagcaatgcgcttaatagcctcattaactcatttgtgcaaatgggtgttgaatgggctaaatcagcaattatgggggcgacggtgcagaatgctgctatcgcaaccacgacggccgcacaggttagctcactagccaccactactgcagctagcgcatcatcagctgcggccacaacggcagcatggacgccagcggcgcttgtggcgtcgattggttctttcggcggcgcggttgctattggtctcggcgccctggtggctgcgctggctgtaggctcatcgttggccggcaaacgtaagaacggtggtccggtatcgtcgggctcaatgtaccaggtgggtgagggcggcatgcctgaaatctaccgagccagtaatggcagtcagtacatgatcccgggtgataacggttctgtcatcagcaataaggatttgcagggtagtggcggcggtgcgctgcaggtcgtgaacaacgtttacaactatgctaatggcgtcaatgtcgatacccgcagcagccagaacggcgggcaactggttatcgaaacctttatcaccgatatgcagaacggaggcccgatgtcctctcagatgcaggacacattcggccttcgccggcaggccaatggtgattactaa

SEQ ID NO: 98494 - DNA, 2328 bp, Enterobacter aerogenes
atggcaaaattaccaactccaacccataagccggtaccgagtgatgatatccgggaccatgtttatgctggtggcatgctggataaggtagtaaccagccaggaaatgaaatataccgatcgatttggtggagagcactacactattgaaggcttgcgctggcttgctcagcaggcaatagctgcattcggttatataactctcgattcatttcaggatggcgctacgttaacgctccctaatcatgttctgcgttttaagttaccagacggcgatggggaatattatcgttgggacggctctttccctaaggtggtgccggcgaactccactccggaatcttccggtggaattggccctggggcatggatcggagttggtgatgcctcacttcgcgcaaacctgggttcaaacgaaaaggggcttggcctgtcgatggttgctcttgaacagggaggaaatgcacagcaggcgatccagtacatcacgcctcagatgtttggcgctaagggaaattatgaccctgccaccgatactggtaacgatgacacgatagcattctgcgcggcaatttccgcagctgtagctcttggtaagcgaaaagttatggtgccatctggttataactatctgattactgatagcctgaatcttggaggtcagggatatattggcgctgatggcgttgctctgatcggtgaaaactggataaatacaaatttgtatttcagggcgccaacaaatgatactgcttgtattgagattcttggaggctctggaattcatacgggtagatatatcagcggcctgacaattcaacctacttcagcgacaagatatactggtgtaggattaagaattgcaggtggttgttttataaaaaatggcctgtgccttatcaggcagtttgcagtaaatattcatcttcttaataatcttcaggccggggtgtttaccgagcagaatgtattcagagatatgcgaatccatcggggactgataaatgtactgatggaaactaacggtggagataactcatttcacgcaaatgatttttctatgtgtcagatgcaagtgaaaactacagttgatagtggtgacgggaacactacagccggtgtcggtattgaattgcgtggagttacagcccctgcttactggtatgatagcttttttaatgttcatatgtttggcggtgcaggtgctatagctataaagctgacaaatgccaatactgatgccctggttggtaacatcactgcagaaggtagcttaattttaaaaagcactgatgctatatctgcattcgaaatgaaaggtgggttttatagcattggttcagtcattatggatgtcgcttctgaaccaacagccaggctttcaacatttatttttgagaaccggcaaagtaatactgctaacttttcttctccacgattaacagggttatctcctcgccagttacctctttatgccgctgacaggacagataatggatgtgctccgtttgtttttcgtctcgtagggccgaacagtgacggacttggatacggtacttctggtgcacctggtagcgatcacactttcggctacgtgcccgttggtgggaatcttcagtcgtttgttcctgggttgaaactatcaggtgatggcagttctttttccagctattcgcctactttgtatatctcaaacgcaacggttggcgttcaactggcccctgggttctttggcccccgtgtcgataatgccattgattttggcgctgccgggtatcgccctaaacaatactggggtgttaacagcagcatcaacacctcagatgccaggcacaaaacggatcccagagaacctgttgaggcagagattgaagctttctatgaaattggccagttgccatgggtatggcagtggctaattaagtatcagtctgaaggtgatggggcaaggcttcactctgggccgacagttcaggctgcaatcgcaatcatggaaaaatacagcttagactggcgcaattactcggccttttgctttgataagcaggatgcccaggaagaagaaattgaaacgtgggatgactattacgtaacagtaaagggaacccgtgccctctatgatgaaattggtaactgcgttcaggaagcagtaccagaacatcaggagttggttctttccgctggcagtcgggttatcaaagaagcccgggaggcctttgaagtgtactcgttcagaaaggaggaacttttgttatggattctcagggcaacaattgaaaagcagaaaaatattgaaacaaggttatcggctctggaatcaatgcgataa

SEQ ID NO: 98495 - DNA, 672 bp, Enterobacter aerogenes
atgtgcggacgattttcccagtcaatgacccgtgaagattatctttcctgtcttgccgatgaagccgaccgtgacatcgcatatgacccggaaccgattggtcgatacaacgtcgcgccaggcaccaaggttttgctactgagcgaacgcgacgaacaattgcatattgatccggtcttctggggttatgcgcctggatggtgggataaaccgccactgattaatgcacgcgtcgaaacggcggccaccagcagaatgtttaaacctctctggcagcatggccgggcgatctgctttgctgatggttggttcgaatggaagatggaaggagacaagaagcagccctactttatccatcgtgccgatggccagccgatattcatggcagcaatcggaagcacaccatttgaacgtggagatgaagcagaaggctttctgattgtcactgcagcagcagataaagggctggtagatattcacgaccgccgaccactggtactgtcaccagaagcggccagggaatggatgagacaggatataggagggaaagaggctgaggagatatccgtcgacggcgccgtgccagccgacaagtttatctggcacgcagtgacgcgcgccgtaggaaatgtgaagaatcagggcgccgaactaatcgaccccatcacctga

SEQ ID NO: 98496 - DNA, 903 bp, Enterobacter aerogenes
gtgcacgccaacatgattgaatacctaaatattttcatccaggttgttgagcagggtagtttctccaaagccgctgacgtgcttcaaatccatcgccccaccgtgagcaaagcgatacagcaaattgagcatgatctgggtgtaaaactgattaatcgcacaacccgcaaacttagcattactgctgaaggagatgagttttatcatcatgccaggcatgtgctggccgaagtgaatgacatgatggctagtttttcaccgacccttccccctcgggggcggctcagacttgatgtcccgctggcgctggctcacgccatactgatccctaatctcaaacatttccagtctctatatcctgatattgacgtcgttctggtttcatcggacaaaaaaaccgatttgatcgctgaaggtgtggactgtcttgtccgcctgggcgagcttcaggattcgagttttatctccagacgtcttggtgacatcagaatggtcacctgtgcagctccatcatacctgcaacaacatggacgaccggaaacacttgcggatctggagcagcatcgggcaataaattttttcagcgatcacagtcgtgatgtaatggaatggaaatttattagggacggaaagatcgtttcgttgcgtcccgtgggcagcatgctggttgataattcagatattctgctctcctgtggtctggcgggcctcggcataatccagggcacctttaacgcccttgccccacatattgcttccggcgctcttgaagagattctgacgcaatacccttctgtgtctaagcccgtgtcggtgatgtatccggacaggcgctacctttctcccaaagtacgggtctttatcgactggttcagtgaagttctgaccatgcagaaccgctga

SEQ ID NO: 98497 - DNA, 993 bp, Enterobacter aerogenes
atgtctaaagttgttacctttaaccgcaccggtggtccggaagttttggaagttgtcgatgtggaggtgcccgcaccagcagcgggtgaagttaagattcgcgtacatgctattggtcttaaccgtgcagaaatcatgtaccgcaacggccaatatgttattgtgccgcaatttccggcacgtcttggttatgaagcggctggcgttgtgcaggccgtaggtgagaatgttgaggcgtttaccactggagatctggtcagcgtaatcccttcatttatgtttaatgaatacggtatgtacggcgaagtggtcaatgcacctgtgcacgctgttgtgaagcatcctgaaaatctttcctttgaggaagccgctgcaagctggatgatgtatgtcactgcatatggcgcgctggttgaatatggcaaccttcaggctgggcagaatgttgtgatccgcgcggcatcaagcagcgtaggactggctgccatacagatagccaacatgctgggcgctaaagccattgcgcttacccggactgccgaaaaaagagacatgcttcttaaagcgggtgccgccactgctatagctaccgctgagcaggatatggttggggaaatcaatcatgcgacagatggcatgggcgcccatattgtttttgatcctgtcggtggtccggacgtggcaaaactgacccaggtgatggcaccgcaaggtatgttcttccagtatggggcgctcgacagccgcgacatgcttgtgcctgtctttgatattctcggtaagcatctcacgctccgtggatacgggctgtttgaaatcacgacggaccctgaaaaaatggcacgcgcaaaatccttcgtcaccgaagggttacgttccggcaaactgaaacctgtcattgataaaacattcccgcttcaggatattgcggatgcacagcgctatatggaagcaaatggacaagttggcaaaatcgtcgtgaccgttgagtaa

SEQ ID NO: 98498 - DNA, 432 bp, Enterobacter aerogenes
atgcataaaacgaccatcctcgccgctgcagcactgctggcggtttcttccaccattcgcgccgaggatcataccaacgcctatgccgtctcttcgaccattaccagtatcggcagttcagtgctggtgagcggtatcattctctccccggtcttgcttcccgccgcgctgatcgccgcttctgtcgacaaaaataaagagcagaaaaccgcgctgttgaccaccaaagatcctaagcagaacaccgtcaaaatggtgctgccgctgcaggtggtcgaagaggcggagcttaaagccggggacaagctgacgctggagaaagccccggaaggcactggcgcattgctgaaaaaagaagataaagtcctggcccatatggtgaatcaagaggacgcctcgctctccgctaaccaaccgttgtcggcgaaatga

SEQ ID NO: 98499 - DNA, 831 bp, Enterobacter aerogenes
atgaagcgcctggcgctcgccttgtgcctgagcgtgacatcagtaagcgcaacggccgccagcaccgattgcggcacggggtcgccatcggcggaaaccattgccgcaaccatgcatcaggcacagttgctcaaacaacaattaaatagtgagccggaagcggtggttattttagtccgccagggtcaggatatgtccagccgcgggttaacctggtcccatgccggctacgccctgcgacaggccgataacagctggcgggtttatcataatctgaatacctgcggcaccgcgcggtcagcgctgtacgtacagggattatatgagtttctcgccgatgaactggttaaccagcagatagcggttttacgcccgcgcggcgaacttaacgccgccttacaagcgcttttgcgcagtcctgtcaaactgaacctgttccacagcccgcgctataacctgatcgcctggcccttctccgggccgtatcagaactctaacggctggctgctggaagtctttgcccgagcgggcgatagcaatatctggtcacgtgaacaggccagacattggctcttacagcagggttatcaaccctcgttagttaaggtcacgcttttcgaacgccttggggcaaaaatggttgccaacaatgtttttaccgacgatcagccggaacaactattggcaaatggcaaagtaggtttaaacagcggcgatagcgttattcagtttattgcccgttacagccgcaaaatatcctcctgccagcatctgaatctgcccgaatccgtatgcgtttttcagccaacaccactggaagtcagtccctaa

SEQ ID NO: 98500 - DNA, 342 bp, Enterobacter aerogenes
atgaaaaaatggaaccagcctctggtgtggggaatgatagtcgctttcatctgctcgctaggcgcaagttttatggcgttaatcggcgtatttataggcaactcgcttaattttgtctggtgcgcagtactgctatgggtgctctatttttatgcactttatcggttcttcacccgtcctcctgaagacccttttatccaaaactttgtcttaattttagggatccttacggtgttattttggggagtgggatttatgttgatatgtgcctattatgccagtaagacaaaagctaaaaaccaacttatgtcatcacgcacaaatgcgtctaatagtgactaa

SEQ ID NO: 98501 - DNA, 333 bp, Enterobacter aerogenes
atgaaaaaatggaaccagcccctaatctggggattgattatttcaattattagtccacttggcgtcagctattacggtttggttttcctgtatatagctggcacatatgctgtgattttatatgcgatgtttctatggttgctctggctctatgcgatttacctgctctttacccgcccacatgatagccgctttgtacaaatatatatgctaattatgggcgtccttatgctgccctgggggttggtgctgcttatcacctgtatcatgaatgagataaaggcaaataaacaacgtacttcatcgtcgacaagcgagacaaaagacggctaa

SEQ ID NO: 98502 - DNA, 930 bp, Enterobacter aerogenes
atgacaacgttatcaaagcaaccgacggtacttcttttcgccggtcagggaaaccctacggtaggaatgggggcagatttatgggatctaaacgcaaccacccggcgaatctgggactgcgccagcgatgtaacagggctggatcttcggcggttatgtcagaaagggccgatgaatcgtctggtgaaaacgacgacgcaacaggcagcggtgacggctatcaatgtcacgctctatagtctgtatgctgagcaattctctgacgctaacattattggctcgtgtgggcatagcgtgggtgaatatagcgcgctttatgcagccggcgctttaacgctggagaatgtgttcaagttaatcctggcgcgctcaactatcatggataatttaagcaaaattcgtaaaggtacaatgctggccgtgagaggcgccgattttaaaacggtaagccagttaattaacgactccgggagtccggttgtcgtgagttgtgataacagcctctatcagcaggtggttggcggtacgctgccagatttaagtgaattcaccggggtactgatgggagcaggcctggagacggtaaagttgagcgtaagcggagcctggcatacgcctctgatggctgagggagttcaacccatgcgggaggcgctgaagatggtggaaattgtacggccaaattatcctgtactgatgaatgtcaccggacgggaagaatctaacccgcagcaaattagagagaacctttctttgcatttgacccaccgggtacagtggactgcctctatgactgcctttctacaacatatccccctcgtcaggttcgttgaaatcagtaataaagcttatcttggacaattgctaaatgacttcgacgacttctctgcagagaattttattcattgtcgaaaaatgttgttggcgtaa

SEQ ID NO: 98503 - DNA, 1101 bp, Enterobacter aerogenes
atgaaaggtgtcgggctattcgaagaagacgatagtcgctctaaaagcttaatcgataggttaaagctgaacgcaacgttatccgaaagcgtcagtctggaaggcggaaagcttagaccggatcccggcgcttttcatttgaggtcgcctgccgcattgctgacaacttattatgccggatttaaacctacccgaatttacgacccggcgtttaactcctcctatcatgagccgttttggggagggcgagtttcagctgagtttcgtgattatgcattctcgcttaccatcatgcccaaattagtgagtattgataaatattatgagtcatccagtaactggacggccaatcaacggggcaacagtagtgagtattatttattaacttacaccgattatcgtcttgttaatcatcgactggcagcagatatgatgcttggcgattctccttcattggctctggcagatagctacaatctaactccgcagtttgttgtcaacgtcgaggcggctttacacaaaacgcaacaatggcgtcatttttcccgtgaaaaacgagatgagatattatctgggaaatatccttcatcgctttatacacagaatgataaaacaaactatgaattagccgttggcggccagtataccactgacctttttagcgtattgggtatcgaatactattatcagagtgaagggtactcgaaatcggcatggcgggagcaaactgattttattaggctgttaagtaagaaaaccggtattaccggattagataaagtatttgatgattataagtatctaatggggtcagaaataagtaatacaggaaacaaaggaatgttacaagggcgacattatattaattcatggttaagtttacagaatgaagatcattcaacccttcaaccctatctggtgatgaacgtagtcgatggtagttccttaattggaacccattacattaagccgctaaaagggttgggcgaaagggtagaaatttatacggggttttatagcgcattaggtcgtcgtgattcagagttcgccctttttggcgagaccctcggagtctatgtcggatttaaatactatttataa

SEQ ID NO: 98504 - DNA, 651 bp, Enterobacter aerogenes
atgattcagcgaagcaatctttgtagagttttgcttctgtgtttaaccgcggttacattttcagcattcgctgaatcggtagccacacctgtggccaatcgtgtgttacaggatgggtttccacatgagccagcgtcattagcatcgatcactacacatttgtttaaagaatatgaacgcactaataacgttggtgtgctgattttttattcatgggggatgctacggcaagccgctcattatcagaatgttaatgattttattcacgcttctgaatatgcaaagacgggatttttctatctggatgagtcggtcgatacccatgaagataatttgctgatcagatacttacgtgcgcgtgttgatgcgtggcttccggctaatttggggcgctgcgtgattacgattgaagataccgactcgctgatgaggaataaagataaattcagcgccgagattgttagaaagataaacgagatgcgtttacgagcgctccaccagtgccataacaaacaacaagaagaacaactccttcagcagctgagaagcgtgggccaaaaccttaaaatcgattatgaaaataacaatccacccccttgggaaatggctgaagttttgcaggttattgttccggttattaaaggtgattaa

SEQ ID NO: 98505 - DNA, 369 bp, Enterobacter aerogenes
atgcgtattggtacagatattgttgaagtggaaagaatagaaaaagccattgctaatgataagtcaggatttcttcatcgagtatttacggataatgaaataaaagatattggtattactaccattaattacgaacgagtatcaggcttttgggctgctaaggagtcgctggtaaaagctattgggtatggatttagtcacggaattcgtttccatgacatcgaggttgtccatgacgaaaatggaaaacctgagtttctattgtcagggagggtaaagtacatacttaacgaacaaaagattatgaatatatcattaagtatttctcactgccggacatatgcgatagccgcaaccataatctattaa

SEQ ID NO: 98506 - DNA, 1647 bp, Enterobacter aerogenes
atggatattcgatacacctttatcattgcttctctttttttagccacgctacccgtgaccgccgctgatgttcagttagggcgacttataaaagaacagcaaagtaacgataatgcgtccttacaagacagaaaaatagagcagaaagatgtgtattctgatgccacgacaaagaagcacactgatagcacattcccgcaagaaacaccttgttttcagatcaatgaattgattcttaataatgactttttagataacaatgggttaaaggaaataaaaaataaggtgattggtaaatgcctgggaatgaatgggctcaaaaaggctgctgtgttgttccaggattattatataaatgccgggtatataactacgagagttgaaattccctcacaggatttgtcaacgaaaaaattaaatctgacggtagttccaggaagaatttccgagattgttgtggctgataatgatgtaagcaggtggattttaccgttttcagatggcgatatactaaacatcagagatttagaacaagggctggaaaatatccagaggacccctgaagtagatgtcaagataaacatcctaccaggcgctgaaaatggtacaagcaaagtgctaataaatccccagcgtaaaaaaaagtggagcttaagggcttcttataataatttcggggataagagtactggtagtgaacttataggtgggacaagttatttatataatgttacaggcttgagtgaccttttttatctggcaggaacaggtagccacactggtggttataagaacgtgagtacttattatagtgtgccattcggatattctgaattcagtctttattatagtaaaagtaaatcccatcaaggtatagatatcggtgcatatacttttgattatgttggagagacggaatacttcagtctcaagggcaatagaatgctataccgcaatgtgaactcaaaattgtctaccagtgctgaactgatcagacgtaaatatgactacacattgggcgggacagaactggtactgcaaaaacgtgatatgggtaatgtacggttaggtttaaattataagagaaactttaccggagctgcgctggactcaacgctgagctggcagcggtttaccaaagcttttggcggtaccgacacgcctgatatgcgcactggcactgttagtaagaaaagtcagattgtgaaccttaatgtgaattacgtgaaatggttaacaatgctgccaactaacgcctattatgaacttaattttggcgcccaatactcaccagataatttgacgttacaagatcaattcacgataggcgatcgttggagtgtacgtggctttcaaaacagtgatggtatctatggcaataaaggcttctttttacaaaacacgctaaatgttgttacaggatataaaggtctcataccttatatcggcgctgattacggtcaaataattggtgagttaccttcacaaaatcttagcggcaagaaattaatgggtggtattttaggtgtcaaagggagtgtcagagctttggagtatgatggttcgatatcagtaccctttatctatcccaatgatttggatgtcgataaatataaaattaatttcaatcttgcgtatcagatttaa

SEQ ID NO: 98507 - DNA, 204 bp, Enterobacter aerogenes
atgaagctgaccgacaaaatccgccgtgactggcactactacgcgttcgcgctggggttaatttttattttgaatggcgtggtggggctgttggggtttgacgcgcagggctggcaatcttatgccgtcggtctggcgacgtgggtcgtgagcttttggctggcgggatttgttattcgccgccgtccggtgggagaggcgtaa

SEQ ID NO: 98508 - DNA, 1074 bp, Enterobacter aerogenes
atgggaatggcctatgcgcacgatccacagggtgttgatgtgaattcagcggacgaaaaaaagagtttgccaccgttctggctggataaagagggcaaagaccagacggccatgttcaatttctaccgcttttgtgagctagtggagaaattcagcggcagaaagctaggtgcagcggggaagctgagccaggatgctgttcggttccgtcccgacccacatctcggctttccgaccagtgaactgaaaaaaacggagaccgatccggctcatcctgatgacccgccaacggtcagaacaacattccatgggctatatggcgtggattcgccgcttccgacggcctatgttgatgatatcaatcaggggcgagagggggctgatgcgatggctgcatttctggatatcttcaatcaccggatgatgacgcagttataccgtattcagcggaagtacaattatccggcatcgtatgaagaagggggtacggataaattctcacgtagcctcatggcgctggccggtataacacaaacggatgatttacccgcttctcgattgctggctatccttgggccgatgatgcataccacgttgaccacggaaggggtggccgctgtgatacgcagtcaggctctcagtacacgggtagaagtctttccacatcacccggttaccatgtcagttgatgagcgcacacgcctgacgctgaagaatcctatggcgctgagcgagcgcctcgttatggaggatgaagtggaaacccttaactactgcatgcgcattgaaatgtacaccgaggatgccaaagaggccaaaggctggtggccgcaaggacaactgcgcaaggatgtgtttgcgctgctgaaagcatatctggggtgtgactacgatgcagacatatatttgaccgttcccactcgcattttacctcgtccagggctggggaaagcggggctttttatcgggtacaacatcatgtcaggtctcagagatgataacgaagacgagatgccgcagacgttgcgcacgaaggtggggaaactgcgaggaaaaggtttcgaggaagactaa

SEQ ID NO: 98509 - DNA, 1785 bp, Enterobacter aerogenes
atgaatgaccatgattttctgaaatattttgacggcgaaatgcgctggctgagggcggcggcgcgtgagtttgctgaacaacacccggagaccggtcggcggctgggcatcgaccgacagtctcataaagctgatgagtctgtcgaacggctgtttcagggctttgcgctgatgatggcgcggttgcgtcgccagattgatgacgataccccggagctgacagagccgctgctggggcatctgctgccgatagccaaccggacacagccctcgatggccgtagtcgagctgtccccggaaatggttgcgcaggtcagggatgtggttatccccgcaggcacaacattgctgacccggccaatggatgataccggcctgcgctgcccataccgcacgaccgacgaactggtactgcacccgttgacgctgcatcacgtcagacagcagttgcatccggatggtcaccaggtgctggcgctgaagttttcatttggtaagtacgccgatccatcgcagacggatttgagccagatctcgctctacattcacggcgatcgccccttacagtcgatgctgtatctggcgctgacgcatcatgtctcgcatatcacggtgcgcttgccgcaaacaggcaatctcgatccgcagccgtttcacggcaaactgtcgtcgcgctggcagcaaaactggtcctcagtctggccggagagtgaaagcccggcgctgtgcggtgaggttcgcccattactggaatacttcagcttcccggcccggtttgcgttctttaccctgacgggccttgaaacgctgccgctcggggaagactgtcagtattttgagctggaacttcatctgagcaagccactgaaccgggatatttccgtgccggaggatactctgcgtatccactgtgtaccgctcatcaatttgttttcgctcaacgctgaacccctgaaggtggaacccgcaaaactggattaccggcttcgtccacaccggctgcgcgatcatcacactgaaatttacagtgtggataagatggccgcgagtgaaaccttggacaagcgacagtacgtgccgtttcggcagttctggcacaagggcgggatgttgctgcgtaaagatagctggcctgaacgttacttccacacccgtatctggcggggtgttaccggaatgcatgaaacattgttgatgctgggagggacggcgggtgaacaggatctgcaggaagaaaatgcgacgctgtttttgaacatcacctgtaccaacggcaactacccacgtatggcgctggataatgccgtgtttgatggtatgacgaccgccggcaaccagtcgctatgctgccaaaccaggcaggctccctctatgccatgctatccaccattgtccgagttatatcagtggcatgcgatggctttgctgcatccacgtgctctaagccggatgatcgatagcgccaaaaatcttcgcgcggtgttgcagctgttcaactggacagaggataaggataaccttcgccgtatcaatggggtaagtcacgtcagctataaacaggcatacagttcggcggaagagtggcacggcgtacatattactattgaactggatgaaacgcagttcagtggcattggggacgcgagattgttctgcgagttgctagagcaattttttacgcagtacgccagcattgcccgttttactcaattgacggtcactctggctgagtcagggacgaaatgggaatggcctatgcgcacgatccacagggtgttgatgtga

SEQ ID NO: 98510 - DNA, 402 bp, Enterobacter aerogenes
atgtcagatatcactaagacccaccaaataatgcacattcatctatcgagctggcgctactttgctgccctgacgctgccacctttggtgttgctctttaacctgttgttttcactcgattgcgtgttgctgatgggactctttttgctgacccattattactgttggcgtatatggctggatgaacgactttttcagctcattgagagtgaaagcgatctcgctgaatttgataacggtatggcgcatttgtgggccaaaaagacgggtaacactcgtacgctggctgaacgttggcgtggggcgagaaaccttttttaccgggccatgttctcgctaatggcgctgtgggtcgcctcactgtgcacagtcctttaccagtcttttacgttggtggattaa

SEQ ID NO: 98511 - DNA, 1335 bp, Enterobacter aerogenes
atggctgagtccgcgcttatacagaacaacgccagcctctggaaacgggggctgtgctggctggtgttgttgggaccgctgtttttcttcagctatggacaggtgaatcagttcacggctacacgtcctgatgtgggaagcatggtcctcgggtgggaacatgttatcccgtttatgccctggaccatcgtaccttactggagtattgacctactgtatggcatttcgctgtttatctgtacttcaaagcaggagctgacccgtcacggttgtcggctgcttgccgcatcacttattgcctgcgtcggctttctcctgtttccgctgaaattcactttcatgcgcccagaaacgcaggggatgtttggctggctgtttcaacagctcgaacagtttgatttgccttataaccaggctccgtcgctgcatatcatcctgacatggctgttgtggctgcgttttcgtcagcatctggggaagggtgcaaagctgctttccagtgcgtggtttttgctgatagcggtatctgtgcttaccacctggcagcaccatttcatcgatgtcgttagcgggtttgtggtcggcgtggtgattagctatgccattccggttgaaggccactggcggtggaagcgcccatcagcgcacgccgtacggctcgcagcgaaatatggtgctggtggaatagtgtttttgttggcgggtttgtggatcccccacggcttcattttgctgtggcttgcagcggcattattgatggtggcggcgggctataccgggctcggggtgtcggtgtttcagaaaaataatcacggcgatttatccctttctgcccgctggatgttgttcccctatttagccgggacatggctttcaaaacaatggttttcccgacggatatctctgagcaacgttgtttatgacggcgtggcattgggtcgctttccggatagaaccatgacgcaggccgccgttttcgatctgacggctgaatttcataagggccgccgcaaagcagatcactgggaggcttacccgctgatggatttggtggtgccgggcgtccgggacatccaccaggccgtgatgaagctcagtcaactgcagcaagaacataaaagtgtgctggtatgctgtgccttaggcttatcccgcagtgcaacggttgttgcggcctggctgctaagtgaagggctcgccgggtcggtcacgcaggccgtggcgttaatcaaatcccggcggcctcaggtggtgcttacgcccgcccatcttcaggttctggaaacgttcagcaaggagctgcaatgtcagatatcactaagacccaccaaataa

SEQ ID NO: 98512 - DNA, 1764 bp, Enterobacter aerogenes
atgagtcaggaagcgcgtttatttcaggaaagtacattcgcaaccagcgatggagagtcgctctattttcgccactggcctgcaacggaaggcaacggtaagaaagtgatcgtgctgtttcaccgcgggcatgaacattccgggcgtctgcagcacattgtcgatgagctggatatgcccgatacgcatttttacgcctgggatgctcgcggtcacggtcaatcgccgggcgatcgtggttacagcccgagcctggctcgctctgttctggacgtggatgagtttgtgcgttttgtggcgaaggacgcgcaggtcagccttgaggatatcgtagtgattgcgcagagcgtgggggcggtactggtctctacctgggttcacgactatgcgccgaaaattcgggggatggtgctggcttctccggcctttaaggtcaaactgtatgtgccgttcgcccgaacgggccttgggttgatgcagcggatccgtggcctgttctacgtcaactcctacgtgaaagggaaattccttacccacgatccggagcgtgttgccagttttgaacaggataaactcatcacacgggcaatcgcggtgaacattcttctcgatctctacaaaacggctgagcgcattgtgtccgactctgccgccattacgctgccgacccaattacttatctctggcgatgattttgtcgtgcatgcgaagccgcaaaaacaattctacgccggtctgcgaagttctatcaaagagcagcatattttacccggtttctatcacgatacgctgggtgaaaaagacagggctatggccttcgataaaatgaaaacctttatcgacaaactctatgcggtaaaaccttacactttcgattacagccatgaagaccagtggagcccgagtgccgacgcgtaccgcgaactgcaggcaccgccaaaagcactttcgctggaggggatgttctattcctcaatgagctatggcatgaaaacaatcggcagactgtcaaaagggatgcgtctgggctacgagacgggttttgattccggcagtacgctggattatgtgtaccgtaactatccggaaggcaaaggtattctggggcgcatgattgaccgacactacctgagcagtattggctggcaggggatccgggtacgaaaagtgaatattcagcaggtcatagagcaggctgtcgcccggctgaaagagagtgatatgccggtacgtgtagtggatatcgcagccggacacggtcgctatgtgctcgacgcgctggagaaacatcaggatatcgaaagtatcctgctgcgtgattacagcgacctgaacgttgagaaaggccagaccatgattgaagagcgagggttaagccatgtcgctcagttcaaaaagggcaatgcttttgactatgactctctcgctacacttgggccagctcctacactggggatcgtttccgggctatatgaactcttcccggataacgccttaatcaaagcctcgctcgccgggctggctgcggcaataccgcctggtggcatgctggtctacaccgggcagccgtggcatccgcagttaaaaactatcgcttataccttaaccagccaccagaacggcattccgtggatgatgcgtgtgcgcacgcagaaagagatggatacgctggtggagcaggcgggcttcgagaaatgccaccaggtgattgatgagtttggtattttcaccgtctcgctggccgtgagaaagcagcatggctga

SEQ ID NO: 98513 - DNA, 633 bp, Enterobacter aerogenes
atgaaccgttttctgcgctggatctttacgttatgtattgcgtaccccgtggtctggatatggctgggcgttcgcgtgtcgggccgcaaaaagctgcctgtggaaggcccggcgattatcgtggcgaaccacaacagccatctggatgtgctgacgttgttcacgctgtttccactttcaacactggtgaacgtgcagcccgtggcggcggcagactatttcctgcgaaacaaagtgattggctggtttgcactgaaggtcatcggcatcattcctgtttatcgtggagcccatcaggccaatccgctgcaggcttgcgtcgatgcactggcagcaaagaaaattgtgattattttccctgaaggcacgcgcggcgagccggggaaattcgcagagatcaaatccggcatctggcatttaagccagcagtgtccggaggtgccgattatacccgtctacatgcacggtctggagcgctcaatgggcaaagggcagaaaatccccgtgccgttttttatcgacatctttatcgacgaaccgctgttttacgacgcggataaagtcacttttaaacaatcgttattcactcgtttcgtcacattacaacagcaggtgacaaggaaaatcacatga

SEQ ID NO: 98514 - DNA, 930 bp, Enterobacter aerogenes
atgcctgattccctgcacacgttgtattactgccttggtgggatcttcagcgttttagtactggcgaccgccattatcttcgtcttaaaaaagtgccgcccgcagcgtgactggctggaactccagcagcggatcaacagctggtgggtcatcgttggcttattttcgctggcgatgctttcgcctaaagggctggcactcaccttcttcggatttctcagcttcctgtcactgaaggaatatctgacgctggccccgacacgccgctctgacagcgtgccgttgctgtggatgtatgccgcgatcccggtgcaatatatctgggtggggatgtcgtggtacggcatgtttattatattcatcccgatttacattttcttattcctgcctgctcgcatggtgctcgttggcgatactaaagggttcttacactctgcctccgtcatgcactggggcatgatgacaacggtctttgctttaagccacgtcgcgttcctgatgatgttgccaggcgtggatatcaaagcgggcgcactgctggttatattcctggtcgcgaccactgagattaacgatattgcgcaatatctgtggggaaaatcattgggcaaaatcaaggtcacgccgaaggttagcccgaataaaacgctggccggattgctgggcggcgtgctgaccaccacgctgctggcggccattttcggcccgctgctgacgccgatgaactggatccactcgctgggtgccggggtaattatcggcctgagcgggttctgcggcgatgtggtgatgtcggccatcaagcgtgattttggtgtgaaagactccggtaaattgctcccggggcacggcggcatccttgaccgtctggattcgctgatttacaccgcgccgctgttcttccacttctattactacttctatgtataa

SEQ ID NO: 98515 - DNA, 603 bp, Enterobacter aerogenes
gtgacgctgtatgacatcaaacctaagtttcaaaatttacttcgacccaccgtcgtcaggctgcatgccataggtgcgacggcaaaccaggtaacactattggcaatgctggcctcggttctgctcggcagcgtactgatgtgtttcccgaaaccgctgttttttatctcattgccgatcttcttatttttccgtatggcgctgaatgctatcgacggcatgttagcgcgggaatttaaccagcagtccaggcttggggccattctcaatgaggtaggcgacattatcgctgatgctgcactctatctcgcatttgcttttttgaccggagttactccgtggttggttgtgctggtggtactgctgtcgtggctgacagagttttgcggcatcattgcccagaccctgacgggtagccgaaattatcgtggcccgatgggtaaaagtgaccgtgcctttgttctgggggctttgggtctgtttatcgcgctttggccgcagtacatcatcgtcgccaatattgtctttggtatctcggctgtgctgctggcctggacctcaatcaaccgctgtcgcagtgcgctggaggtcaccaatgcctga

SEQ ID NO: 98516 - DNA, 522 bp, Enterobacter aerogenes
atgaacatccggccattccgttatttgtggttatgcctgccactgttgctgctgagtagctgtggcctgtatcagaaaacaaagcagggtacacagagcgtagcgaaatcgattttctatcgccaggttgagacgctacacctgaccattaccgcccgaggtgccattaacgcggatgacgcgcggcaggcgatgccgctgcgtatccgcgtcctgcaactgaacgaccgcaagacctttgataacacggaatacaccaacctgctgacacagccggatttggtgctgaaggaatcgctgctgacacagcgtcagctgagtgtttatccgggtcagacagtcaacctcgatattccaatggatgaaaaagcgcagtttgtggcggtggtcgggctgttccgcaagccggatagaacccgtggcacctggaagcaggtgctgagccgcgacttacttgacccggatgagccgcgcgtcattgacgtaagggataacaccctgtttttacgaccactgcgatag

SEQ ID NO: 98517 - DNA, 3354 bp, Enterobacter aerogenes
gtggaaacctcgcgcactgagcctcgtcattccttattttggcttgtgactggctacatcatcactatcaccctgctggttactctcggggcgctgttgtattacttcgctggtagcagtgttgatctgccggcgctgctgccgggcaagataatcttccgcgcttgcctcgtctggatggtattggtgtggttttgcgccccatttattcttgcctggaaagccctggtcagactgaaaacccgggaagcgacgggggagaccaacaacaagaccacgcgcgcgccggaaaaccagttggtaaaagacattaccacgcagatgcgcttccagtatggccgtctctggcggcgtaaagttcgtattctgctgatggtcggcgaggaaagtaatgtagagcaggccgttccgggcctgaccacgcaactctgggttgaaggccaccgaaccgtgctgttgtggcaggggaatccggttgatgaacccgatgtctcagccctgaaagcgctgcgtaaaattcgccgtcgtctggcagatgcgatggtctgggtggtgaatgctgaaactgaactgactcacgatataagggatactgcggcgcgccaactgcgaaagcagtatcacgcgctcggctgggaagtaccgctatggttgtgggagatccactcgttcgagtgggagcaagctggcttacccgcgcagggcattggattcctggtcgcggcgggcgataaggctgaagattttagtgattccatgaatcaactggaaagcgcactgttgcgtcaggggatgcagcagatcattaataatcgaaagcactcctttctgctagagctggcgaaatatttgcgcgagggggggaacgctcgcctgacgcagactctgtcacagctgggagaaggcgccatggcgctgtcgctggccgggatggcattcagccctgtgacaacgtccggaaatgcttctcttcgccatgcctggctgccgggtaacatgtggctggatttactcgcacaacgctggcgtaaacctggagcgacgggagcatcgtggcataaaagcttaaagctgattagcacctgtttgctgacgttctggctggcggcctgtattttctcctgggttgctaacgaacgtctgatgcaggccgaccatgcgctggccttgaatgctgtcaatacccgccagcctttagcgaagcaactgctggcgttgtaccagctgcagcatgaaattgaacgcctgcaacaccgcaagctgtacggcgcgccgtggtatatgcgcatgggccttagccgaaacaatgacgtcctcgacgcgctctggccgtactggcggcaggcggcgatgccgctactgcgggatgcgtcagcgcagcatctgtccgcgctgatgaacagctggcgcaatctgccgcctgacgatccgcagcgagcttcacagtcgaaagtgatgtatgaccagcttcgtgcctatctgatgctttcccgcccggataaagccgaaccggccttcttcagttcgacggtgatgcaattctggccgcagcgcgagggcgtgctggatggcacatggcgagcggttggtaacagcatgctggcgtttatgatgcagaaccttccggcacacatggaatggcgaatcatgccggatatgcggctggtcagcggcatgcgctcggccctgcttcgccagattggcgccagtcatgcagaatccactcgctatcaaaagatgattgaacaggtatcccgtgattatgcggatatgtcgctgagtgccatggtcaatggttcggacagcagccaattgttcagcactgatgttaccgtacccggtgtatttacgcgcaaggcctgggaggaagaagttcagcccgccatcgagaaactggcgaaatcacggcgggaagaaattgactgggtgctcagcgatgcccagcattccagcgatgccaccagcacggtttccccggatacgctgaaagcccggctgacggcgcgctatttctctgattattccggagcgtggcttaaattcctcaacagcctgcaatggcatcaggcaggcagcttatcggagtcaattgatcaactgactctgctggctgatgtgcggcagtcaccgctgattgcgttgatgaatactctcagagtgcaggggcgtgccgggcagatcggaggcgatctgacggactccctggtgagttcagcgaaaaatttgatccacagtgaaaaagcgaatgctgccatgcggcactccggaaatgaggcgcacgggccactggatgcgacctttggtccgctgttgttactgtcggacggggatggctcacagaatagcctgagcctgcaaaccttcctcacccgcattacccgtgttcgcctgcggcttcagcaggtgacgaacgcgcctgacccacaggcgatgatgcagtcactggcgctgacggtgtttcagggtaaggcggttgatctgaccgatacccgcgactacggcagtctgatcgccgcgagtctcggtcaggagtggagcggtttcggccagacggtttttgtacagccgatgatccaggcctgggagcaggtactctccccaacctcgcagagccttaacagccagtggcaaagcgatatcgtgacgccgtggaatgcgtcgttcgcggaccgctatccatttaccgaccgtcagagtgaggcttcactggctgagctggcgcggtttatgcgaatggacaccgggcgtattgcgcagtttatccaaacccgcctcggtggcctgctgcgtcttgaaggagataagtgggtgccggacgcaatgaacagtcagggcctgaccttcaatccggcgtttctggacgctctcaaccgcctgactcgtgtagggaatgtcgcctttgcgcatggcgacgtgtcgctgcatttccaactgatggcgaagccgtcccgcgatgtggtcgaatcagacctgattgtggacagacagaaacttcaatatttcaaccaggaagaaagctggcaaacgctgagctggccggataaccgctggcaaccccagaccacgctgacatggcgcactatcaaaaccggcacacgtctttattccgatgagccgggaagctgggggttcattcgcctgctggataaagcgttggtcactgagctgggtgacaacctgtaccgcgtggtctgggtaacgccggatggtgtggcgctgaactaccagctacgtacggagctggggaaagggccgctgtcactactagacctgcgcgggtttgcgctgccatcacagattttctcgtccggtggcgctgctgctgcgggaatccgccctggaagtgaacaatga

SEQ ID NO: 98518 - DNA, 1146 bp, Enterobacter aerogenes
atgattttcccgccacgttaccctgactatgccgaacttcatcccgtctgttggcggcgatggtggattgcgctgccggtgatgttgttcctggcggcactggcgacgatgttgctgtggccggaaggcaaacccacccgaacgctctccttctggttctggagcgtgggatgtccgttgagcgtctggctggttgccgtcgcgctgcgctggttggtctggcttcagtccgtttcgaaccgcgaaacgcaccgggaggcgatcgcatcaaccgtcgaggcctggtggcgataccgttcgcgtatgttacccgtagaagccgtgatgctgatgacggcagtaggcgataaagagtctgaccatcaggcgctgttgttgcaaccgcttccggcaactcccggtgcggtcgaagatccgcagggtaacgcgcgactgtattgcccgaaggtgctggggctgggaggtagggaaagccggtctgttctgctgtcccgcactctcgcccgtctggtgttggcgcgtttgcgcgaggctgatgaagcccggccaatacaggtgttttgctggctgggagatgagcagagcctggccgcgttcagccagacgctggaattcgatggcattcgcctgccggaagatgcgcttcatctgcaaagcgctgccgaactggacaacgttattgatgccatgcccgccgatgaacaggcgatgctgctttgcgcaggggccggggaggcaacaccgtcagcggaatacgccgcctcggaagcgggttttgcctggctgtgcggacaccggacggcagctttgatgacgcgcagcgaaatactccagcctgagacgggggaaacgccgactcaactgacggaacagcttagtcgctatgccggcctgcacggtgtgcctgacgggatgctagccgccgattcatccgcaatggatacccttttgccgtccggctggtcagccgtcgattacgttctgatgccgtggttggggcaggccgggccggttacgccttttgtgatgcagtccctggccttgctgtcagcccttcaggggaagtcctgcggctggacgacaacatttacggaatcccaatttattacaggagtttgcgttccccgtggaaacctcgcgcactga

SEQ ID NO: 98519 - DNA, 264 bp, Enterobacter aerogenes
atgagcctgaaaaagctaattcgcgtaggggatatgctcagggaacacggcggcgaagtgctgagcggccgctatgaggccttcggcaaaccggtggcctgcgtgggggataaagcccgctgcaataagcatggcatgaccactatcgcccagggagcgccgggcagcacgattaatggcaaagcggtagcgctcgacgggcaccaatgcgcctgcggttgtacgctggtcagttcactgagcgcgatggacgtacatggatga

SEQ ID NO: 98520 - DNA, 2346 bp, Enterobacter aerogenes
atgtcagaagtaaaagcaggcgtctgggctcctccgctttttcctgatagtggacgtttaccagcatctcagcaagcagcgctggataattataagaaacaacgtcgggaagaagacgagtatctgtataaattcaatgagcaaaaaggacggcgaaatggagctggctttacttgcgcaagaagcctgcatatcagcttcttttttgatgggacgggtaataacgataacaatgatacgaatcgggctaacccaactcatcccactaatattgcaaagctgtttcatgcaacttatcccaggacggcagaatcagatggctatttttcgtattacatgcctggtgtaggtactgctttccctgaaattggagagatggattacagtgatgccgggctaaaatatgctactggtggagaaaatcgcataaactgggcgttagttcgtttatctgatgccgtaatgagtgctttaacaaaaggctctcagcgtatttccgcagatactgctaaaagtaaactggacgccatggcggccccctggccgctaagtggcgaatctaaccgcaaagcggcgttttacgaatttctgaatgcagaaatgcgtgccaaagcccaggatgaaaccgccaaacccaagatcctcaaaataaagctgtttatctatgggttttcccgcggtgcagccgaagcccgaacttttgttaactggctgacagaattgtttgaaacgccagaaggggcggataaacctgagcagtcaattctggggatccctctgagcattgaattttttgggctcctggataccgtaccttctgttggcgtagcccatatggctcccatgtgcgacgggcatatgggatgggcggatggcacgcaacagttacccgatgacgcacgttttcctaacctgattaagtgctgccggcactttgtatcagcccatgaacagcgcctctgttttcctctggattccgttcgccgcccggagggcatctatccgccgaccacgatggaagtggtttatcctggtgtgcattccgatattggcggtggctacccaccgggcgaacagggaaagggaatggctgatgaagctgatcccaataaccctggaaaggttttatcgcagatcgttttgcacgatctctatgccgctgcatttgctgcgggggctccacttactgttcctgatgaatatattcctgattcagtcagggcaaaaactccgtcgagaggcatgagtgaagcgataaaaaatgaatttaacttcagtcagtcgctcatccaacgcttcaacgcctggcggcagaccatcattgccgaaaaaccagcggatgctaaaaccgatagcgtctacggctaccatccgcatcgtctcagccagtcactggaagatgccgttatcgaacaaatcggttggatcactgcctggcgtattgggcgttatgctttccggagctatgtcacccagccgttttatctgggggcgcccgagcgtaccaaagaggagctggagcaagatgagaaaatgcgtgacgctcgacagagcgagatagataaaatccgcaacgcagcaaaacaaaacgctaaatcagcaccttctgcgtcggcggatcaggccggctggcctgcctttgaacccaccattgataagacggaactccgcgaggcagcagaagagtttcgtagcgactacctggacgaatttcgcccgcagaacgggtgggagttcgctatccacacgatccccaaatatgccgtctggctgatcaacacggatgatgagcaggccgagtacgatcggatcaaaggcgatggcgaccgtttatacggcagattatttacgtcaaaacagggagatgtcgtaaccgagcccgcgatggcgcaggttgttgcgctgtttgatgagcagatacatgattcccgcgcctggtttatgtattccacgctcggcacccgtgaaccctggggaagctatttcttttatcgttcaatctactttggttcccagagcaataaggatcagtatctgctctccgtcgcggggcaattactgggggttgccattattgccgctggcgcgacctataccatcaaacacaaatcccttaaaggcatcggcgttgcggcaggcgtttacggtatggagcgcatcattattaataatgcgacaggtaaaccggttcctctgcttgataacgccgcagagctctttaaacccacgcgggatccgggcttgctggtggcgcaggccagccgtcagaccatcgccacacggcaccaaaccatgatggcttcggcaattgatatgctcaaagaagcaggagctaaagtggtatga

SEQ ID NO: 98521 - DNA, 507 bp, Enterobacter aerogenes
atgaataatataaaaagaatggtaaagggtgtagcggtactgactgtgttggcgctgctgggctgcacgccatcacaggcggatgaatccagtgccggagcgctgagcggaataaaccatgtagcagttcagggaattaactggtttacggttaatggttacagagcaacccttgcgggggaaagttgttgcgtcatgatccccgaccaatggaagcctggcttgagagcgcatgtggaatgggaggttgatcccaatcctcacgcacatttacccccgttaggtactgaggaatataacaaagcatatattcagcataaagccaaataccaacactacagcgcagatattctaatcccgcagtataaagagagtgcgggtatagtagttcattttttgccttgtcatcaggtgaagatctatgcaggcatttcgagttacggcgcatctaattatccgattaaagaaccactggatatgaaggagcctgcaacatgtcagaagtaa

SEQ ID NO: 98522 - DNA, 291 bp, Enterobacter aerogenes
atgtcagaaataaaagcgtctgcctgggttcctccgtcattcccttttagtgggcgtttacctggggtgcaaaaagacgtactggataattatctaaagcagcgtagagaagaagatgaataccttaatgccttcaatgagcaaacaggacagcgaaatggagctggttttacttgcgcaagaagcctgcatatcagtttcttttttgatggtacaggtaataacgatatgaatcgtgccagtccaacacatccgaccgtggattatgccagtggcaaaaacaaggagtga

SEQ ID NO: 98523 - DNA, 633 bp, Enterobacter aerogenes
atgtcagaaataaaagcgtctggcagggctattagccaacgagtgaaattatgtgtgccagataaccgcagggcacaagttataccattcaccaggcaaaaagcgcagggaggaagagtgagcagaataaaatggattatccggggcattgctttatttgtgtcagtgttgttatcgggatgttcgcctttacaggctggtgaaagtgataccaccgctattacggtaggcgcttataatcatgtggcgggtcagagaataaattggtttgcagtcaatggataccgggttcccggattaggtggtgggtattgctgcgtgacccttcctgatcaatggcggccagaaatggttgcgcgtattgaatgggaggtagatccaaattcttatgcgcgtttaccacctctgggaactgacgcttacaataaagcttatattcagcataaagcaaattatctacatttcagcgttgatgttgaaattcctcagtacaatcatcttggtgagttttctgttcatattcttccttgccagaaggttgagatttatacaggtgttgaggggccaaattctccttcatatcccattaaagagccgatgaatatgcaggagtccgcaacatgtcagaaataa

SEQ ID NO: 98524 - DNA, 513 bp, Enterobacter aerogenes
gtgagcagaataaaatggattatccggggcattgctttatttgtgtcagtgttgttatcgggatgttcgcactcccaggctggcgagtcgagtgcagggaatatcggcggatacaaccatgttgccgggcagaacattaactggttttcagtaaacggctaccatgcgacgctaaatggaaatgtgtgctgcgttatgatcccggaccagtggcgacctgggatgactgcacatattgagtgggaggttgatcctaacgcggatgaaaaaattccaagactgaaaatgggggttggttttgaaccaaaggccttagctcagcacgaggccaaataccagcacttcagtgctgacgttcccattccgcaatataaggagagtgcgggcattaacgtccattttcttccttgccatcaggtaaaaatttatgcgggtgtagccggctacggtgcctattcctacccaattaaagagccgatgaatatgcaggagcccgcaacatgtcagaaataa

SEQ ID NO: 98525 - DNA, 630 bp, Enterobacter aerogenes
atgtcagaaataaaagcgtctggcagggctattagccaacgagtgaaattatgtgtgccagatagccgcagggcacaagttataccattcaccaggcaaaaagcgcagggaggaagggtgaacagaataaaatggattatccggggcattgctttatttgtgtcagtgttgttatcgggatgttcgcactcccaggctggcgagtcgagcgcagggaatatcggcggatacaaccatgttgccgggcagaacgttaactggttttcagtaaacggctaccatgcgacgctaaatggaaatgtgtgctgcgttatgatcccggaccggtggcgacctgggatgactgcacatattgagtgggaagttgatcctaaccccgctgaaaatataaagaaaaaaacaaaaggatttggatacgatcctgcggcatatgctaagcataaggccaaataccttcgctatagtgctgacgttcccattccgcaatataaggagagtgcgggcattaacgtccattttcttccttgccatcaggtaaaaatttatgcgggtgtagccggctacggtgcctattcctacccaattaaagagccgatgaatatgcaggaacccgcaacatgtcagaagtaa

SEQ ID NO: 98526 - DNA, 522 bp, Enterobacter aerogenes
gtgaacagaataaaatggattatccggggcattgctttatttgtgtcagtgttgttatcgggatgttcgcctttacaggcttgtgaaagtgataccaccgctattacagtaggcgcttataatcatgtggcgggtcagagaataaattggtttgcagtcaatggataccgggttcccggattaggtggtgggtattgctgcgtgacccttcctgatcaatggcggccaggaatggttgcgcgtattgaatgggaggtggacctattccccagtgaaaatataaagaaaaaagataaaggatttggctatgattcttcggcatatgctatgcataaggccaaatatcagctatacagtgctgaaatacctattccacaatataatcatttaggtgagttttctgttcatattcttccttgccagaaggttgaggtttatacaggtgttgaggggctaaattctccttcatatcccattaaagagccgatgaatatgcaggagcccgtaacatgtcagaaataa

SEQ ID NO: 98527 - DNA, 777 bp, Enterobacter aerogenes
atgacaacaacaccactgataacacccaaaaagcatatgctttggatgcagcagggtgagtctctctgttctgctaccggacaggactatattgatattctgatcgatcaggcaggaaccaaccagccgctgcaaaatgcgctacgccagttatctcccgatctgcgctggtttgagttgttcgaaggaaccccggaggggggaatgctggaatattcgccggtcgttatgcggctgtgttttgcgctaacgagccaccggatgtggctggagcagttactggaatacttctctggtactccgcgcctgacgttgctgatatctcctctggcctttgatttgctctgccgccatttgcaggcattgtcgcaggtacagtgggaagagcagaccggcttactgcgttattacgataaccgcgtgttcccatccttacttactcacgttcttaacgcagaacaacaggctgcatttacggatatcgcactgttctggggctggagagaccgagacggcgagatcgtctggaaaacgggaacattttctcctgcacgcgaactggcaaataaccctcaattggggcgagttggcgatgatcagatagatctgatgggctgtattagtgatgcagaagctttattggcgaggcggttatcttcgcaaggcgggaaagaggagcatttttcgtactgcctttccgtagctttaaaggcaagccagcaaggatatttaggtgatttggcatccgatgcagaattagaggtgataaatatatga

SEQ ID NO: 98528 - DNA, 2385 bp, Enterobacter aerogenes
atgaataagaataaatatatcctcaaaggaaacaaaattccggtgtataaccactaccagttgaacataccggagttaagcaagcgacgccccgacattcaactgtctgtccttcgctttagcggcgacgaagcgttaaataccccgtggcgttattccattgaactgacctgtgaagcccctgatattcctgcagatgtgttaattaacacgaccgcagaactccttttttatcctgatggtaaaccatgggaagcggtcgaaccccgcgtcatgcgtggtgttattaccgcttttcagcagtgtgaacgaactgctgatatcactcgttatgtggttgtgctggaagccagcctggcgttattacgtcatagcctgacatatgcggtgtatcaacataaaagcgtcattggtgtcgttgaagatatcctgaagcgttggggatattccagcctcgactatcgttatgcgctgaaaacccagtatccggtgcgcgaattctatatctcgtatgcagaaagcgatttatcctttattgagcgtcatctggcgcatgttggcgtattttattatttcgtctgggatgaagagaatcatcgggatgtgctggttctcggagactacacgcattctttcgccgaagagaagaatatggcctaccgtcatccatcagggcttttcgatggcggtcttgaatccctgtgggagatgacaatcaaccgccgctcggttgccgggcagacgcgagtgaacgatgaatattatcgcgaagcccaaagcgatctgcaggcgcatctggaaaccgatctggatatgcctgcgctcattggcgaagaataccgctacggcgagaattacaaagagcagggcaggcaggcggcagaacagccggagcaaggccgctggtttgttaagcgtcgtcgtgaacgtctggtaacagaacaggttgtctttgacggcaaatcaaacggcatgacgatccgtcctgggatgattcttcatccacagggtaaacgttgggaggaagcgccggacgggctattagtggtatcgacctcgtcacagcgcgtctcccgcgataccgcctacatcatcagctttactgccgtgccccatcgtctgcacctctcatatcgtccacctttgctgggcaggccgcacattgccggtacgctgctcgccagagtcaccagtccggttgaaaacgcgcagtatgctgaactggatgaaaccgggcgctatcgggtgcgtttccagttcgatctcaatactacctggcggtctggttttgaaagccttccggtacgccttgccaggccgtatgcggggaacgtttacggctggcatttcccgctgattgccggcacggaggtgatgattgccttcactaacggcgatcctgacaggccgtacatcctctgcgctatgcatgattcccgacatgaagatcacgtcaacctctataactatcagcgtaacgtgttaaggactcctgcgaacaacaaactgcgatttgaggatcggcgcggggctgagcacgttaaaatttcgacagaatatggcggcaagagccaattgacgctcggtcatattgttgacagttcgcgtaacaaacgcggtgagggttttgaactgcgaaccgacagcacaggaactctccgggcgggtaaagggcttttcctgaccgcagatgcgcaggccacggcaagcggacaggtgctggaaatgtctgcggcaatctgcctggtcaaaggtgcggtcaaccagatggccgagtggcgtaccatcacccagtcgcatcacaaccttcaacctgataccacgcatctgaaaagctatcttgccgccgccgatcaactgaaatctccggccatgctgctgagcgccccgcaagggattggggtagttagccgggaatccgttctgataaatagcgctcagacgctgcacctgcaaagccagggggaagtcaatattgccagcggagagcgtatttccctgaacgccagccagaccatttcactgctcgcgcagcaggaagggctgcgcatggtgtctggcaaggggccgctgaccatcgaatctcatggcgatttaatggcgctaacggccatgaaggatgtcaccgtgcagtccacgcagggcgagcttcatttcgcggcgaagaacggcattgtgctgggctgcggcggtgggtcgattcgcatctccccgcagggcagtatcgagatccatacgccggggacactgagccttaaaggtcagcacatctgggatgcgccggtgagtgtcggtacccaactgccggaactccctaagtcggtgtgtaaggactgcctgaagaaagcgcaggaagaagccgtcgcatttgcgccgcgaggataa

SEQ ID NO: 98529 - DNA, 702 bp, Enterobacter aerogenes
atggcttctctgggaaaaatagagagcggcaatcaaacaaaatctattacgacatcctttattgatgaaatatttcaggatacatggttgctcgcgttggcaattcgtaatgtgcctgccgttgtcgttgatcagacgctttataaaacgtgcgagaatatgattgagcaggttcagaaagcgttgtttgcagctggtgcatctgaggggcttgcaagtgaaattaagtttgctcactgtgtttttctggatgaagcggtaatgacgcagccggatatcgatgtttctctttggtggaagaatacaccccttcaggggcgctatcttggaaacttaaatggcggtgagttcttctacgaacatatcaagaacctgctgcacgaagccgttccctcagaagctgttgtgacctgttatcaccgaatgcttttgctgggctatcaggggaagtttatcagggaaggtggagaagaaaatgaagaacgacaatctatgtttaagcagctgagcgcgcttttgcctgcaacaaaagaaaaaatgaattctcctgtctttatacgtaactttcgcccggatattcatttctggcgacgtttcccctggttgatgagaggactgggcttactgcttattgttgccattacctgtgcaatgagcgcccatctgcattatttgctcggacaatggttcacgctgagctaa

SEQ ID NO: 98530 - DNA, 159 bp, Enterobacter aerogenes
atggtattggcgcaaaatcaggcgggcaataaaatggatgttaccaaatgtaaccagacggcgaaagtatactctaaaagcttgttgcacgaggaatatcagcaaatcaaagaagaacacaaaatatttcaccagggcattaaattattaaccctttaa

SEQ ID NO: 98531 - DNA, 531 bp, Enterobacter aerogenes
atgttttccgtggcgcagggagcgcacagggggcggccagtcgccgccgccccctgtacccccgggctttggccgccaaaatcgccacttcgtggttccttcgacttatcccggcaggcttcgggtcgggccgaggctgcgtccctgcaaatcacggccctcagcccgcatccatgcgggctgtcccggccttccggtaacgtctcagcgattttgaggccaccaacaccggcagtttcagtcagcatggtgaataaatcaaaggcaggccgcgcggaccgtaggccggataaggcgcagccgccatccggcgtacaggcggctccctacctgtgcccatgcccggcggcgctgcttgcgcgggcctacagattcagtgcaatgggtgggcccagtgccataggtagtccggataaggcgcagcgcggagggcccgcttcatcattggcaaattgctcaatgccgttacttgcgaatagacgcaatctgctgaaaactatcagcgagatggtgaaccacagggaacggtaa

SEQ ID NO: 98532 - DNA, 2265 bp, Enterobacter aerogenes
atgactaataatacccgaggcctgaaacaatacgccggagccgccggcggttggggggccgttaaagcctgtaccgcccacgttttggggcaaaaaacgccgctgcgcgataccattgcactatttaaaatgaaccaggttaaagggtttgactgccctggctgcgcctggccggacccggaacaccgctcgccgatggagctgtgcgaaaacggcgttaaggccgtgtcgtgggagacaacggcaaagaaagcgacgcctgaattctttgctcatcatacgcttgcggatctgtggcagcgcagtgattatgagctagaaaattacggtcgtctcactcatccgatgaagtacgacatcatcagcgatacctatcaaccggtcgcctgggaacaggcatttgccgaaatcggcgagatcatgcgtggttttgcgccggacgagatggagttttatacctcagggcgcacctccaacgaagcggcgtttctctatcaactgtatgcccgggaatatggcagcaacaatttccctgactgctccaacatgtgccatagtcccaccggcacggggctgggctcgtctattggtattggtaaaggaaccgttgaacttagcgattttgaggcggccgatctggtgatttgcgtgggtcataaccccggaacgaaccatccgcgaatgctctctacgctacgggaagtagcgcagcgcggtggtaaaatcatctcggttaacccgctacgcgagcgtggtctggaacgctttagttttccgcagtcgccgtccgatatgttgttaggtcagcataccgacctttccagcgactatttccagatccgcgtcggcggcgatgcctggttcttccgcggaacaatgaaagcgctgttggccttagatgcgcagcatccggtcattcatcacgactttattgccgggcacacttcgggctatccggcgctgttggccgatcttgaagcgctatcgtgggacgatatcgagcgtggagcaggggttaaacgcgaagtggtcgaatactttgccgggatctacagccgtcatcagcgggtgatcattagctatggtttgggtatcactcaacatcgcaacggcacgcagaacgtacaacaactggttaatctactgttgatgcgcggtaatatggggcgcaaaggcgcgggcatctgtccgttgcgcggtcactccaacgtgcagggcgacagaagcgtcggcattaacgaagccccgagtgaagagtttaatctgcgactggagagctactttggcatcaaggcgccgcgccagcatggccgttcctcggtcgaaagtatcaaagcgattgaagataaacgcgcgcgcggcctgatctgcatgggcggtaatctggcggtagcgatgccggatccgctgcgtacattcccggccatgcgccgcctggaactgcaggtccatatcgccaccaagctgaatcgctcgcatctgttggcgggcaaagatacctttttattcccggcgcttggccgcagcgaacgcgatctgcaaatctcgggcgtacagtcgatcaccgtcgaagattcgatgagcatggtacatgcctcttgcggttcgctgaagcctgcttctccgcatttgctatccgaaccggccattgtcgccggactggcccgcgcgacgctaccggatagcccagtctcctgggagcggttgacgggtgattaccgtctgatccgtgacgcgattgaagcggtgatcccggaattccatcagtttaatgcgcgcattgccgcgccgggcggcttccgccttgataacccggcttcgcgtggcgaatatcgtaccgaatcgggtaaagcgacgttccatgtctgcaatctgaccgccgttgatgatgcgctaccggtggatagtttggtattgactaccatccgcagccacgatcaatacaacaccaccatctacggcatggatgaccgctatcgcggcgtaaccggccgccgcgatattatcttcctcagtgaggaagaagcgcgtaagcgtcagttgaggcagggggatcgggtcaatatcatggcactggatgcgcggggcgaaccggacggtgagaaagtgctgttgaatcagacggtgtttatcgtatcgatggcggcggcctcggttgccgcttatctaccggaggccaatattctgctgtcgttggatgcggtcgataaagagagcctgacgccggcttataagagcgtaccggtacttattcgccgggcctga

SEQ ID NO: 98533 - DNA, 1104 bp, Enterobacter aerogenes
atgcaacgtcaccaggccccgttccgcgcagatatcgtcggcagttttttacgtcctaacgccattaagcaggcgcgcctgcagctggcggaaggcaatattgatgccggccatctgcgtgaaattgagaatgaagccatccgccaactggttcagcagcagtgcgattgcggcctgcacgtggtgaccgacggtgagttccggcgcgcgtggtggcacttcgacttcttcgacggtctggaaggcgttgaacgttacgattcagagaaaggtattcagttcaacggcgtacagactaaagcgcacggcgtacgcgtgaccggtaaactgggattcggcaaccatccaatgctggaagatttccgctttttgaaaagcgtcagcggtaatgcgcagccgaaaatgaccatccccagccccagcgtgctgcacttccgcggcgggcgtaaagatatcgatagcacggtatacccggacctggccgaatacttcgacgatctcgcaaccacctggcgtgacgcgatccgcgctttctatgacgctggctgccgttatctgcagcttgatgataccgtctgggcctatttatgttcagacgaacaacgccagcaggtacgcgagcgcggtgacgatccggacgaactggcgcgtacctatgcccgggtgctgaataaagcgctggaagggaaaccacaggatctgaccgttggtctgcacgtctgtcgcggtaacttccgctcgacctggatttcagaaggcggctacgagcccgtggcggaaattctctttggcggcgtcaatatcgatgcgttcttcctcgaatatgataacgatcgttccggcgattttgccccgctgcgttttattcgtccaggtcatcagcaggtggtactggggctgattaccaccaagaatggcgaactggaaaacccggaaggcgtgaaggcgcgcctgcaggaggcggcgcagtatgtgccgctggagcagatttgcctcagcccgcagtgcggctttgcctccacagaagagggcaattcgctaagcgaagcccagcagtgggataaagtgcggctggtcactgggatcgccgcccaggtctggtaa

SEQ ID NO: 98534 - DNA, 492 bp, Enterobacter aerogenes
atgagaactctccccttaatgatactatttttactctcagcgtgtgtgggccatcctcaagagagtccggctaaccgcgctgaggcgttttactcatcgtatctggagtttctggcaagcagtaatgatgaatattatcagctgcaagaatatatttcggctgatactctgaccagacttggtaatatcgaggctattcctgaacaagagattgtcggatctgattattttacttatgttcaggattatgattcgtcctggatagcaaatcttaagattggtcatgcccgcgctttaatggggggaacggttattccggtatggatcggtattgaaaacggtgatgttttacaccttgaagcatatatgcgctgcgaaaatggtaagtggaagatatatcgcgtaagggatgtaagccatcattatgagcaaccgatatttaatgccggagcaatagcccaggcaaaatctgctgcccaaaacaagtattaa

SEQ ID NO: 98535 - DNA, 474 bp, Enterobacter aerogenes
gtgatcatcggtaatctgaacgccctgcctcaggcggggttgccgctggcgttgcggcaaatcctttgccgcgctgaatgttctcttagcgccctgacaacccatgaagatggccgtttccaacctgctgatggcgactggtactgcaccatcggcaccgcgcaaacccaggcggcagaacagcgacataccgaatatcacctccaatgggccgatattcaggtcattttagccggcgaggagataattcatgccggtaccttgtacagcggccaacctgacgatgaacagcgcaaaccggatctctttatcagccagcagacgccgcacagcgtcacgctgcatttgcgcgtcggcgacttcgcggtctttctctccggcgaaccgcaccaggcgctatgcgcctttgcaacacccgccccggtgagaaaagcggtgtttaaagtgccgcgcagcatgctggaggcgccatga

SEQ ID NO: 98536 - DNA, 2259 bp, Enterobacter aerogenes
atgtctaacaggatcaccgttcagctccccgttgaggggctgcttttctggaaactcagcggacatgaagccatgtcggaaatgttcgagctcagcttaacgctgcttggcagcgatgcgcgtctggatcgcagcaagctgcttggccagccggtcaccgtgaccatcccgacgcaaaacgcgctgagttcgcgttatttcaacggtaaaattacccgcgtggcggtcagcgccgttgaactgagcggtatccgctacgccgcttaccaactgaccgttgaacccgacttatggccgatgaaacgcgaccgcaacctgcgtatattccaggggcagacggtaccgcagatcatcaatacgttgctgagtgaataccaggtcaacgttgaggataagctgaacggcagttaccgcgtctgggattactgcgtccagtatcaggaaagtagtttcgcctttatcagccgcctgatggagctggaggggattgcctaccatttccgccacgaggcgggtaaacatacgatggttctgaccgattcagccacccagcatcaaccggtaagcggctatgaaaccattccctaccaccagacggcatcgggcggtattaccactgaagaggggatcggtcagtgggcgctggaagatagcgtgacgccggggatttacagcctcgatgactatgatttccgtaaacctaacgcctggctgtttcaggcgcggcagaacccggcatcgccctcgccgggcagtatcgacgtgtacgactggccggggcggtttgtcgatcacggacacggtgaattctacgcccgtatccgccaggagcgctggcaggtagaacatcagcagatccaggcgtccgccaccgcggtaggcatcgctcccggcgcaacatttaccctaaccaatgcgccattctttagcgataacggcgaatatttgacgactgccgcagattactattttgaagagaacagctacgccagcggcggtaatagcgacatctcgcaccaaatccattttagagtgatcccctcttcggtagtctatcgcccggcgcaggtaaccgactggccgcgcacctatggcccgcagacggcgaaagttgtcgggcctgaaggggaaagcatctggaccgacaggtatggccgcatcaaagtgaagtttcactgggaccgccatgccaaaggcgatgataccagctcctgctgggttcgcgtgtcgagcgcctgggcaggccagggctttggcggcgtgcaaattccccgcgtcggcgatgaagtggtcattgattttatcaacggcgatcctgaccgcccgatcgtcaccggacgtgtgtataatgaagccagcatgccgccatgggatctccccggcgacgccacccggatgggatttatgacgcggagtaaggatgggaatattgataacagcagtttcttgttcttcgaagataatccgggcaatgaatccgtcgagatgcattcagagaaagatatgaagatctcggtagagaatgataaaacaatattgattgatggcaatcgcaatacaactatacaaaaaaaacagcaggatcatgttattggttccgtaatgcagacttacgaggactcttggaatattactgttactaatgctgttatcaatacatttaatgggggagaaaaaacaaccatccaaaaaggacgcattcttaaaataactagcggaggtgatgacgtaaatataaatgatggcagagctacaaatataacaggggatgacacactacacatcacgggggcattgactaagacaattgaaaatggaagccacgcagacattaagggtggacaaagtaaagtgatcaatggtggtttatccattaatgtggataccggggattgggtccagaatgtcaatgcgggtactattaccatcacaagccctctggatattacattgagaagtgcaaccaacataaatattcaagcaccaaagtcaagttgtactattgcagggcataaagaagcaattacggggaatagtgcgaatataactggtgcatcggagagcttaactggcgctgctgttgatgtaaagggattgtctgttagtttggcccattcgtatgtagctcacaatgttatatcaattagccacaaaacatttgaacttaaaaatagccccatggaacttaagaaaataggcgctctgatttcaagcggagctattcattggagctcaaaggctttaactttattcttataa

SEQ ID NO: 98537 - DNA, 264 bp, Enterobacter aerogenes
atgtctaccacccaggttctcggcgaggcctcctttagcccgccaggacaacatcccgacagcttaaccgcgcgtatcgacgctttgccctcctcgcccggtctttggtcttttatcaccctgctggcattaggcggttttttcgaactctacgacctgttccagaccggttatatcagcactggcctgctcgccgagaatatttttcataccggaaaagacggggtattcggtattgccgatcaggcagccttcgcttcctag

SEQ ID NO: 98538 - DNA, 285 bp, Enterobacter aerogenes
atgagaaaattttacaaaatttgttattctgaagttgaattggttttgaaaaagctagtatttctcctgttactcaccggcgtaagcgcgatgctttacggcaatctccctgcccagcgtattagtgactgtgaaagcctgggggcaaatgaggacgtttgcgcatcggtagagtgggataacgaaaagctgaatttcttgccgcaatataacccggaaaatcttaagactattgctgcgcttcagcagtcaggcgccgggaaacgcgcgacggttaaatcataa

SEQ ID NO: 98539 - DNA, 645 bp, Enterobacter aerogenes
atgatgctaaaaaatggttttagaatgctgtttgcgatagtggttatctggccattagcctggttgtggctagggctgcgggtgaaacattgtgagcgcctgccggaaaaggggccggcgatcgtggtggctaatcataacagccatatggatgtgttcgcgctgctggcgctattttcgttgcgaacgcagagacaagttcatccagtggcggcggcggactattttttacgtaataaagcgctggcctggttcaccctgaatgtactgaatattattcccgtagcgcgccgcgggcaggggaaaaatccgttagcggcctgtgaacaagcgctacgtgatgaacaaatcctgatcctttttcctgaaggtacccgcggacaaccgggagtgataacgccgataaaatcagggctttggtatctcagccaaagtttgccgcaggtcgctattatccctatagggctcaaaggtaccgaacgggtgatggctaaaggcaaccgcattcctttacccctgttcatcgacgtcaatattggcgagccgttatatttccatccggataaacagcagtttaaagaccagatagggcggcagttactgttgctcagcgcttcctttaatggagaagaaccgcatggctga

SEQ ID NO: 98540 - DNA, 918 bp, Enterobacter aerogenes
atgacgctattgctgcgttctctggcggttatctttttgctattgctattggcgacagcagtggatggcctgctgcgctggcggaagcctgagaaaaactggcgtgagttgaccttacggatccacacctggtgggtgattatcgtccttttttcgctggcgttgctcagcccgcgctggttggcgctgacctttttcgcgctggtcagctttatggcgctgaaagagttcttgactctggtgccctcccgacaggctgaccgcatgcccgtactgtggatgttcatcgccatccccatcaactattggctaatcagtattggctggtacggtctgtatatcattttcattccggtgtacgcctttttattcctgcctgcgagaatggttctggcgggtgatacacgggggtttttacatagcgccgcgcagcaccattgggggctgatgaccaccgtcttcgcttttagccacgtggcttctttgctggtgttgccaaccaacggtcagcaaaccggcgcgctgctggtgctgtttctggtgggcttaaccgaattcaacgacattgcgcagtatctttggggtaaatcattggggcggatcaaaatcacgccaaccgtgagcccaaataagaccctggccgggttgcttggcggtattggctgcaccacgctggctgcatggctgctggggccgataatgacgccgcttaactggcagatgtcgttattggcgggcgcgatgatcggcagcgcgggtttctgcggagatgtggtgatgtcggcggtgaaacgcgatattggggtgaaagacagcggtacgttgctgccgggccacggcggcattcttgaccggctggactctcttatctttaccgcgccggtattcttccattttattcgttattcctgctactga

SEQ ID NO: 98541 - DNA, 603 bp, Enterobacter aerogenes
atgacgctttacagcgtgaagcctgcgtttcaggcgctgctgcggccaatcatgttctggttggcgaagcgagcggtcaccgccaatcaggtgacgctcgccgccttgttattatccgttctgaccggcttagtcctggcgatctttccgcattacactctttactggatacttccagtcgttctgtttatccgtatggcgctgaatgcgcttgatggcatgctggcccgagagtgtcgtcagcagtcccgactcggcgcggtgctcaacgaatttggcgatgtgatctccgatgttgcgttatatcttccttttttattgcttcccggtagccatccgacgctggtgttaacaatgctgctttgtacggttctcagtgagtttgccggagtgctgacgcaggcgattggcggcgtgcgtagttacgccgggccgatggggaaaagcgatcgcgctatggtgtttggcggttgggggatagcattgaacctgtggccggacgtggcggtatggagcaatatgctgtgggggctcgttaccttgctacttatctggaccattatcaaccgctgttccagcgttctgcccggagccagggcatga

SEQ ID NO: 98542 - DNA, 714 bp, Enterobacter aerogenes
atggctgtatttgataacaaatcggtactggtattgggcgggagtcgcggcattggcgcggcgattgtacggcgctttcgtgccgacggcgcgtcggtggctttcagctacgcgggttcagggcaagcggcacagcagttggctggcgaaaccggcagtaccgcggtatttaccgatagcgccgatcgcgatgaagtgatcaagctagttcgcgatagcgggccgttggatgtactggtcgttaatgccggtatagccctctttggcgatgcgctggagcaagatagcgatgcgatcgaccgtctgttccgcatcaacattcatgccccctaccatgcggccgtcgaggcggcgcgcacgatgccggaaggcggtagaattatcataattggttcggtgaatggggatcgcatgccgatgcctggcatggcggcttacgcgttaagcaagtccgcgttgcagggactggcgcgcgggctggcgcgagattttggcccccgcggtattacggtgaatatcgtgcagccgggccctattgataccgatgccaacccggagaacggccctatgaaagaactgatgcacagttttatggcgattaagcggcatggccgcccggaagaagttgcggcaatggttgcctggctggcaggcccggaatcatcgtttgtgacgggggcaatgcacaccatagatggcgcatttggcgcctga

SEQ ID NO: 98543 - DNA, 1347 bp, Enterobacter aerogenes
atgacgacacattctgaacgccacctcactaccgggggggacccgcgcacgcaggcggactacgcaaagctgcgtgaagaaatgcaaaagctcagccacccggcgcgcccggacgttaactggcgatatgcggaacagttatgcctgtcgctgtttgatcgtaacggtgtggatcttcagacagcagcctggtacacgctggcccgcacgcagttggctggattatttggcctcaatgaaggtctcgctattcttgaaacattgattacacgtcaatggggcgctttgtggccgcagccggtgcatgcgcggatggaaatcgtctgcgggttgagcaagcggttacagcaggcgctgcgcacgttaaccctggcatatgccgacctcagcgaattatatcaagcggaaacacatctaaaagcgctcgatgcagccctgcaacggctcgagctaaagcatgccggtcagttggatgtcctggtcgctctgatacataacgccgccgtgcggctggaaaacagcgatggcatagcccgcgccgataattcgcagcacgccggcgtgaccgtgccggggaacgcaattattgaggttgatgagtcggttgaacggataaaacgggtgtacattgcccccgcggataccactgcggagatggcgacaggttgtgaccttccgtcggcggtacagcgctggcgcccctttgctgccggtatgatcaccatgctgttgttaacggtggcgacgatatggggatggcgggttctctattcatcagaccaggagcaagtgcaattcgccgccagcctggcgccattgcccgtggcgctttcggctgagcagctgcgttcctttcagccgcgctcgccgtcagctgataaggggatactacagacccagcagcagctggcgcggctggctgagctcaatccggattgggctatcgatgatggagagcgattggtgcagcaggcgctaacgctgtggcctgagcaggctcaaacgctctcccggcagtggcggcaacagctcgccgccgccgcgctgccggttgaaaatctcaatggatggcatcaaggaatgaagcagttgcagcaattggcccagcgccttgatgcgctggatgaacaaaagggaaaatatctaaccgtaagcgagctgaaatcagcggtgttcgcaatgacccagtcgtttaatcgtactgttccggtcgaagaacaactgcgtcagctggcggagatgccgcaagagcaggcccaaagttcagcgcagcaacatcaggcagaacagcatttgcagcagttgattactcgttatgccttgctgaaattagacatgaaggaatag

SEQ ID NO: 98544 - DNA, 537 bp, Enterobacter aerogenes
atggcgactatcgctggtaaatattccgctgcgttattggcgatgattttctcgacggccttggccggttgcggcttgacgcagagtgtgaaggacggggcggtctcagtgaccaggtctattttttataagcaggtgaaaacactgcatctggatattcgcgcccgggaaggggtgaataataacgcgcaaggggcctcgctggcgaccgtagtacgtatataccagctcaaagatcgtaaggtgtttgatgatacagattatccttcgctgcttgctgaggatagccaggcgatccaaggcgattggcttgccgagaaagatattcgtctgcgccccggagaatccgtggctgttgatatgccgctggaggcggcaacgcaatacgtcgcgatcgcggggatgtttatggcgcctgacctggctgggaacagctggcggctggtgttgactcgcgacgatcttgacgcggacaaaccgcgggttattgaggccggccataaccgtttaaccttgcaaccgttgaaggataactaa

SEQ ID NO: 98545 - DNA, 1026 bp, Enterobacter aerogenes
atgaatttttatcgcttcagtcagctgcttgaacagagccagccagaggcgccgttgaccggtggaggctggcaaatacggcatgaaccgatacgctttcgaccacatccgggaatgggattcccggccagtgaaattcggcaacttgaaatgcctgaagcggatgtttcgcacttaccgccctcgcttcgcgtcacgtttatgggattgtacggagtcgagtcgccgctgccgacgcactatattgatgatatcgcgcagcgccgcgaggggtatgccgccgcagcggattttctggatattttcaaccatcggttgattagccagtattaccgcatctggcgtaaatattcatacccggcgacatttcaggctggcggcacagacaatacctcgcagtacctattggggttagccgggttggggattacggggtgcgcggccgcggtggatataccgttatcacgctttttggcgctgctgccattgatgcttcttccgggacgaacggaggaaggaatgagggcgttggttgaactgctggcgccggaaactcgtgccgagatctttcatcacgaccgctgtcgtattccgctgaaaaaggcgctgaccatgagcgtgaggcatcccgttagcctggcggccaggccggtcatgggaacccacggcacggatgttaatggtcaggtgttgttacgtttaacgaccagcaaccatgaggaagcgcagggatggttgcccgggggggaacgactccaggacctcatggcgttgctgcatgtttggctcggcacacacctggatgtgcgcattcaactatgcgtcgctcgtcatttattgccggaagcgcagcttacctgccagttaacaaaagcggtgcggttagggcgtactgcagtgctgcgcccgctaaatccacatcgcagttcgaatgacattatcaccattcatccagggcgttatcagcgcgtccaggaaaatattcaccgaagggagcacgatgaagatggcgactatcgctggtaa

SEQ ID NO: 98546 - DNA, 1764 bp, Enterobacter aerogenes
atggaagatttaaccctacgctattttgacgctgaaatgcgttatctgcgcgaagcggcaaaagagttcgcccaaacgcaccccgatcgggcggcaatgttggatctcgacaaagccggtacgccggatccctacgtggagcggctgcttgaaggctttgcgttttcgatgggccgcctgcgtgaaaagatcgacgatgatctaccggagctcaccgaagggttggtcagtatgctgtggccacattacctgcgcactattccgtcattatcgatagtggctctcatgccggaacttacggcgatgaaaatggcggaaacggtacctgctggtcttgagataacgtcccgcccggtggggccgaaaaataccctttgccgctaccgtaccactcgcgatgtgacgctgaatccgataacggtggcgaaaattgccatggtcagcgagccggacgggcgttcgctcctgaggattcgttttgcctgcagtggccaggctgactggtcccacgccgatctgcgccgcctgccgctttatctcggagaagacgctgtaaccggcagcgccctgcatttgtggcttaccaaacgccaggccgcgatgtatctgcgcctgccaacgcaagctgagcggataaagattaacggctatttctcaccgggtggattcggcgaggaggacggcctgtggccgaagggagagagtgcttttagcggttatcagctattgctggaatatttttccttccgcgaaaaatttatgtttgtccagctgcagggtctggacaattacacctttcctgctgggataactcattttgatatcgaggtggtgttcaaccaactttggcaaagcgatttacccataaccgaagactgcctacgcctgcactgcgtaccggtgattaacctgttcaccctggaagcggatccgttaactatcagcggcctggagagcgaatacctgctgcggccgaaacgtttgcaggacggacatactgagatttattccgttgatagcgtcaccggctcagggcgatcgggcgaggcgcgatatgtcccttttaccagtttccgacatcggggaggaatgatgcgccgccatgcgccggagcggtattaccatacgcgcgtgaagcgcggcgtcagcggaatgcacgacacctggttaatcctgggcggccagcgctgggaagccgatcggggttttgaaagagaaaccgtatcgctacgtatcactggcaccaacgggcaattaccgcgccgggcgttgcaaagcaccgtgcttgaccgctgtgaccaggtttcagaaacgcagctgagcgtgcggaatctgtgtaagccgacgttgcctgcttatccgcccgcagaggatcgctttcactggcgggttatgagccatctgggtactcgttttttaaatatgatgagtaacgccgaggtacttcgcggcacgctgtcactctataactggcgtgatgatgagctgaattaccgccgtcttgaggcaatccagtcggtcaagcatcatcgtcttcagcgttttgaagatgggttcctgttacgagggttggaaattgaagtgaccctcgacagccgagggttcaccggcgaaggggatattcatctgttcggcgaaatgctgaatcgcttttttgccctctatgccgatatgaatcaattcaaccagcttacgcttattgttcagccagaagggaaatatattcggtggaaagagaatcacaatccgcgcctgcccggttga

SEQ ID NO: 98547 - DNA, 1572 bp, Enterobacter aerogenes
atggcatcggttcttacattgattaatgcttgccaggccgtgcctgaaacgctggttgcccaaacgcagcaacgtctgctgctatgggaaagctggctgcagccagtcgcagccgattcgccgaccggcaacgaccctggctataacgatgatttccagctgatgcgcgaagaggtgaataagctttcgggagcggataccgatctcatttgccagcttgcggaaaaactgttaacgaccgtgactcgtgatatccgcgtcgcttcctactacgcctgggctcgcctgcatcgcgatggcgaagccggcctggccgatgggctggaattgctggcggggttaatgcagcgttttggccttcatctgcacccgcagcgggagcgcagcagaaaagcggctcttgactggctggccagccagcgaatgctcgacagcctctcgctattccccgaagtgaataatagcgtcgcgatgcgcattaccggagccttgttgcttatcgagcaggcagaagagggggccgtccccggcgcgctgtgcggcgtcctcgaaacccggttgatgaaatccggcggcccggaggccgtagtaccgcagaatatcagcgatacaccgctaacagcagcagtcagtagtgcgccgcagacaggtacgattacgtctggtcaggaacttctgacacaggcgcgggtgctggcaaaatatctcagcgatcgaccggacggttggctctctgcctatcacctgatacgaagtatccgccatgacacgctgcaccaattaccccctctgttggcggacggcaggacccgtatcgatccgccaaaaccggatcagcgggcgttgctgaagcgcttgtatctgcagcagagctggctggagctgctggagcaggccagcgagatgttttcccgcgcagcgaatcatctgtggctggatttgcagtggtatgttcaccaggcgttgctgaaatccggacgtgaggcggaagccaatattattcaacatgacctacaaggacttctggctcgcttaattggcctggaggagctggcgttcaacgacggcacgccgtttgccgatgaggtgactcaaaactggattcagcaactggtgctggataatgccgccttccgggacgatgccgtgtctggcgctgtaacggcttccggcgatgaccctatccttcaactggagcccgaagcgctggcgctagccgacagcgagggagccgatgcggcgctgtcctggttacagcatcgtccaggaataacgactccgcgaagccgttggctgctgcgattattgatggcgagggttgccgaacagactggaaaaaatgaactggcgcagcatttgttggcggatctgaacgcgcaggccgccacactttctctggcgcaatgggaaccagagctgctgtttgaggtctgggcccgccatcttcgacttttgcggggtaatgccgggcgcagtgaaacggacaaaaatcgtttgcagccgctgatggaccgcttactggcggaattgatcgccattaatcccgcccgagcggcggtactctgtgtttaa

SEQ ID NO: 98548 - DNA, 3447 bp, Enterobacter aerogenes
atgcaaaaatatagtttactaagattactgggtgttgccatattggtcggcgtgattggcattttggctgcaatagcaatacatttatggggagatgattttggactgacaggtaaggcggggaaagtatcttgctggtttgcttttatgtttgtttttttatgcgcatttaaactccttagattaaattcctatttttcagtattcaaacgctacgcttatgcaaccaaagcaaatccatcgacatcatacctggcgaaacgcttttcagcgctacatacctaccgcacgcctgaaaatgatgaaaccaatggcgaagaaaataggtattacgctgaattaaacgactacctgaaacagcagtatagttatttctggccgtcgaaagttcgtatcctgatggtgacgggtaaaagcgctgatgtggagcaagctattcctggcctgatcgatcaatactggcttgaggcgaatggaaccgttttgctgtgggacgctgagttgacaaaacagggcgatcgcaccaagcgtaatgcggtttgtaagcttcgccgccaacccgatggcgtcatatggataacatcggccttcgaccagctgaccgtgctgagtggggatgcaataactccggctttatccactatggatatagatagcatcgcccataccctgaatgcccgttatgttcagcagcgcaggcgtctaccgctatacgtctggtccctacacccgcgagctggggaacgacgaggacaaataacacaatcaataggttgcctgttgcctgccaactgcacgccagagcaattccgtcagttggtggataatctggccgggcagctgatcgctcgtggaatacactcagtaagtgacagccatgaagacgcatttttattgcgccttgccgatcaattgacccggtttcctgaatctattgttggtcccttatccgcattcttgtcacccgcgcggcctttgccgttggccggtatcatgttcggatctcaggtccaggagctctcccatggcgcggatcattactggcggaaggataaccgctgggatgttctgcttgagtcgcttgcgacgttacccgcgggactgaaggcccataaaacgggttattctctagcaaaaatcatgaccgttatcagcgcggtgctgatgttgttgtggggaggcgctatgttcgtctcttttgcggccaaccgccatttgctggtcacagcgcaggagcaggtgcaacgagccgcagcgcaaaaaccgccacttgccgaacgcctgcatgcgctggccgccgtgcagaaaacgctggctcaactgacataccgcaaagcgcacggggcgccttggtacgcgcgcgccggattaagccagaatgatgatttgctggcggcgctctacccacgctacggcgtcatggcgctaccgctggttcgtgatgcggcggcggaacatcttcagcagcagttacaggctttcgtgcaattgccgccggaaagtccgctacgtgaacggctggctaaaaccgcctataaccaattgaagctctatctcatgctcgcccgcccggaaaaaatggatgcaggctggtttgctcgcgagttgatgcgcaactggccgcagcgggatggcgtgacggacggcttctggcagggccgcggaacgtctctactgagattttacgcagccagcctggcgttacatccgcagtggcggttgccggccgatcccacgctggtcagccaggcccgtacactgttaattcgccagttaggtaaacgtaatagcgaatccaccctctatcagcaaatgttggcgcaggtggcgaaccagtatgctgatatgcatctggcggatatgaccggtgacaccgacgcctcacgcctgtataccaccgatgcggtagtcccgggtatgttcacccgcaacgcctgggagcatgccgtgcagccggctattgaaaaagtggttaacgcgcgccgcgatgaaatcgactgggtgctcagcgataaccagcttccggtagcgcaggcggcgacgccggaagcgcttcgcgaacgcctggcggaacgctattttgccgatttcagcggcgcctggctgaactttctcaatagtctacgttggcagcgcgccgccacgctgtcggatgccatcgatcagctgactctgatggcggatgtgcgtcagtcgccgctgattgcgttgatgaataccttgaatgtacagggacgaaccggacagcgcggcgaggcgataaccgattcgctggtcaaatcagcgaaaaatttgtttaaccgagaagatcagccgcttatcgatcagcaaggcggcctgcgggggccactggatgcgactttcggcccggtgctcgtcctgatggataatcgcgatggcagcatgtcgggtagtcgtttgaatctacaaacgtttctgacccgcgtgacacaggttcgtttgcgtctgcagcaggtgactaatgcagccgatccgcaggcgatgacgctggcgctggcgcagacggtttttgaaggtcgcgcggtggatcttaccgacacccgagactacggtagcctggtggcggcagggctagggcaggagtggcgtggcttcggccaaacggtgtttgtccgcccgatggagcaagcctggcagcaggtgctgactccggcggcagaaagcctcaatgcccgctggcgtagcgcggtgttcgatgactggaaccgggcattcggtgggcgctatcccttcaaaaatgtgagcagcgaggtctctttacctctgctggcgaagtatctcaatgcagagagtggccgcatcagtcatttcctgcagacccggcttaatggggtgctgcataaagagggaagccgttgggtggcggacagcatcaatgcccaggggctgacatttaacccagccttcctgcgcgcgatgaataccctgagccatattgcggatgtggcatttaccaacggcgaggctggaatgcacttcgaactgcgtccgggaaccgcggaaggcgtgatgcaaacaatgctggaggtcgatcgtcaaaaactgaattacatgaaccagatgccgacctggcgtcgctttagctggccggcggacaccgaagcgccgggggccagtttaagttggatcagcacccgggcgggaacacgccagtacgctgacctgaccggggcgtggggctggatccggttactggataaagccacggtgagagcttatccgggcacaggcagtagctggagcctgagctggaaagcgccggatggactgatgctgaactatacgctccgtaccgaagccggcgaggggccgctggcgctgttggcgctgcgcaactttaccctgccagagaccatttttatggtcagcgcagaaacgacagacagtgacctggagagtgaaagccgaggggaggatatttattaa

SEQ ID NO: 98549 - DNA, 1170 bp, Enterobacter aerogenes
atggcctggaatataccggagaaacaaaaattaattgatgtgtcaccagtcgcatggggaaaaatgacactattcttcattgtctctctaatttcgatcgcggttgcatgtgtctcatggtattattttacgcatgatgcgaattctgtcctgtatgcgcttatattatgtgcaagcagtctggcgatacttttgctgttcgccggatggcgttcatttcagcttggtatttgtcttgaaaaaaatgcagtaattaaggcagagaatgctgcattggacaagatttactctgcgtgggcgtcggaatatatcagtattgtagattatcacttcatgttcccggagcaggtgcaagttgagaacctgaaacaaggcggtgagatacacattatcgggcaacaaccggtgatgtttcctgttaacgttgattataatacattattttacgaactgctttcaccactacgttctgttttaattacattagcaaaaaagaataaattgaaaattgtcttccctatggggatgcctcttgatactgccgcatggcaatccttcacgctggcatggcgaaaattagggatgcaggaggagagcattcaaacacctgcgtggatgatgactcattatgctgagcaaattgatgaatggcttaattataccgataataactttcgcttaattatcacttttgaccccctggtttcgcttgtcggtaatggggcaaatagtgccagcgatggtgtttgcgcgtggctttgcgcgcctcctgcaacagataagaatgaacagctaaaggaaaaaatcagaatttatcgtgcgatggcgacaaattccgctgagttaactcaagacctggcagatgttctcaactttcaatcgtgtacgggtattatcgaaaaaatatggattggtaaacttaagaatcaagcagcattaggtcaagctattaaaattctcaatgctaataatggtgaagaaaaagtcagacatcatttcacggaatttatactgggtaggcagggaagaaataatatgtgggcagcgttatctctatcactggcatcatcaggtgataacggttctgtaaatcttattgtgtcagaggatgaggctgggatcgtgctatctaaaataaagatcctggggaagcgcgatgcaaaaatatag

SEQ ID NO: 98550 - DNA, 2889 bp, Enterobacter aerogenes
atgtctaatcatcaatgtgattgtaaggcgcaggggccggcattattaccggtacgttatgctgtggtgccagacagtatcgaaggggaattaccacagtgggcgcggccggcgacgagtgattatccgtatcacgacggctatcattatgcgttacgtgctatgcgccggggatttatttatatctactacccgcatataccttcatgggaggcctggtcggtaagcgatgatggcagcttatggaaacaactttccgctaaaaacgtgcagccgaaatcgcaacctgattgtattaaagggtcctacaatcagggcggcaaagatttcataaccctgcctgcgcatgtgctggaaaatgatatctggatagcgttcagccagcgtcaatggagcaagacaacgctggatagttatcaaaacgacagcgatcgccgcgaggccagaatgcaatgcctgagccaatcgcactgggataggccaacatcaacagcaccagtaacggaagcgacggaagacagtttatcggcggtgcttgattatatctctatgcggggaaatcaattaagtccggcccaactacttccttatgaaggggttgttgatcaagtgagttatttttccaaatatgaatatcatctgtgcgatgaaacgctgccgcaatggcggcgctggcgagcctcgttatggggagaggagataaaagcgggctctgcgataaagccgcagtggaccttatacccctggcggcctaatcgcgcggtaggaagtacgctgcagcaaatgcagcaacgaggggtcagcgctgagggtaccccggttaagccattgatgatggcattacatgatgccacgggtataatccatgaactcaccggttgggctaacggtattttggcgctacagcagaaatttgccgacgagcggcaagtagagttatcgaccctgaatcttattaatggtgtaaggcagcttattatcaatagtaattatccacggttaaccgaacgccttgaaaaaacgcagctgggtcaagccgcaatggatgagacatatcgacggtatcttgaggataaaaaaaaggatggtactgatgtacgcgatattcgtagtcgtgaggattttgaaacctggaatacgcgtggttatatagactccatggcattcagtatcgccgctgacgaacttgagaaatacgactggatgttgaatccaacgcggttgggttcgtttaatgaaaccgtcgatttactgactacgcgggtgagtaacctgttgacctggttaattgagttccgtattgagtggttacagactcccatttttattgccgagacgcaggatttctattcaaacgatccggtagacaatcttagctaccgtgaaatagtcgctttcgcaatctcgggtattgatatcaatcccaacggccaactactgttggatcgctggatagccgaatatagtaccaggagtgcgaataatttagtctggcgaacgcacttttataataatcccgaaattatggccgaagcggaggcattacttacccttgccaggcaggcaaaaactaatgcggtattgccggaacaggtgcttgaattctttgacgctaatagtgttaagctgattaagatttttaaaggctttgaaaaagccacggatgccctgaaaagtaatttagctaagaattccgtactatcgcaaaaagtgctttacagtatggaccaatatatggcgaccgtcggcgcacgaattttttcggctacgggaatcggccgcatactggataatattcgcggcgttattatccatgcgatattttctctttctgcaggaaaatccgtagcgcaaaccaaagcctttgccagccggtatttcggctggatgtatgagcgccatacctatatttccggcagcgttttttataatccggataaaccactcgcgaaggctaatgttaatttggccaaaggtcgttttgacaaactgaatgaaacttttgccgaatatggccaggaacaggaaggcgcagcggtattcaagacgaccagtatcagaatcctggtaactttcttgaatatttatgaacttggcaatctgtatcgtcacagcaagggcgatgccgccagccaggcgaaaatcgccagctccgcccttgtgacgaccagcggaatcatcgatgtagctatgcctgcaatggaaaaggcctggcaggggaaaaatggtttgcagtatctgaaaatgtcgggcgccggttgcacgatgattgcgtcggccattttgcttggcctggatgtagctaaggtgtatcaagaatataatacagaacaacgagaattattccttggtctttatagtgtaaaagtcctgagcgatctcgcagcgatatttaaagcgaatggtaagctgctggaagcgctgattgcccgctttggctgggaaaccgccgttgcttcgcgcggaacatggctgggaagactggtaaagccggcactcagtccactaatagctatcgaatgggtaggattactttcctcctggcaagtgtcgctgctgatcatgctcgttgattatgtcgcgacgcaatactattctcgcgatgagctgcaaaagtggtttgaacaaggcatctttggcaatgcatgtgaaaaaaataccgatgattttactgcagaggacatcagtactgaaatagctcgctgccagcagtcattagaatatgcgctaaataaaatggcggagccgcaagaagagattaaacaagatgtaataattcaggagtcatcttatccactttataaagatccgctagtttctaaactagaggaaaaaaccaaacaggatgaatggaaaaagagatcaccataccctgtttataagggttaa

SEQ ID NO: 98551 - DNA, 993 bp, Enterobacter aerogenes
atgaaagcgtcagtaaattataattatgctgaagatgtcttgcgcttgaagattaaaaataccaagcagcaacttcataatagctttgtcaccaaaaatcagttgtgtgttttaatgatcgacgccgcgatcgccagatttcgtcagcaagaacattcgctatatacgcctctactggcaagagaatatatcagagttcctgttgcgcctcgttatctgtcagcggagttcgaaccacgtttaattcccctagatttatccattactgatgatgtgctgttgctggagatgagcgcagagctggcttgtaatgaaattcatccgcaacgtatcactcaaggatatggccggttaatatgtggctggctttcttgttcgacttcgccggaggcattagcacttcatttagcgaaaagcgcgctgcaggagcgtgaagggcaggatacgctgctacgcttttatgatcctgccgtcgcgctgccgttatggtcattattagataactggcagcagcaacgtttatttggaccattagcagcctggttttctattgatggagatggtcaatgggttcaaaggaagggggcggaacaacagaatattagattatcttattctctgtcattgagtgaagataattggcgcgatattcagtttatcggcattgtaaatcgcattatgtgccaatatcgctattcatatattaatgagttgaggttttccgagcagcaggtatttacccggattattccggcgctccgccgtgcatgggaatttccatttcatcacccacaagatttgaccctttatggcacgcatgctttaaccatatctcccgattttgatcgccatatagatttattgcaggcgcttcagaaaggcccaatagaaagcaatcaaacatatcgtgcaagggtggcaaatttcagtgagcgccaatggcagcgaataaaggaagagtgcacgcaatatcaataccagggcgaacaataa

SEQ ID NO: 98552 - DNA, 2379 bp, Enterobacter aerogenes
atgagtttgatggatgcgctgatcggtgaacgtacaattgccctgaatcgctatcagttggatataccctcatgcccatcgccgcttgatgtggaatcgtttagcggcacagaaatgttaagccagctttatcattacagcatcagctttaccagcgcggataaagatattgatgtcgcgcatatgctgatcaaacccgcctcgctgactatggggggcggtattctacgaagcctggcgcaaagtcggcgggttcacggcgttatcaccgccttcagccgcatcagcagctctgccgatcaggctgcctatcagatcaccctggaaccgtacttatccctgctcgataaacaatttcgcagccaccggtttttcgttaaccagtcggtgccggaagtggtcgtgcagatcctgcaggaacataacctacacggctgggagtatgagtttaatctcaaacataattatccaaaacgtgagcagataaaccaatatcaggaaagcgatctggcattcattcagcgcttgctggccgaagtaggcatattttattacttcactttgcagcaggaggcgcagagcgaagttgtgcattttgctgatgcgcagcgcgcgttgatctttggtaaaacacttccggttaatagcccatcagggatgagcgacagcggagaagaatcgatttggggactgagttcgacgcataacgtggttgaagcgagtgttatcacccgggattataaccaccgagacgcgcagagcatccttcagtcagcgcctgcggacatgactcgcggggatggcgaaggcaacacgtatggcgaagtgtatcactaccagccgcgtcatctggcgcgcggagacaaaatcgagccgcaggtggaaaccgccaacttttacgcgcgtctcgaccatgagcgttttcttgccagtcaaacgttagtcactggcgttagcacggcgccatggctagcgccggcacaagtcctgactctcattgataatctgcctccggctttacctgcattattgcaagaccctctgttgatcaccggcgttgtgctaagcgccagccgcaaagacgcgctgcaggtcagcctgcaggcggtaccataccgtgagacaatctgttggcgtccgccgctgctaccgcgtccattggtgaccggcacgatgacggcacgagtgaccagcgctaaaaccggtgatatctatgcctggcaggacgcctgcggattgtatcgggtgaaatttgacgccgatcgggatggaaagtcgccgggacgggaaagtatgctggtgcgcctcgccaaaccttacggtggtgacgagtacggttttcatttcccactgatccagggaacggaagtggcaatcgccttccatgaaggcgacccggaccgcccatatatcgctcatgccttacacgattcccgccatgttgatctggtgacggaaaagaacagtacgcgcaacgtgatccgcacgccgaccaacaacaagctgcggatggaggataagcgcggtgaagagcatatcaaactcagtaccgaatatggcggtaaaacacagctgaatctggggcatcaggtgaatgccgagcgcgcgctacgcggggaaggctttgaactacgtaccgattcgtggggggcgatacgtgcggggaaaggcctgtttattagcgccgatctgcaaccaaaagccggagggttacagctggatatgcaggctgcgaaggatgcgttgcaggctgcgcttcaggacgtggaaggtattcgtgctgccgccgagaaagcaaaagctgaactgacggatattgaaaagcaaaaacaactactgaccgaaacattagcggaattaaaacaacaggcgctgttactgtcagcccctgccgggattgcgcaggttactcccgccactatgcagctgtcatcaggcgataatttaattgttacttccggctcgaatgcggatatcagcattggcaagaaattccgtctcggggtgaaagaaacgattagtttatttgcgcaattgatgggaataaaaatttatgccggtaaaggtaaagtcgacattcaggctcaaaatgatgcactggatcttctggcccaaaaaacgctcactattgccagcaaagacgaacaagtgattatttcggcggcgacagaactgttgctgaactgcggcggcgcctatattcgcttgaaaaatggcgatgttgaaatcggcgctccaggtagtcttcgcctgaaatgtacaaacctgcaaaaaatggcggctgcgtccttgcattccagcatagatctccctgcaccctgtgcttcagccatggataccgctggcggaactcaaagtccaacggtaacctttaattaa

SEQ ID NO: 98553 - DNA, 1710 bp, Enterobacter aerogenes
atgcgcattggattccgtggtctactcacggtcgttgccgccatactggcgctgtggctggtgctgggtttctgctcattttccgccggtaatcgagcggcgctctgcgccggtattttattgatatgcggcgccgagctctggcgccagcatcgtcgacgtcatttgctagcgggacagatctgcgtagttgacctgccgccggagaatttcctgggggcggtggtgctggtttgcggcgataacctcactttatttccagctaacacggcttaccgcgaaactcaaaaagcctggtatttacgggcggcaaatacggaacagctccccctgctggcgcagcgtctgtcagcggcgcgccctgcgttggtatcgcaggtttccgtactactggcaatcaccccggaatctcacgactgcgctgagcgctttacgcagttcttgcagggatggcgtcgtagtattgggctgtgtcggacatggttgaatggcaaaccgccggtctggtgcgtgtcctgggtttcgccgccatgcctcgagaacgcagacgagcaccgctggttcacggtaacgcctgaactagcgggaatgcaggtgcgacagaatgacgatgtggcggtaccgattgccgaatggcagcgggcaaacggacatgacgcgtcagctcttgggcacgtactctggttagacagtatcctggcgctaatggcgaagcatatatttcaacctttgtccgtccggcagggagagcttcctcccctgggcttctccgccgttggtatctgccttacgccggtagcggcatgcgccgggaatatgtggcaacagcagcttgctgaggtgacctcgctctccccggcatgcgctaaaacaagcggaatattaccgcttccggatctccttctttcttatttaccccgcaatcacgggatcggtcgccgcatgcaggacgcgcgcctgtttgggggggcatgtttcctctttctggcgctggcaatgctggcatcttttattaataaccggcggctgctggatagcattggcgaccatctggctgcgtatcagcagcttagtggaacaccacctgcgcccaagctgttggcgcaacagcgtctgcaggccgacagccgtttactggacgattggcagcggcgcggcgagccgctgcgttacgggctcggactctatcctggggcacggctgataccgctgcttgaaaccgcgattaataactggacgccgccgccgccgccccggccagtaatcaaaaagattatacaagggccacaaactatccgtctcaatagcatgtcgttgtttgacattggcaaatggacgctgaaacccggctccaccaggttgctggtgaattcactggtgaatattaaggcaaaacctggctggctaatcgtagttgccggacataccgatagcgtcggacatgatgctgcaaaccgggcgttgtccttgaaacgtgcggaatctgtgcgcaactggatgcgtgacaccggcgatgtgccggagagctgttttgcggtgcagggttatggcgaaagccgtcctgtcgccagcaacgacacgccgcaaggccgggcgctgaaccgtcgtgtcgaaatcagtctggtaccacaggcgaccgcctgtctggcgtcagacaacacacctgcgccatctcaggatgatggcgcgtcaaaaaatgaaatggagtaa

SEQ ID NO: 98554 - DNA, 654 bp, Enterobacter aerogenes
atgaaaacgcctgatatcgatatgatcaatagagtcttttatccaggctggttgatggttagccagttacgtaacggtcagcagattaaagacggcgatgcgctgtatcgccgcgcctgtcggtggatatctgaggctcgcgagtctctgacgaaggccggggttagcacgacaaacagcgaacggatgctctatgcctactgcgcactgcttgatgaaagcgtgttgaaccgcgacctacaggatgacggctatcgccgttggcgcaaggaccctctgcaggcgcaattcttcgggactctgaatgccggagaagaattgtgggatcgcattcgtgcgattttgcgtgaacctgccgctgatgtcatggtgctaacctgcttgttcagaacgctacaactcggttttgtcggagcatatcgcgccgttgacgacgaacggcgggaggatgtggtacggatgctcagccagcgggtaccgccattctcactgacgcaggaggcgccggtagtggttcgggccgcggggctacgcagcggtcgccgccgctattggctgggctgggtagcgggcatcgttgtactggctgggttatggttcaccttctcgtctgtgttatcgcaaatggtattacagatagcagggcgaggttaa

SEQ ID NO: 98555 - DNA, 1341 bp, Enterobacter aerogenes
atgaagatttaccgtccgttatggagtgatggcgcctttctgacgccgcaacagttccagcagcagtctcgttgggaagctcatgttgcggatacggtctcaaagatggcgctaggttttccctggggggtactggcggctgagtttgatgaaggtgcgctggcgttatcccgactcaatgccactcgtctggtggttcgttttacggacggtacgctgattgacaccgatctggccgataccttgccgccggtctgcgatctctcgggtctgcaacaggaaagcgttgatgttttactgtgcttaccgctgctcagtgccagcggcggtaatctcgacgacggacaagagagcgttcgtccgtatcgttggcgatccgagagggtaatcgtacaggaacttgcgggccacgaacgtagcgaactggcggtattgcggcatgggctaacgctacgtgtttccactcaggaaaacgacgcatggttgacatgcccggtcgcgaggctaatccgcaatgcgcagggagtatggactctcgatcggcgatttattccgccgatgctggcgctatccgcttgcccaaccttggtcggcgaacttggcgatttactgcatcgcctgcagatacggcgtgggcgcctgatggctatgcgccgggaaagtaacgaacggatggctgattttgcggtagcggacgtcgctttgttctggttgcttaacgcgctgaatagcatggcgccggtgctgaccgaattacaccaaacgccctcgcgtcatccggagttgttataccgtgaactagtaaggcttgcggggagtttgctgacattttccctcgaacaccacgtggaggatattcccctttaccagcaccaatctccggagctagttttcccgcctttgtttgcgctactggacagcttacttgaggccagcctaccgtcccgtgtcatcgccatcgcgctggagcagggcgcggacagggagatttggcgtgggaaattacacgatccgcggctgcgcgaaggcgcggacttctatctgtccgtacgctcttcgatgccaaattaccagttgcagaatcgttttccgcagctgtgtaaggctggtagccatgatgatgtgtcagaagtcgtgaatgttgctctcagcggcatagtcataaaaccgttgagtcatgtgcctgctgcaattcccttacggctggaaaaccaatactttgcgttggatctgtcgacagatgcggctcgcaccatgctggaagctggaaactgtacgttttataccccggagtctctcggtgaagtgaaacttgaactgtttgcggtgctgcgctcatga

SEQ ID NO: 98556 - DNA, 492 bp, Enterobacter aerogenes
atggctgattcattccagaatgaggtgccaaaggcacgtatcaatttaaaattggcgttacataccggaggggcgcagaagaaagttgagctgccgcttaaactcctgaccgttggcgatttcagcaatggcaaagaacatcggccactagctgagcgccagaagctagatatcaacaaaaataattttaacaatgtactttctgaattaaacccggaggtcaacctcactgttgcaaatacgctattgggagacggttcagaggaaggcattaaactgagcttttccaatataaaagattttgaaccagagcaggtggcccggcaaatacctcaactccgtgccatgctggcgatgcgtaatttattgcgtgatctcaaatcaaacctacttgataacgtaactttcagaaaagagcttgagcgaattcttaaagatccggcactgtccgacgaattgcgcgctgaaatgaatgcgcttgccgagaaataa

SEQ ID NO: 98557 - DNA, 567 bp, Enterobacter aerogenes
atgcgctttaccgacgtgcgccactatgatgatggaggctttccgcgccactcatggcgctatgagtatgacgtcttcgacaggcgcatccgcaagaccgacgaggaaaccggtaaatccatcctgttcttctggcaggacgaccggatggtcaccgagtgtgacgaagcgcacgcggattttactcccagcctcatgtttaaccggcacacgaaagccaccgactttgactgcaccagctatcggtacgagccgggctgcagcttccgccctctggctcagcttaaaggacgcggcgtcggcagaaccgtcagctactacgtcaacgaccatatcggtataccgcaggagctgctggacgaggacggcaacgtagtgtggagtgccatatatcgcgcctacggccatagagaaatgcaggcgggtaactgccaaccactgcgtttgcaggggcagtatgccgatgaagaatcagggctgcattataaccgctaccggtactataatccgttagcggggaggtatatcagtcaggatccgatttcgattcggtttgaatacctatag

SEQ ID NO: 98558 - DNA, 174 bp, Enterobacter aerogenes
atgttgacccaacaccacctgccggaagacccgtgctggaacgccctgtacgaggagttcagctttgacggcgacgacaacctactgggcatgaacataccgcccgaaggtggcgagcatcaggcgaaagtcaaaggcgaccgactgctgctacagggcagaccaccactatga

SEQ ID NO: 98559 - DNA, 1731 bp, Enterobacter aerogenes
atgaaatttaaattcgccacattactcacagccgccacggttttttactcttatcagagcgttgcacaaagtcagcaatcgcctgatgtctggtcagttgtcgaacagaaactgcaaaatgccgtccctttaaatgaaaacaccacttttaaatcgcaggcagcctggtttgaattacacagggaactgtttatgtacggcccgatgagccgtgcggatgcattactgaaaaagctggacacactgtcgattgatgcgaagttttcgctaaaccatgaggcctcgtggatcgctgaaaataatagcccggatgccgcgatggttttcctgtccaaaattggtctcgataaaccgtcgagcattaccgcctacgagagctacgttgatggctgggttaatcgcaaacagcctgaaaaagccttagcccttcttagcaaaaatgccgacgcgaggaatttttatttagccacggttttagaatcctggcactcagagcctgataaaaccgccgccatttataatgaaaattacgctgataaaattgttgttccttatattcagctaaaaatgctgcttattattgcaaagcagtaccatgccaagggcgacaccgcaaaggcgttggtttacgcagatagagcgctgaaaatgtttgatacggctattgctcaacaaccgagtgttgaagcctaccgttatcaggagtatctcgacctgatggagatctattacgccacaggtaataaagagaaggcgatggcattgtctgcgagattgcgcaaagcaaccggcaataaaggaagctatttccagtattcattaccgggattgctctctttttataagaaaaacgagctgacacagaattatcaggagacgctttcaacctatgtgacgcaggtcgataaaatattcaattttgccccttcgccgcgcattgaaatggagctgattgatttattaagcaagcttgatgatgttgcgcagatgaataagcgtatcgatttgctgatgagcgcgccggaatatacctgctacgacgacaggtattgctacgagtacaaaatcaaagcgctgaagaatctctttcagcataagcagaatgctgtggcggaaaagcatatcgcaaccctctccgccgaggcgcaaaccctgacgttcgccgaatgggaagatgcaacaaatgaaatgggtgatgtactcaaagaaattggtcatcctgaggcagcgcaaaaattagccgtcagcgccgaagcaatttacctcagccaagaaaaagcctggcctgatgaagatatgtcgcgttcctttcaaagacttgcggagctttacggctatggcaacgacacggtgaatgccaaacgggtattacaccagcacgttccctctctcgaagaggaggcgatgatcgaccactacatgaatgcaaaacagtggagtcaggcaagggaattgatgattaacgcagatagggtcgataataaaaacctgatgctgttacgccagatttgtgctgaaaacacgcccgagtgtcaggaacatattacctttacgctgaaaaaattaaccacgcaggcgtcgattacccgccaggacgacaccggtaatcagcagctttatcagattgggaatatttttcacagattgggtatcataccgggagcggaacagcaggcgctgattcaggcgttgtataacaaggccgcagagcctaaaaaagccacgccttaa

SEQ ID NO: 98560 - DNA, 2169 bp, Enterobacter aerogenes
ttgaagaaaatattcataacaattatagtttcattatattgcgcgaatatatgtgcaaaacaatcccccagtacagaatccaaacccgttaatttcatcgcacaaattcaaaatatcgattttaataaaaccgccattagcagtgatctgaaacttttactcgccgaccgttattattttaaagataaaacaccctgtaatactaacaccctttctgcgcgcgcagaatcaatgggactgacgacagaagaatatattaataaaatacgcagtttaagaccggctattctcgatgaccgttatttttacctgacggtcgatcagtgcgatgctggcggcacgcccatgctgactggaatcgagctatgtaccgaagcgctgtgcggtgccaaatacatgaaaagatcgtctgacttgtggctggatgatgaactgcaaccgacggttaaacgtcaggcaacaacagtagtccatatgcccctcccctatgacaaagagaaaaaattatggaaagtcaccggctggtatctggaatcctcagaagtaacaggggaggtgatgcagagtaaacagatagcctttgaaggctataccaacgaagaaaacttcgctaaccgacaacgtgtttctgtatttaaatctttctatgaaagcggcaatctcaaaagtatttatcattataatgcgcaaaataagcgtgacggaaaagctgaaacttactttgatgaaaaagacaaaatagcagaaacgctgacgtttaaagatggtcaacccgaaggggaatacatcgtataccatgaaaacggagccgttgaaagcaaacgttactttgcccaaggtaaaattaaagacggcgaatgtccacatttttatgataacggtattttaaaacaaaaacacagctatttaaatcagaaactggagggcccggcatttgaatacttccctgatgggaaaataaaggagaaatattcatacagtaaaggcaccattgtcggcaccagtacggaatattattctaccggtaaaattcgtggtgtttaccacagaaataaccaaggtgaaaacaacggaacgttcgaacaatacagtgaagagggcaaactcctttctaaagctacctataaaaatggcaagcagctttctgctaagagctggtatggaaatgggcatcccaaagaagaatcatcttttgatagtgaaggccgtaaacatggtgcggtcaaagaatggttcagcaacggaaagcctgcctcatccaaaatgtataaacataatgtgttagacggggatttcgaaaagtggtacgaaaatggtcaccgcgaatcagtctatccctataaaaacggtatgctgaatggggacgctaagcactggaatgaacagggcaaactcacctataccaccgaatataaagacgataaaaagcagggagccgatcgccgctggagcgaacgtaccggcaaacttgttgaagaggttatgtttgctaatgatgaaagaaacggcctgaaaagagagtttaacgatcgtacgggtaaggtcttaagtgcgctgccctatgtcgatggcgacaaggaaggtacagaagaagcctatgatgaagacggcataaaatacatcagttgttaccacaacgatgaagagctttcaaagctatatgcgccgactgacgtcaccaataaggcaaagcagggtgacagcactgcgcaatatcatttaggtaagtatgagtttgaatgcacaaactacgatgtggcgatgaaatggttaactcagtccgcagagcaaaatcatcccggcgcgcttctctttttggcctatgcgtacaacgacggtgatggcgtaacgcaagatagcaaaaaatatctctcctatttattcaaagcggcagagcttggagaaagtgatgcgcagttagaagtgggatatttaaatcttatcggcgaaggaatgccgaaaaacctgccggaagcctataagtggattaaaaaatccgctgaccaaggaaatgctcaggcgcactataaccttggactcatgtacaggaatggtgatggtgttgagaaagacctcaacaaagccaaacttcatcttacagcagcggtaaaaggcggcgtcaaacctgcactggcagccttaaaggaattaacgcctcaaactaagtaa

SEQ ID NO: 98561 - DNA, 492 bp, Enterobacter aerogenes
gtggcattaaccgataccgctatccgcaagatcaaacccaccgagaaatccttcaagattaccgacagttcaggactctacctgctgatcaaacccaacggctcaaaactctggtatatgaagtaccgcattggcgggaaagaaaagaagctggcctttggcccctacccggatgtttccctgttcaaagcgcgtcatctatgcgacgccgcacgcgccagagtgcgtgaaggggccgctcctgccgctgataagaagatcgcgcagcagaaaaagaaaaacggacataccttccgccagatcgccatgaactggcacgccgatcaccgacgctggtctgcgcattatgccgcgactatcaagcgcaggctggaaatatatgttttcccggatatcggagacagccttatcgttcagatcgctacttcagcagtacgcgagagttcagggacacaatatctgtcttttttaaccagacgctgccggatatag

SEQ ID NO: 98562 - DNA, 642 bp, Enterobacter aerogenes
atggatagatcattattatttttttattgcctggctggatttttcctgacttatttcttattcaaattagcaaaagacaaatataaattacaaagcttaatgtttatcttttcgctcataataagtttagttatcgcatcttccttttcggctttatcaacaggactatggtttttagtagtaatagcatcgacatttacccttttatttttatccgggatgttcatggcgctactaaaacagtttgtaatgcgccgatacattctgcgttgtgttgataatttgaaacggctatctcctaccgaaatggttgaatctttaattaaagaccataacaaaacacagtggtatgttttatattaccctgtagacggcgccatggaaattggcgttaatttattcgacgaaaaccctattattggcaaaagattatacattagaaccatgacaaaccgccaaatgtactttattcctgaagatatctccggcactatagatttacaatctaatatagcttgtacgttatatgaattttataccctcaccccgcaaaccaagagtttaattgaagattatttgaccagaattaaaaatggtcatttgcagccctggctgctaaatgcagaacccgatgaaaaataa

SEQ ID NO: 98563 - DNA, 540 bp, Enterobacter aerogenes
atggaaacagcaaaatgcttacagcggttggttatgccaaacgccaggtttggtgcatctgaaagcatgtacatcagagggagccttttttcattttcggaaaatattattaccgtatttcccggagggaaaatttcttttgatacctattacaatggtttttccactattctctggaaagaaaaatgcggaatacacgatcttgcattcaatgcatcaggcactggctcagcaaaaatcagcgccttgcttattacagaagaaatgtcaagatatgaactggcatcagcaaccgtgtcgctgaatagcctgtctcaagaaatattcactctggatttggctgatactctcaatcgcggcattatatatatagaaataactccgataaatgggattgtctcccttaatagcggcgaatggtttaccaatcaatctccccgcagaaaagtaaagctcggaatatcaataacacattttgacagaaaaaaaatatgtcatcccctcaatgatgagaataaagcgagaaatactagaaaatga

SEQ ID NO: 98564 - DNA, 753 bp, Enterobacter aerogenes
atgattcgtcgtagcattgccgtagttttgctgagtttatcaataggtccgggcgcatgggccgctagctcagtgctggtctggcccatttttcaaaccatcagcgccaacgagaaaggctctgagctgtggctggaaaaccgcggtgctagcgcggtgaatttacaactgcgcatcttcggctgggatcaaaaagaatccagggatgtatacgccgatcagagcgatgtggtcgccagcccgccctttgccaatgtgcagccggggcaacgtcagcttattcgcctgatgcgcgtgtcgccggtcgccagcggtgaggaaaaatcatatcgaattgtcattgatgaaatccctgcggctcagccggtaaagcagaccgataaaagctctgcaggcctcaatatgcgcatgcgctatgtgctgccgctatttacctacgggcaaggagccgagccgctgaagctggaaagcagcgttgagccgatacgtacttcactcaactggtcccttagcggccaaaatctgtgtattaacaatgccgggaatcagcacgccagattgagcagcgtttactggtcaacatctgcagggaaaccgcagaacgaacaaacccaggggttattgggttatatactggcgaaacgtcgcgtctgtttcccgacaccagcccgcgcggcgaacgcatccggcatgcgcctgtatgcaaaattgacagataatagtcaggcggtggaaatcccggcagcgcgttaa

SEQ ID NO: 98565 - DNA, 519 bp, Enterobacter aerogenes
atgctgcgctcaattgggctgttatgtgtatttatctcgtcaacaagcgtattggccgacactgcgcagaaaagttttaaagtgacggcgcagattaccaccggctgcctgcttggcagcggaagcggaacgcctgcctctgactttggcactttaaactttggttctatgtcgtcgctgtatagcaacgtggatgtcgccagctccgccggagctggttctatcatcgtggcgtgtacgccgggtatggctatcaccgtagcgctcgattatggcgtcaacggcggctcatcatcccaacgctttatgtccaacggcagcggcaatacgctggcgtatcagctttttcaggactctaaccgctctaccgtttggggtaccggcgctcaggcctacagcgtcgcgtccttccccaataccacacaaacttatacggtttatggccgcctttttgccacgaatggcttcccggcgcagggttcatataccgataccgtaacggtcacattgacctattaa

SEQ ID NO: 98566 - DNA, 573 bp, Enterobacter aerogenes
atgaacgtcaaaaccatttcgcgtagtctgcttggcggctttatcgcaacggcgctcctcattcaggcgccatgggtccaagcggcagggctaaccaccggcaccttatccggccaggttggcgtgcagctgactattggctccggctgtaccgtcaccaatggttccagcgcaaacggcgttaacagctggggcacaattgatttcggtacttacagcgatctgattaacgctattgatagcaaactgatcggcagcggcggcgccaacgcagtttctattgtctgtagtaacaacctaccggcaacgctaacgctaaataacggtctgcatatgggtgcaggcacgctacgtaaaatggaaagcgccaatggcgatcaaattgcctaccgtctttactcaaatagtacccgacaggccgaatttaccagtgccggaatcggcattactggaacaggtactgctcaggagatcccaatttatgctcgcgtgctgccagcagaccaaggaggcgtaaccgcccccgctaccggtttttaccaggatatggtgaccgcaacattaacctggtaa

SEQ ID NO: 98567 - DNA, 225 bp, Enterobacter aerogenes
atgaacagcgctttcccaggtgagcgactcaatacccgtattccttcactgttgtcactgcatatcgaaattgaacagagggccgtcaaactgacgcttaaatcccaggccgttagtcgttccggtaatattaaagcccacccaatattcgttcaagaaaaaataaataccaataacaataattcaagtttttctgtttctgagtgccgttcgccagtgagttag

SEQ ID NO: 98568 - DNA, 144 bp, Enterobacter aerogenes
atgttttttggtcgttactgttcggggcttgatgcgctgggaggcagcgtcagtagcggcctgcgtgaatccacgcttgtaaaatcgccagatggcagtttaagtccattcctatatcagaaaaaatcattagcgcgaaaatga

SEQ ID NO: 98569 - DNA, 126 bp, Enterobacter aerogenes
atgatggttaccatcatcggcaccaccaccatcatcatcatgatcgaggatggtgacagacgggatcacgcaaaaggcgaactagtgttcgccttgttgcttttagtcctgacggtcagaacctaa

SEQ ID NO: 98570 - DNA, 1023 bp, Enterobacter aerogenes
atgtcagacttcattcttgcccgcgtctcacagacgcttgctaccgaacgaacgctcgaaacgttggtgcgacaactgctggaaatgctggagctggtgactcgtatggagtctacctatctgacacggattgatttagaagcgcagcgccagttagtcatgtatgcccacaacagcagcgaaatgcagatcccggaaggcttttccgttccctgggacgagtcgctctgcaaacgcgcaatcgatgataactgtatattttgcaacgaggttggccaacgctggcgctcctgcaccgccgcgcaggaactcgggatcgccacgttctttagtattcctgtccatcttgccgatggttcgttatatggtacgttgtgcgccaccagccgcgtcaaacagccctataatcttgaaggcgagcaggtaatgatcctgttcgccagcctgatctcccattacgtggagaaagagacgctggttcagcagctgcgcagcgcgaatgcggcgctggagatgcactcctataccgatgagctgaccggtctggctaaccgccgcgcgttgtttaaacatcttaaaacgctgtttactcaagctcgcgcccagcagcgcaggctcctgcttatttttatcgacctcgacgattttaaagcgattaacgataaactgggccacccctgcggcgacagttttctcatccagataggtgaacgattaagtgccaacgtacgtaacgaagataccgttggccgcctcggcggcgatgaatttttaatcatcggcccggcgcttgaatcatctgagcaggaggaatttattgcccacctgcgccagcagcttaccgggcgttaccgtctggccggacacggtatagaataccctggcgccagctttggagtgatcgaagtcgatccgcaaaatatggacgttgagcaggcgctgcgcgcagcggatgaagccatgtatcacgacaaaaactcacgccgcaagctgaccattttcgatattgaccagaaagcataa

SEQ ID NO: 98571 - DNA, 264 bp, Enterobacter aerogenes
atgaaaataacaagaatggctgcgttatctgtgatgttgctgctggcggcgtgcgctaccagcgtaaccgaagaagaaaaaaagattgaatatgacgatattatcaaagggctatcggtctcgggagaagagattttatatcggaaagataaaactactgatttttaccgttatcaatatttggtctatcagtcggcaaactatcattctcgactaagccccaatattaaatcgagtggtattgctaattataaaacagcgtag

SEQ ID NO: 98572 - DNA, 207 bp, Enterobacter aerogenes
atgctttggcgacaacaggccattaaaaccaccaacctgttgttatataaatactttacacattttaaggcgccgttcgtcagcactgttaaacagcgcgcgcgcctgcgtgggcgaacatactacactaacttcaaaatgaatgcttcactgcgatacatttctctgtctatggattatcgctcgccgtcaatgaacttgccttga

SEQ ID NO: 98573 - DNA, 1263 bp, Enterobacter aerogenes
atgctgcagtttattattcatgatgtgttgggcacaccagcaatactggtcggtctgttttccctgatcggcttattattgcagaaaaaagcagtttccgacgttatttccggaaccctcaaaaccattatggggtttgtgatattaacatccggggcggcgattgtcgccacgacgttaacgacgtttagccagctgtttgagcactccttccatattcagggtgttgtccccaatactgacgccatggcggcgctggcgcagaaaaactatggtaccgcgacagccatgatcatggtgctggggatgttgtttaacattgtccttgcccgaattacgccgctgaaatacatcttcctgacgggccaccacacgctgtatatgtcggcgatgctggccgtcatcctctctgtcggtggtctgtcgccgttctgggtggtactggtgggggcggtgatcctcggcatcatgatggtggtctctccggctattctgcagccatttacccgcaaaattaccggcactgatgacctggcgctgggccactttggttcaaccgggtatctgctgtcggcgctggtgggaaaagcgatcggtaaaggcagcccgtcgattgaagagctgaaggtgccgaaaacgctgaacttcctgcgtgactcctcggtggccatctcattgacgatgatgatcctgttcctgattctggtactggtcgcaggcaaagcgtttgttgagaccagcatcagcggtggtcagaactttatcatcttcgccattatccagtcgctgaccttcgcggcaggcgtgtggatcatccttgcgggtgttcgcatgattattgccgaaattgttccggcctttaaaggcatcgccgacaagctggtgaaagacgctaaaccggcgctcgactgtccaaccgtctttccgttcgccccgaacgcggtgatagtcggcttcctgtcaagttttgccgctggtctggtgagtatgttcctctgcccactgcttggtttaagcgtcattgttcccggcctggtgccgcacttcttctgcggcgcgacggcgggcgtttacggcaacatctgcggcggtcgtcgcggcgcggtggtgggggcattcgctcacggtctgttgatttcttttttgcccgcgattttgctgcctctgatgggcgaccttggttttgcatccaccacctttggcgatgcggactttggcgttgttggcatcattcttgggcatgtcgtgtcactgtttaactaa

SEQ ID NO: 98574 - DNA, 951 bp, Enterobacter aerogenes
atgtatgatttaagccatatcaatatccgatcgctcttcattttcattgcagtgtatgaagtgcagaacttttccactgtggctcgtcgcgaaggcatttctgcctctcaggtttcacgcgtcattcatcagctagaagatgcggtcggtcagcaacttttctatcgcaatacgcgcgccattattccgacagagaacggtcatatttttatccgttatgttcgggcggttaccagtagcctggacgctgcccgacgggaactcaatgaaaggacgcttgagccttccgggctaatacgcataaatgctcccgttttttttgggcaaaagcatgtcgcacccaaattggcggggctgacggaacgttacccacgcctcagtattgagctgacgttaactgatgattacattgaccctcataaagatgctgctgatgtcatttttcgtatcggtgagcttactgactcatcttttcatgcacgcatttttggacagcagtgctatcgcctggcagcatcaccggcttatcttcaaaagtatggcgtacctgataacccagcggatttaagccgacataagtgtctcgtttaccgtggttcatccggaccgaatcgctggctattgcgtcgaaaaggtggagagtggatacactatccggtctctgcgttgatgtcttctaataatgccgagactttacttattgcagcattgggcggtatgggaatagttctttttccggactggttgattggcgaaaccctacagagcggcgagcttattgaattaatgccggatatggaaacggcgattaagaccgagccacaaaatattgctgctatttatccacatactcgtcatccaacgttaaacgtcagggccgtaattgattattatgtagaagcattcggttcgccgctatactggcagctaagcgatactctttctaagtaa

SEQ ID NO: 98575 - DNA, 435 bp, Enterobacter aerogenes
atgcaattggtactgattttgttagttatcgctggcggtatggggctgtcagtcgaggcgggaatactagggccgctagggggagaggttggtgatttatgggcaacgttcagcatatttggcgtaggcgctgcactgactttcctgctgatgctttttttcagcccacgcaatagcccgtcatttttctctttgcctgggtggcagctacttggtggcgtactcgggccagtttatgtcgttattctgaccgtggccacgccagtcattgggatagcgatgacgatgatcggtatcttagctggtcaggtatttaagagcctgataatagaccattttggtttactcggtacaccccccagaaaaatagacagtaagcgaattattgcccttatttttatcatcgctgcattaattctggttgccagaggataa

SEQ ID NO: 98576 - DNA, 483 bp, Enterobacter aerogenes
atgacatttattatgatcgttttagccgttataggcggctccatgttgagtattcaggcggccattaatggacaattgggtagtcaggtaggggtatttaaaagcgcgttcctgaccttttccgtaggcgcaattatcaccgctttgcttattttcttttttgaaccaaaacagttggttacactgatggatgtacctaaatggcaactgctgggtgccatgtttggcgtaccctatatcgttatcatggttttagccgtacaacgaatagggaccgcgattgccacagtcgccgtgatcttcggacagttaaccatgagcatgttaatcgataactttggctggttgggaaatcaatccatttcgttttcgatgagtcgtctgggggccatcctctgcttaggtatcgcgcttttcttcatttactcaagtaataaagtaaaggcgaccgccttaaaacaagacgttctgtcatcgagctaa

SEQ ID NO: 98577 - DNA, 852 bp, Enterobacter aerogenes
atgcaaactgtaaaactgaacaacggtattgaaatgcccctgctgggctttggtgtgtttcagatgtctgatgccgctgaatgcgaaagagccgttatcgatgccatcgatacgggataccgcctgatcgataccgccgcgtcttaccagaatgaaacccaagtcgggaatgcactgaaacagaccggcatcgcccgtgacgagctctttgtaacgaccaagctatggcttcaggatactcattacgaaggcgctaaagcccagttcgaacgctccctgaatcgactgcaacttgattatgttgacctgtacctgattcaccagccttacggtgatgtccatggggcatggcgtgccatggaagaattgcaacaggctggcaaaattcgcgccattggcgtcagtaacttccatcctgaccgactggccgatctcattgccttcaaccacgttgccccggcggtaaaccagattgaagtaaaccccttcaaccagcagctgcatcccgtgccgtggatgcaaagccggggtattcagccggaagcctgggcgccgtttgcagaaggtaaaaatggtctgtttgagcatcccgtattaacggcgattggccagaagtacggtaaaagcgtgggacaggttgtgctgcggtggattttccagcgaggcatcgtttcgctggcaaaaacagtgcgaaaagaacgcatggaagagaacatcaacattctcgatttcgaactgagtgatgaagatatgttgcagattactgctatcgacaccgcaacaagtgctttcttctcacaccgcgatcctgccagagttgaatggttggccggtcgcaaactggatgtttaa

SEQ ID NO: 98578 - DNA, 990 bp, Enterobacter aerogenes
atgcaaaaacgttatctgggtcaatcaggactcgaagtgtccgcgcttgggctcggctgcatgggcttaagccacggctacggcccggcgacagatacgcgtcaggctatcgaacttattcgcgctgcggttgaacgtggcgtcaccttcttcgataccgccgaagtgtatggccccttccttaatgaagaggttgtcggtgaagccttaaaaccatttcgtgaccgcgtggtcatcgccactaagtttggttttacttttggcgacgacaacaagcagcagattttaaacagccgtccggagcatatccgtgaagcggtggaaggatcattacgccgcctgaagacggatgtcattgatctgctgtatcaacaccgtgtcgacccggatgtcccgattgaagaggttgcgggaacagtgaaagacctgatagcggaaggcaaagtcaaacatttcggtctgtccgaagcgggtgcgcaaaccattcgtcgtgcgcatgcggtacaacccgtcacagccctgcaaagcgagtactccatgtggtggcgtgaacctgagcaggagatcctgccattgctggaggaactgggtatcggttttgtgccattcagtccgttaggcaaaggcttcctgacgggagcgattaagtcaggaacgacgtttggtcaggatgatttccgcagccgtgtgccacgcttcgccgaacaggcgattgcagccaatgaaaagctggtctcgttgttgggtgaactggctgcagagaaaggtgtgacatctgcgcaaatcgcactggcatggctgctggcgcaaaagccgtggattgttcccatccctggtaccacgaaattgcaccggctggaggaaaacctgggggctgctgacatcattctttcgtcggatgcgttgcgacagataacccgggcgcttgaatcaattaaaattgtcggcgaacgttactcgcctgagcatcaggctcgcgtgggtcgttaa

SEQ ID NO: 98579 - DNA, 894 bp, Enterobacter aerogenes
atgctcaaagaaaacttcaatgaactccagatctttcttgtggtggcaagagagcgaagttttaccaaagcagcgggtaagctcggtgtgtctcagtcagctctcagccatgcgatgaaggcactggaggaaaggctaaatatccgccttctgacccgcacgacacgaagcgttgccccgacagaagccggtgagagaattattgcctgccttgaaccccgtatcgcctcccttgagcaggagctggaagcgctggtgcaactcaacggcaccgcctccggtaatatccgtttatccgccggggagcatgctgcgcggagcgtggtatggccaaaactgaaacctttcctcagggaatatccggaaattaacctggagctggtggtcgataacggttttgtcgatattgtcgaggggcgctttgatgccgggatacgactgggtgaaagcgttgataaagacatgattgcggtgcgaattggcccggacatgcgcatggctattgtcggtgccccatcctatttcgccacgaaccctgcacctcacacgccgcacgagctacaacatcatcgctgcatcaatatgcggttaccgactgccggtggtctttatcactgggaatttgagaaggaaggaaaacctttacgggtcagagttgaaggacaggtaacgtttaatctgcaggcggaaaggcttgatgcggccttatctggttttggcatcgcctgtatacctgaggacagggtgcaggactatataaagtcaggagagctcattcagattctgcaggaatggtgcccttccttccctggatattacctttattaccccagccgcaaacagcatccaccggcctttgcgctgatgatcgatgcgcttcgctaccaggaataa

SEQ ID NO: 98580 - DNA, 792 bp, Enterobacter aerogenes
atgaaaatactcgtggcgggggcaacaggaagcattggccttcatgtcgtcaatatcgctatcgaaatgggccatcagcccgttgcgctggtcagaaataggcgcaaagtaaaattgcttcctcgtggaacggaggtattttacggcgatgtttcaatgcctgaaactctcatcgatctgccaaaagatattgatgccatcgtctttacgctcggctcagatggacaggggcgtattggcgccagagcgatagattacggcggtgtgcgtaacattgtccgaatgttcagggagacggctgttcacatcgccttaatgaccacgataggcgtaactgaacggctcagcacctggaatcaacgcactgaagttcatgactggaaaaggcgtgccgaacgtctggtcagggccagtggtcacccctataccatcgtcaggcccggctggtttgattacaacaatgatgatgagcacaaaatcgttatgctccagggggatcgacgccatacaggaacaccagaagatggtgtgatatcccgggagcaaatcgcccgggttctggtcagtgccttgggcaaccacgcggcaaaaaataaaacgtttgagctggtggctgaacgaggcgaagcgcagcaggatcttacgtctctatttgcagacctgcaggcggataatccgcaaaaaaatgatggggttttagatatggacaatatgccactcgtggaagaacctgagtgcattattaacgagctgaatttctatttaaaaaatttaaccaatcaaaaagcctga

SEQ ID NO: 98581 - DNA, 1203 bp, Enterobacter aerogenes
atgaacaagcaaaaaaacatttctccggccgggcgcgctgcgacatccggcgtcttttttatcgttattctcggcgcattaatggcctttacctctctttccaccgatatttatctgccttctatgccgatgatggcctctgaattgcaggggaatgtggagctgaccattaccggttttctgatagggttctcgctggcgcagttgatttggggaccaatcagcgatcgtatcggacgccgcgtgccattgtttatcggcatggtattgtttgtgatcggttcagccggatgcgcgatgtcttccagtatgccgcagattgttttctggcgcgtgtttcaggcctttggtgcctgtaccggaccaatgctggcaagggcgatgatccgcgatctctatgtccgcacgcgcgcggcgcaaatgctttcgacgctggtcatcatcagtgctatcgcgccggtgattggccctctactgggcggacagattgtcaccgttgcctcctggcgcgccgtgttctggctgttggtggtactgggtggggcgatgtttattgcgctctggtggttaccggaaacgctgccgggtgaaaagcgactgacaacgccgctgagcagcgccttcggcaactatgcttcgttactgcaaaatcgtgaatttatgcgttataccctctgcgtcagctttttctacgtggccgcttacgcctttattgccggttcgccgtttgtctacatcagctatttccatgttgatccacagcattacggctggctgtttggcatcaatatcattggtgtgatgggactgagctccattaatcgccgtctggtgcagcgtcatccgttgcatacgttgttgcgggttgcggcgcttgttgccgctctggcaacggttgtgctggccgctggcgcgaaaatgcagactggcggcatggcgatgatggtcgtgacgatttttatctttttctccatgaacggcattattgccgcagcatcgacggcggcggcgctggataccgtgccatccaatatggcggggtcggcttctgcgctgatcggctcgttgcagtacggcagcgggattttgtcatcgctgttgctctcggcgatgagcgacggcacgccgtggacaatgtcgtggatcatgatggtatttacactgttgagcctggtgatggtaatcaaacgaaaagtgcattga

SEQ ID NO: 98582 - DNA, 594 bp, Enterobacter aerogenes
gtgagcacgacgaaagcgaatcgaaccccagggcgcccacgtaagttcgatccaatgcaggcggtggaaacggcgcaacaccttttccactcgcgaggttatgacgcggtgagcgttgccgacctgacaaaagcgttcgggattaacccgcccagcttctatgccgcttttggcagtaaacttgggttatatacctgcgtactggatcgctatagccgcaccggcgcaatcccttttgcgacgcttttacgtgacgatcgtccggtggttgaatgtttgattgatgttctgcatgaggcggcaaggcgctacgttgccgaccggagcgctgctggttgcctggtactggaaggaacccattgcaacgatcctgaggcacgtgaagcggcttgtgaattgcatgttgctgccgaagagagtattcggaactatattgcggagcaatatccgcaggatgccgttcgcttaactgactttatgagtacgttgatgtccggactttctgcgaaagcgcgggcaggggatagcctggagcggttactggaaaccgtgcgcctggcgggggtggcgctgcggcaagtactttcacggtga

SEQ ID NO: 98583 - DNA, 930 bp, Enterobacter aerogenes
atgaaagagcgtgatattacaacgggtgaaaaagtattagtgcttggcgcgggacaactgggcgctgctgtgctgcactatctgcttccagaggtcatagcgcgtaatggcagcatctgcgttattgtgtcgccaggcgccatggatgaacagggcaaattgttttctgatgttcatcaaaaactggctgacgcgggagctgagtttatctctcttgatgtcgccgccagcacgactgaagcgttaacaacctgctttatgaattttgagaccattatcaattgcatgggctttgtcgccggtccgggaacacagataaagatcgcacacgccgtcgtggatgctggcgttaaccgctatttcccctggcagtttggcgtaaattacgatgtggtaggtaaaggcagcggtcagcccgtctgggatgaacagtatgacgtcagaatactgctgcgggcacagaagacaacggaatgggtcattatttcaaccggcatgttcaccagttttctcttcgaacccgcatttgatgtggtgaacctatctgaaaaaaccatcaaggcattaggaggatgggaaactcaagtcactgtgacatcaccggaagatattggtcggctaaccagcgaaatttatttgcatcagccgcggatcgctaacgaagtgctctttgtcgcaggagagacgacttcttatggaaagctggctgaaacggttgaacgcgtgaccaaacacacctttgacaagagcgtattaacactctcaggcttactggacgccctgcatttaaatcctgacgatccgatgcttcgctatcgcgcggctttcgcacgaggagatggcatgtggtggccaatgagcgacacctggaatgtacagaataatatagcgacccaggatattgaagcctggcttaaaaccgttatttaa

SEQ ID NO: 98584 - DNA, 192 bp, Enterobacter aerogenes
atgattaaaatcgtggcatgcctgattcaaactagcgttgctgaagtgagaagaaagctggcggaagccaaaaaatgcatcgctacggatatccgtgtggggattaaaaaaacagcaaaaaatgcaggggataagaagagtaccaggcttccgaaaatatataaaacgtcattgtttatggtttttatatag

SEQ ID NO: 98585 - DNA, 216 bp, Enterobacter aerogenes
atgaataccggtttgtgtaccgggccgcaaacgatacaggcaaaaattttcccgaaaccggcgtcagccgcttttttactgcgtaagcgcaaagaaaataaacgtgatttgctgcacagtgtaaatactaatgagaaccactatcaattcgatgtcgttttgatattattatgctcagtttttgtgattgacgtcctggagaaacagtgtgggtaa

SEQ ID NO: 98586 - DNA, 783 bp, Enterobacter aerogenes
atgaaaaaaaatactagtcttgttttgatcaatgcgattttgatactttccggttgtacacaatacacaccgcaaaatctcaatgcacattccgaccttaatgaaatgcaatttatatcaaaaaacaacaggatagaggatgatctcgggaggttatataaacaatgtaaaggcatagacaaaaacggtaaagagtacttaacgaactggagtgccacaagtctcattttatttccaaccggtataactggggtaaataaaatcgacacaggaccagttaaaaaggactcttatactgcgattgaaaaatccggagcaaaagccaaagcggttctcactggcatatttgatggtggtgtaaactataatagtgcataccgttataatgctgaagtcaaccaagtaatatcattacaaacatcaacattaaaatttaacaagccggctggggactatataaccaaacattcaaattgtaatttcgcttatctaaacaccctctataaaggaactgcatttattgaagtgttgaaagaagtctcatcggataccggaggcggaaatgaagcggcctttcgtatcgatggctcatattatcaatcagactccgcgaatagatttattactggttttattttatttgagctagcggatatcagccctgatgagctggaaatgctttcttcaatgaagcctagtccggatcttatcggcgctctaaatgccaaagaagtgagtgaattaaaaaatatttaccctgaacttaaaattgacatcaagtga

SEQ ID NO: 98587 - DNA, 495 bp, Enterobacter aerogenes
atgccaatatttacttatcaccaccccttgtttggcaaggtaacgtataaaacagcccatgaggaaaaagtatttggcgatcgtataattttcactaaaggattaaacgaaaaggatattcagtacgttattattccagaattaaaaaacattaaaaatgtaagcagtacttttctttttcatgtgaaaggccatgaacagttaaaattagcattttcagagatacacagcgcaggtcttattcatattataaaagagttaggagccccatattatgcaaggcttcgcaaaccaacgagcggcatctatagtagcaaaccgtctaatcatgcttttggtattgcgctcgatattaatcctaatgatggaggaaatggaataagtagctcaccgttgtcaaacatttttataaaacacggatttacttggggtaacacttttacggcaaaagatcctatgcactatgaaataaatgaattcatttttcaaaattaa

SEQ ID NO: 98588 - DNA, 2175 bp, Enterobacter aerogenes
atgagaattaacaagatcctctggccgctcaccgcgctagtggtagggttgaatagcccgctatccgccgccaaatcttccgacgatagcgatgaaacgctggtcgttgaagccaccgcagaacaagtacttaagcagcagccgggcgtttcaattattaccagcgaagatattaaaaaggaccctccggtcaacgacctctccgatattattcgcaaaatgccgggggtgaacctcaccggcaacagcgcgtcaggcacccgcggtaataaccgccaaatcgatattcgcggtatggggccggaaaacaccttaatcctcattgatggcgtcccggtgacctcgcgtaactccgtacgctatagctggcgcggcgagcgtgatacccgcggagatactaactgggtaccgccggaacaggttgaacgtatcgaagtcattcgcggcccggcggcggcgcgctatggctccggcgcggcgggcggggtggtgaatatcattactaaacgcccaaccaatgactggcatggctcgctctcgttatacaccaaccaaccggaaagcagcgatgaaggggccacccgacgcgccaactttagcctgagcgggccgctggccggcgatgcgttgacgatgcgtttgtacggcaacctgaataaaaccgatgccgacagctgggatattaactcttccgcggggacgaaaaacgccgccggccacgaaggggtacgcaacaaagatattaacggcgtcgtttcctggaaagtgaatccgcagcaaattctcgattttgaagccggatatagccgtcagggtaatatctacgccggcgatacgcaaaatagctcttccagcgcggtgaccgaaagcctggcgaaatctggcgcagagactaaccgcctgtatcggcagaattacggtattacccataatggggtctgggattgggggcaaagccgctttggagtctattacgaaaaaaccaataacacccgtatggatgaaggtttatccggcggcggcgaagggcgtatttcggcggatgagaaattcaccactaaccgcctgacctcctggcgcaccagcggcgaactcaatattccgctggatctatgggtcgatcagactctgaccgttggcgcggagtggaaccgcgatgagcttgacgatccctcttctactggtttatcggtgaatgataataacattggcggtattcccggttcagcggcggatcgcagcagtaaaaatcattcacaaattagcgccatctattttgaagataatattgaaccgacgcccggaaccaatattattcccggcctgcgttttgattatcttaatgagtccggcggcaactttagccccagcttgaacctgtcgcaggaattaggtgattacttcaaaattaaagccgggattgccagaacctttaaagcgccaaacctctatcaatccagcgaaggctatctgctctattcgaaaggcaacggttgccctaaagatattacttcaggcggctgctacctgattggtaacaaagatctcgatccggaaatcagcgtgaataaagagatcggcctggagttcgccctcgacgattatcatgccagcgtgacttatttccgtaacgattatcagaataagattgtggccggcgatgatattatcgggcaaaccgcttccggcgcttatatcctccagtggcagaacggcggtaaagcgttagtggacggcattgaagccagtatggcgttcccgctggtgaaggatcgtctgaaatggaataccaacgccacttacatgattacctcggaacaaaaagataccggcaacccgctctcggttattccgaaatacaccatcaacaactccctggactggacgattacccaggcattttccgccagcgtcaactggacgctgtatggtagacaaaaaccgcgtacccatgcggagtcgcgcagcgaagataccggcggcctgtcgggtaaagagctgggggcttattcgctggttggtaccaactttaattacgatattaataaaaatctgcgtctgaacgtgggggtcagcaatatcttcgataaacagatctatcgttcatccgaaggggcgaatacctataacgaacccggtcgggcctattatgccggagtgacggcgacattctga

SEQ ID NO: 98589 - DNA, 1116 bp, Enterobacter aerogenes
atgcgtattctgtttgttggcccgccactctatgggctgctgtatccggtgctgtctttggcgcaggcatttcgcgttaacggtcatgaagtgcttatcgccagtagcggtaaattcgcccaaaaggcggccgaggcaggactggtggtgttcgatgccgcgcccggcttcgattctgaggccgattatcgccgtcgcgaggcgcagcgaaaggaaagtaacatcggcactaaaatgggcaacttctcgttcttcagcgaagagatggccgaccaactggtggagtttgccggacactggcggcccgaccttatcgtctatcctcccctcggggtcgtcgggccgctgatcgccgccaaatacgatatcccggtagtcatgcaaaccgtcggcttcggccacaccccctggcatatcaaaggtgtaacgcgctcgctcgctgacgcctaccgccgccacggcgtcgaagctccgccgcaggatatggcgtggatcgacgtgacgccgccgagtatgagtatcctgcaaaacgatggcgaaccgatcattcccatgcaatacgtgccgtataacggcggtgcggtttgggaggaatggtgggaacgcacgcccgatcgcaaacggctactggtcagcctgggcaccgtcaaaccgatggtcgacggcctcgatctgatctcctgggtgatggattccgccagtgaagtcgatgccgagatcattctgcatctctcagctaatgcgcgctccgatctacgctcgttgccgtcgaacgttcgcctggttgactggatcccgatgggcgccttcctcaacggcgccgatggttttatccatcacggcggcgctggcaacaccctgacggcactgcacgcgggtattccacagatcgttttcggccagggggccgatcgcccagtaaacgcccgcgcggtagtcgatcgcggctgcgggatcatccccggcgacggaggtctgtcgagcagcatgatcaatgctttcctcgacgatcgcgcattacgtacggcctctgaagaggtggcggcggaaatggcggcgcaggcctgcccaaccgaggtggcgaaagaactggccgccatggcgcaaaaagggtaa

SEQ ID NO: 98590 - DNA, 726 bp, Enterobacter aerogenes
atgaaaaatatatcgcggtacggtcttattatcggtttattattaggcggttgttcgagccaggctgtgtaccatgaccgtgcagcgtcaaccaccgatgtcgccacccgctggggcagcgacgttcactcaacggttaaaggcgtgtccgcagaacgccaggattcccatcctgacgaaattgtattgattaattattccggtcaagatcataccggtttcgaccagctgtatagcattcgaattagcgatctggaatatgcggtacgtgatgctaattttaactctctccctattactcgcagctataataattccaccggaaaatggcaatacgctattgcggcccgcgttggcacacaatatcaattatatgttcgtaattatagccatcgcgtggattacgaaattgttgctaccgtggatggtctcgatgtcctgagcggtaaggccggttcgctccagaataatggttatattatccgtgccggcggctcgctggcgatcaaaggattccgtaaaaataaccgtaccgtagcggcgtttgagttttctgatattgcgcaatcttatgccgcccattccgctcagggggatacgcgtaacgccgggatcattggctttgccgccttcgccttacgcggagaaaagccggcgccgcttccaccatgtacggctcaggccttcccggcgaacggtttcgccccggcgccttgtcaaaaataa

SEQ ID NO: 98591 - DNA, 678 bp, Enterobacter aerogenes
atggcctctccaagcgttcctccatatttttcaatattgctttttatcttctgcaattcaggctgcgtaaaccctgaacgtaacaaagcctcatcagtcactttcatatcgtctcgtcccttatcttccagaagtgctttcccaatcgctgattgtgcaagcaatcatactgatgaattttacagcaatccacatgatgtttatgcaatgtatcagatttcagacaatagaagccataaagccccgttagtggtacaagcaacaagcgtagcgacttcatcaggccaacctggttggtttagctttgcgaaagtcatcagtgatcaaatcagattgtcagaaggatcacaccttatcagggtgctcgtgtatctttcggagcgtgagcgaagcgctggcagaacctgcatatcgtgtgcaggtacgtttaccactattcacctgtttacgcagccacaaggccacacatcaggcttaaatgcgtgtgatcaatctgttcgggagttatgccaggtatgcggctttttgttcgttgttgtactgtcgcagtatgaacgatggaacgactgccagtgtgaagatatgctcccctgtaccacagaccaatcacgcgacaggtgcgggcgtagtacaatgggtagtttaagttgtacctgtaaagcagagcaacgtaactga

SEQ ID NO: 98592 - DNA, 960 bp, Enterobacter aerogenes
atgttagccatacgttatttaagccgcgaaacacgcttgctgctggcgggcgtgctgggggttacgctgctatgggccgccatgacgctgcatgcccattggggagcgtttattcagtggtgtctggcgatgcaaattaccctgcatcgctacctggtcatgtacctgttgcagctcaacgataaccagtacagtggcggcgtctggctgctggttggggcatttctctatggcgtgctgcacgccattggaccagggcacggtaaattcatcgtcaccacgtacctcagtaccaaccaggagagcgtggcggcagcgcggattgtcccgttccttggtagcctgatgcagggagtgagcgccatattattcgtctttatcctcgcggttggcctgaacctggcctctggcgaccttagcgccagccgctggtacgtggagaaaattagcgccctgatgattggcgcctttggcgcatatgttatctaccgggcgctggcaagcctgcgcccgcgcaaaatgacgattaacgcagtgacgcctttgcatgggcatgatgcacagtgcggctgtggccatcatggcgttgggcgcgaattacacggcgtcgactggaaaactcgccttggcgtcgtgctggcgattggcgcgcgtccctgtagcggagcaatcatgatcctgatgtttgctaatgcgctgggaattgtcagttggggcattgccgcggtgatgaccatggcattaggcaccgcgctttcaatcctcggattgtcgctggtggtacgctatgcgcgcaatcgggcgatcaacttgtttatcgccgatagccgtcagctacgctggctggtgccgttggtgaaaatgattggcggcgtgctgctcatcttgtttgctacagtgctgtttctaactgtcatcccggtcagcgccaacggcgattttattgccgccggatgttag

SEQ ID NO: 98593 - DNA, 867 bp, Enterobacter aerogenes
atggccttttttactcgtcatctggcggtcgatctgctgctgaccgcgctggctcccgctatctggggaaccacctatatcgttacttcgcagttcctaccgccggaccgtccttttatcgccgcgctgttgcgggtgttacctgccggaattgcgttgttactatggagccgtcagtttccgcagcgtggtgagtggtggaagctgatcatcaccggaatattaaatatcggcgcctttcaggcgttactgtttatcgccgcttatcgtcttcccggcgggttggcggcggtgatcggcgcgattcagccgctgctggtgatgctgctggcctggtgcgtggatcgccagcgttcgccgtggctggcggtggtttccgcctgcgccgggatcatcggtatggcgatgttgctgctttctccgcgcacggtgctggattcgttaggtatcggcgccgcctttcttggcgccgttagtatggcgctgggcacctggctgtcgcggcgctgggcgctatcgttgccggtcgtggcgatgaccggctggcaattgctgattggcgggatcgttttactgcctatcgcgctgctggtggacccgccgctgcataacgtcaccctattacaggccgctggttatgtctggctgtgcgtagccggggcgatgctggcgtatggcttatggtttcgcggtatcagtcgattgtcgccggtggcggtatcggcaatgagcctgctaagtccggtgacggcggtactgctgggatggatttttctcggtcagagaattgagggaatggcgttggcggggctgattgtggtgctggcgagtgtgctctctattcagcgcgcgctggcgaaacgttga

SEQ ID NO: 98594 - DNA, 1617 bp, Enterobacter aerogenes
atgaaaataaaccactggggcattttggggctggccggcgcgttatttcacgtcgcgccatcggctatggctgatacgcagcaaacgacgttattcgttgaaaataatatcgacagtagcttttttattacttacaccggtagcgaagttgttatttccggctccaaccgctggggcagcatgcgtttgcgctcggcaggatatcaaacttccctcggatatatttcagacaaccaatattttgctacacaaaccgagggagatttatggctggataacccgccaatttcctatctgatggcaggacaaagttgtgattcatatgggccgtcagccagaagcggttgtgatgaaagcacctcgacgctacccggagctgttgtggagaagaacggtatttacggtgccaaagtggatacaaacctcagagggaccttatcagaggctttttaccagtatatgcagcaaatgccaaccggcagcagcttttcaatggtgatgtatacctgtgcgacaagcacaacctacgacccgacgagcacctggcgctgttcccgggtagcccctttctatagctctggcactgtaactattactaaaagcgctcaccttacgcttattaacaccaattctgttgatgaagtctttatcaatagcgatggcgtacccacgcccgccgaaggaaataccaactgcaaattgcaaaccgtaggcgcccattcaggattggcctgcaagatggtctcttatagtctggacggcggtggcggggcgcaaagcgttctggtttatccgatgatccttaatagtgcgctggcggcgatggttccttcgcagggatcgtatgatatgcagtttagtcttgacggcagtacgtggaaaccggtgagcaattcgagcgtacagagctacacactaggggaactgacgtcgtccagcgcgatttatttctttttttccgaaagattatttaaaaaaatggtggagtcaggcattactgacaccgatagcaaagatttgttgaatttacgcatcgaaaggccgaacggcactcctacaatcagtaggatgtatgaatttaccacgtctaattcactgctaattaagccgcgcgatttcagtattagcattaccgctaaagactatagcgacgccccttcgcttgctggttacgttggcgaggacgaaccctcattagattttaactacattgtcactactaccggtaaaaccgccgccgacgaggtgctgattaaagccaccggcccgacgcagcaaattaacggccgcgcctactgtatcttcagcgccaacgacggcagcattaaagtgcccttcccggctacgctttccttcagcaaacaggatggcagcatcaagacctatgacgcgggctgcgacggcagctggcgcgatatgaccgatgcgctatggataacctcggcgtggaccgatatctccggcgaggcagggacgatggacaaagccacggtgaaattttctattccgatgaacgatgaaatttcgctgaaaacgctggataacaatgagtggtacggtgatgtcagcgcctccggagagatctacgttcaggccacgtggcgcgatataaattaa

SEQ ID NO: 98595 - DNA, 1710 bp, Enterobacter aerogenes
atgaaaattaaaggattagcagggttaatggcgctggtcgcggcgctgtacgtagcgcaggcgggggcggcgacgaaagtcaccaaaggcgacatgtccgggagcttcgcgtttatcgaagaccagatcgataatacctactttgttacgaatataggttcatcagcactgcccatgatgtccggggccaaccgctgggttgatctttcgtggtgggataatgtacgagattacatgtatcagaatactcctgggtatatttcaacacaaaatataaagatttatcatgctgggataaatagtatggccgatttatggcttgaaaacgcgccggtatcttatgcgttaaccgggatcccttgctcgtatatagataatatgtgcaccagtgccacaggcaggaatcctgttattgtgacaacggacacatccgtaaccgatgcccagggggtgtacggtctcctgcttccctttaccgggatggagtatttgagcggcagtatctcagatgctttttttcaatatctgcttcagatgggcgccggcagcagcttctcaatgaccctcaatgaatgcctgaccgcccaaacgggtagcagtacatacgatgcaagtaccggcgcccgctgtaaagaccagagtgatgcgacctggtacgccacacgtctcacttataccaaaggcgtgcacctgaggttacttaactccggcgcccttgatgaagtctacatcaacagcgatggcgtcccgacccccggtgaaggcaatactaactgcagagtgcaaaatattggtagcctctccggcctcgcctgcaggatggtgaactacagcttcaacggaacgggtggctccgcaatacgcgtttacccggtgctgaacaactccgcgttggtctcggctgttaaatcagaggatatgcagttcagtctggacggcagtgcatggaaacagacatcgttaacccgcaacgcgagctccgccgccaactactaccttcttgatgagatggcctcctccagcgccatttatgtgttcttttcggacaacttctttaaacagatggtggcatccggtctcagcgatactaatagccaggatataatgtattttcgcctctacaacgatcgcgcatccactttctcaccagatgccgaccaggcatatgaattttacacctccaattcactggagataaaaccccgcgaattcagcatcaatatctcctctgaagactacagcgacgccccaacgcgcgaaggctacgttggccgtgatgaaccctcgctcgactttaactacattgtcaccaccagcggtaaaaccgccgccgatgaggtgctgattaaagccaccggcccgacgcagcaaattaacggccgcgcctactgtatcttcagcgccgacgacagtagcattaaggtccccttcccggccacgctttccttcaccaaacaggatggcagcatcaagacctatgacgcgggctgcgacggcagctggcgcgatatgaccgacgcgctgtggctcacttcggcatggaccgatatttccggcgaacccggcgtcatggataaagccacggtgaagttttcgattcccatgaatgatgatatttcgcagaaaacgctggataacaacgagtggtacggcgacgtcagcgcctcaggagaaattcacgtgcaggccacgtggcgcgatattaattaa

SEQ ID NO: 98596 - DNA, 705 bp, Enterobacter aerogenes
atgtacaaacgacgtggcgcgacagtaattagccgcctgcgggcggcaatttgcatgctggcgctgggtctgccgctggccgcgcaggcgatgtcggtcggtaatctgaccttctccctctccccggaggcggcgtttgccgccaagcgggtgctgaacaacaacaaaagcgcgcgcctgtaccaggtgtcggtgagcgccatcgaccgccccggcggcaaagaggtgcgctcccgcccggcggacggcgagctgctgttcgccccgcggcaaataaccctgcaggccggagaaggcgaatatttcaaattttactaccacggcccgaaggataaccgcgaacgttattaccgggtcatgttccgcgaagttccctcctttaaccacgtggcgcgtaaggcatcgggtgccggcgtcagcatggagccggttgtggtaatggacactatcctggtggtgcgcccgcgcgaagcgaacttcaaatggaccctcgaccgggcgagtggcaccctcagcaataccggcaatacctggttcaagctgctgattaagccgggatgcaacaccacggaagaagaaggggacgcctggtatctgcgccctggcgatgtcgtccgccagcaggggctgcgccagccgggcaaccactatatcgtctataacgaaaaatttatcaaaataaccgacgactgcccgctgaagtga

SEQ ID NO: 98597 - DNA, 123 bp, Enterobacter aerogenes
atgaaagctaacgggttgttagggttaatttcgcagaacacgctggataacagcgtgtggtacggcgacgtaagcgtctcaggagaaattcatgtacaaacgacgtggcgcgacagtaattag

SEQ ID NO: 98598 - DNA, 2538 bp, Enterobacter aerogenes
atgtcctcattatggaatcgtcatggacgtcgtgtattaatcacgtccggaattgtcgtgttttcgtctccctgtttcgttatggctgacgctgaaaaaatatcgcagattggcggcgttattattccccaaacgtttcgcgtagcgctgcaagacggcatgagcctgccgctgtttattcacctcgaaggtaatagtggaacgcaggacgaccagcgcatcggtagcgcttttatctggctggataacggtaaggtgcgcctacgacaaatccgtctggaagataaagagcaaaacgccaccgtcagcgatcagatcaggcaaacgctgacgcaaatggcggatgaaccctttaacaaatcgctgagcatcccgctgtccgccgacgctaagcttcagttcgacctgcgccggctactgctgcagttggtggttaaaaaaggggcgcttggcaccgtgctgcgctcgcgtagcgaagatatcggccagtccagcgtggacggcctgagcagtagcctgacctacaacctcggggtctataacaaccagatgagcagcggcggcgatagcacctccagctatctgtcattgaacaacgttatcgcattgcgcgaacaccatctggtactggacggttcgatatacggcgccgggaccagcaatcagaatcagcagttgtataaagcaatgtacgagcgagatttcgctggccaccgttttgccggcggtatgctcgacacctggaatttacagtcgctcggcccaatgaccgccatttccgcgggtaaaatatatggcgcctcctgggggaaccaggccagctctacggtatttgataacagccagtcggtcaccccgatagtcgcctttttatccgccgccggtgaagtacatctgaagcgcgatggccgcctgctcagcgtgcagaactttgcgatgggtaaccacgaagtggatacccgcgggctgccctacgggatctacgatattgaagttgaagtcatcattaacggccgctcggtcagcaaacgcacgcagcgagtcaacaaattgttctcccgcgggcgcggcgcgggcgcgccgctggcctggcaggtatggggcggcagcttccatatggaccgctggtcgcaaagcggcagaaaaacccaagaggcgaaagatacctggctggccggcgtgtcttcctccggcgctatcagcaccctcagctggtccgcgaccggttatggctacgacaccagcgcggtggccgaagcgcgctttactctgccgctaaccaacgccattaacgtcaatttgcaaaatatggcggccagcgacggctcatggagcaccatcagcagcgtaagcgctacgctgccgggcggtttcagctccgtatgggttaaccaggagaaaacctcgattggcgacacgctgcgccgtagcgatgccgataaccgggccattggcggctcgttaaaccttggttcgctgtggtcaaaactgggtactttcagcatcagctacaacgacgaccgagaaaacaacagccactactacaccgcggattactatcagactatctatagcgggtcattcggctctctgggtctgcgcgccgggatccagcgttttaacaactcgggaagcagcagcaatagcggcagcgataccgggaaatatatcgcccttgacctgtcgctgccgctcggcaactggctcagcgccggtatgtcgcaccagaacggctattcaacggctaacctctccgcgcgtaagcgctttaaagaaggcccaattcgtaccatcggcgccaatatgtcgcgggcggtttccggcaataccggcgatgacaaaaccctcagcggcggcgcctatgcgcagttcgaaacccgctatgccaacggcacgctgaacgtcaacagcggcgccgatggctatgtgaataccaacctgagcgccagcggcagcgtcggctggcagggaaaacatatcgccgccagcggccgcaccgacggcaacgccggggtaattttccataccggtctggaggatgacggtcagctgagcgccaaggttaatggccgcatcgtgcagctctccggcaatcgcaactatctgccgctgtcgccgtacaaccgttatgaagtggaactgcagaacagcaaaaactcgctggacagctacgacatcgtcagcggacgtaaaagccgcctgacgctctatccgggcaacgtggcggtgctggagccggaagtgaagcagatggtcacggtgtccgggcgcatccgcgccgaggacggcagcctgctggcgaatgcccacatcagcaaccatatcgggcgtacccgcaccgacgataacggcgagtttgtgatggatgttgataaaaaattcccggtcatcgacttcaactacggcaaaggacagagctgcgaagtggcgctggatctgaaccaggcgcgcggcgcggtatgggttggcgacgtggtgtgcagcggcctgcagagctatgcgggcgtgcaggggaaggaagatggtcatgaaagctaa

SEQ ID NO: 98599 - DNA, 669 bp, Enterobacter aerogenes
atgaaatatcgtcttctggcagtctgtctgtttttaagcgggatcgctcccgccagtgcgctggacgtgggggatatttcctcttttatgaacagcggcagcagtacgctaagtaaagaagttaagaatacgaccgatagcggtcgcctgattactattcagcttgaacgcctctcctccccgctggaagatggccgcgtgatcccaatgtcatcgcgagatgaagtgctacaaactcccgccagcctgctgatgccggcaaagagcagcgaacaaatccgctttttctataaaggccctgccgatgaccaggagcgctattaccgcatcgtctggttcgatcaggcactgggcgacgcgcaaaaaaccggcgcccggcgcaatgcggtagccacggcttccgcccgcatcggcaccattctggtcgtcgcgccgcgcaaggtgaacttccgctatcagtataacaacggcttaatgaccaataccggtaacgccacattgcgcatcctggcctacggcccctgcctgaaagccgccgacggtaaggaatgcaaagagagctatttcctgatgccgggcaaagaccgccgcttcacccgcgtaaatgtcgcagataaaaaagggcgagtcgcgctgtggcagggcgagcagtttgtaccggtaaaatag

SEQ ID NO: 98600 - DNA, 591 bp, Enterobacter aerogenes
atgaataaaaaggttcttgctatagctctggtcgctgcatttgcaggtatgggtgtggctcaggcagcaacaagcgtcaccgcacagtccgttgccacctggtccgcaaccgcgaaaaaagataccaccagcaaactggttgttactccgctgggaagcctgactttccagtatgctgacggcatcaaaggctttaacactcagaaaggtctgtatgacgtcaccgttgaaggcgacaccactgcaactggcttcaaactgacctcccgtctgctgaccaacaccctgactcagctggatacttccggttccaccctgagcgtgggcatcgattataacggcaccgccattgataaggcttccgataccgtgatgatcgataccgcgaacaacattctgggcggtaacctgagcgccctgtccaacggttataacaccgcgggccgtaccagcgcacaggatagcttcaccttctccatcaatggcggcacctccgacggtaagactgctgtaactgattacagcaccctgccggaaggtatctggagcggcgacgttagcgtgcagttcgacgcaacctggaccagctga

SEQ ID NO: 98601 - DNA, 216 bp, Enterobacter aerogenes
atgaaaaaaaccgttattaccagcctgattattctgactggctgggcgctgttggcgattatccagctatggctgacgccaatggaagcgcttaccttcgtgaaaatatccgcgacggcggcggtacttgaagtggttatcttgattgccggtttagcccggcgagaatactacgaagagcagagtctgaaaaagaatagctttcttgatgaataa

SEQ ID NO: 98602 - DNA, 1359 bp, Enterobacter aerogenes
atggaagccaaaaaagtgccgtactaccagcgtatcgcccgccagctgaaatcagcgattgagaatggcgagctggcgccgggaagccgtctgcccgcgagcagagtttatgcgcaggagcttggcgtatcgcgggcgacgattgaaaatgcctggggcgagctggtggcccagggctggctggagcgccgcggccaggcgggcacctttgtcagcgagcggctgagcccgcggcaggtcacggctcagcgaccggcgacgggccggggatcctccgcgccgcagccttttcaaatggggttgccggcactggatctttttccgcgcgggctgtgggcgcgggtgatggggcggcggctacggacgcaatcgcgcttcgacctcgcgcccggcgatccctgcggcgaaccggttctccgtcaggcgattgtcgactatttacgcctgtcgcgcagcattgagtgccagccggagcaggttgtgattagcggcaactatgcggcctcgatggcgttgattttgcgtacccttgcgcagccggggcagcatatgtggatggaggatccgggatatccgttcattcgcccggtggttagcgcggcgggggtcaatatcgatccggtaccggttgaccaacagggaatgaatatcgactgggcgcaggcacactatcctcaggcgcgctttgcgctgttaactccagcgcatcaaagcccgctcggcgtggccctatcgctggagagacgtcgacaggtattacagtgggcggcgcagcgcgatagctggattattgaagatgactacgacagtgaatttcgctatcaggggaagccgctaccgccgctgaaaagccttgatgcgccgcagcgggtactgtacgccgggtcatttagtaaatcgatgtttcccgcgctgcgcactgcctggctggtggttccgctgccgttggcggcgcggtttcgccgtcaggccgaattgagccattgtaatgtaccgaccttatggcagcagacgttagcggacttcatcaatgacgggcatttctggcgtcatctaaaaaaaatgcgcgccagctacgcgttgcgcaggcagtggctggagtcggcgctgcagtcgcagggttttcaggtggtaccgcagtccggcgggattcaactggtgatggcggtaaagggggacgatcgcgagcaggcccgtcgctgccaacatgctgggctggcggtgcaggcgttgagcgactggcgcatgcttagccgtggtgagggcgggctattgatgagttttacgaatatcacgtcggcggtgatggctcgtgaagtcgtaggcgaacttaaacaagcgctggccagcgtgaaataa

SEQ ID NO: 98603 - DNA, 201 bp, Enterobacter aerogenes
atgctcctcgaaaatgaagtcaataacgccgaaaagtgcgcatggtgtagcggttttgggctgcctgttttgatgtgtgtagagtatatctctgtgttgcaagtgacaactagctataaatttttatttatcgcctttttgtcgataaaacactctgtaaactggcgtttttctcagcttgcgctacttttgttcctttaa

SEQ ID NO: 98604 - DNA, 867 bp, Enterobacter aerogenes
atggctttcatcacgagagagcaggctttagagtattttcgcaaacgttataatgaagataaatttacttgtactgtaaacaaaatttctagcggttatgtctttattgccacaccgatttcccagaccgactccgctcagagtcgagttcatcagcaagcaccctctcaaaagcccgactctgctgaaatcagtaggccaacatcagatagactttttgtgacaaaaaaatatgcgccaaaggtaagatcatttgctaacgatgctttactcaaggctgaaaaactcccagcaaaaaaaacatcaaaaatagaagaagatgaaccgttacctgacgaagccctgaaggctgtgattgcaagccgtgctaagcggagaaaaccggtcccttacgtacgagaagaatttacctcagcatcaacattaaatataaatcaacatgattcagatagaccgcgatgtatctattgtggtgatcatcgttcaggtattgttcgtgatcatgtggtttcagttgcctggaggggtggtgtgaggcattacgaccgtcgtcacaccgtaccatcctgcccacaatgtaacagtctactgggtgataagcccttacataatatcgcagatcgtgctgcttttcttgttggtgctattgaacatcatgagcgccgatatctctttactgttgacaggacggcagaggaactagcagaactggaccacttttttgcattatccataaaaagcgcaatgtatgaaaaggccgtggcgttacagcgtatcgaatacgctaaacaagttgcggcagggtattatgattatacaaccattaagcatctagttaaacaaggaagagatattcccgaagagtga

SEQ ID NO: 98605 - DNA, 267 bp, Enterobacter aerogenes
atgagaactaagcagacggtacaaagaatcatttgggccgttataagcaaggagcgtaacgacaagcatataacgtccaccaagacctcaaccaacacgcaaaacccagccctcacaatcgacttaaaaatcaaacagatacaaatattcctttcatatcaatattatcgccaccctttttgcgccttcccttccccgcaaaaaatcaaaatccttaacaaactcaaccacctcccccgccaattacaaggacgccagcccaaataa

SEQ ID NO: 98606 - DNA, 1368 bp, Enterobacter aerogenes
atgagcactcaatttaaagatctttttagtaaagcacgaatcgatgtcagcagtcgtattaaaacgggtaatctaaaaaagtcaaatgtatatgcggattcgcagcagaaagtaatttctgaaagtgtgaagaaaggaatgcgcaatgatagtacagatgattttttgaaagcaagccttgaagactatgctgaagatggtatgccaaccatcttccgagatgtaaaagctgaattaaggaaagttttctataaaaaacctgacgtcaacgaagctatcggttgccatccggactttgacgatctcaaattaaacgatgagcttcgtaacggctatgccgtaacgatgttttttgatatagccggatcgacaaaactcggaaaaacgtatccacctgatatggttttcaatataaagaacacaattataaggtatgttattgaaataattcaggcatttgatggccatgttcatcgtattatgggcgatgctgtgatggcatttttccgcagtgaagcgaagtctatagaaggtaaaaaaatagacagcgcgattgatgcaattaacgctgctgtatacatacttgaatttatggaacaggttatccggccagagttgggcgatcagggttcggaagagcgtataggcgtcagactgggaatcgactacgctaaagatgatgagatcgtgtggggaaactacggtgtttcaggtgcatttgaagtaacggcgacttcatatcatgttgatgttgcggccaaacttcagcaagcggcagaaactgatacgatcatgattggtgaaaatctcaagtcgctgcttggcttagggacggagtacctgtccaccaaatggaaatgggtgaagaatgaagatggtacagaatttaagcgctattatcggcatgtaaagcctaactatagagtcagagggtcacagataaactattcgcaatatgtttttgacagtgcagcatactttaagtttttgccgtatggaatagaaagtaaaagaatatcagtggtactgaccgcaacagcaaataaagttgaaaaaatattttattgcccttgttctgaaagcctcgataaaggaatgtcgctaaacttccatgtgacattcagtgcaccagcagggcaagcgtatacggtcaaagctgttaagaggaacaccggccctgacgctgaaagaaattcagcgttgaaggaagtaaaaaaggacagaactatgactttttacgcaggccagtggcatgccgacatttctgaaagtgctagttatcacggtttgcatcatatggaaattaaaatttatgatagctatgacacagaaatcgataggacaatatttagcatttttattagctga

SEQ ID NO: 98607 - DNA, 534 bp, Enterobacter aerogenes
atgcctttagatgaaaaagataagtttgataatgatctggtccagaagatgattacccgcacagacgggtttcataattatgccaataccaaatccactataatcattacctttattacagccatactagcagcaataggcactaatgctggaaatgcattatcttacttagattcaaaaggctgtcatgatttgacagttattttcaaggtcctattactagtttccttaaccctactgttatctggatacttttttattggaaaaaccgttatcccctatattaaaacgagctctaagcgaaatttttattcgtttattgatacagtaaagcagtttacttcggagaaagagtttgaacaagaaataataaaaacccccatcaatgaaataaccagcaccatgatttctctgcaatacaacctttctcaaggtcttgtcgaaaaataccgtcttcaacgtctttccatatttttaattcttttcgccgcaataccattaatgattaatacattgattatcttattcgtataa

SEQ ID NO: 98608 - DNA, 1794 bp, Enterobacter aerogenes
atgactgattcgacaattacatattcttctttaatagaagaagcatttataaaacctatcagaaatgtcacagtcattgatgatgaatatccgactcttctatcattaatagagtcacaattttctggttcggtccccccccctgaaaacagcactgttgatgcaaatatagagcggttaaagaaaatcattaatatgtgtcatacaacataccagtggggtattgatgtttttagcgggagctaccctgatattggagggggtagtaacgtcccaccacatatacatcatagtgatttagttatattagattatcatttagatggtgaaccttcaattgatgatggaacacgagcaagagaaataataaaatctcttgatgaaaacaatcactataatttaattttggtacacacgaagggctatgctaatgatataaagaaagtatttattgaaatcctttgcgaactaataacgatagatttcagtaatgagctaaaaccctcagataacactatcagtagaatgaatgattggcttgatgataacaatgatggagcgggttactcatggattaatagctccctagatttacttccaattttaacttcttataaaaacaataataactctgcttttttaaatatagaaaatgaagaacataccatgcatggttttcattcacaagtcactgaactttctatggaaactggtatagatgttaacgaattagtcaaatggaaatttcaggacttattaagaagcaaagtaaatttagagaaagagatccgtcctgattttgaatgggattggagtgaagaatcaaatttcataagcacaggtaaaacatttatatcagtaataaaaaaaagctcagatgatccagctgaagagttgatcggttcattacatgcagcattagtcaaacgaaatgcttcaccaatgcatctacttatggccaaaatgcgttatgaactagatgaaagaggtattgagcaggcatgcaaaattataaataataggccagcccaagctggatggctctttaatctcctggaaaacgctgataatgattctgcccatgacaaagcaattaatcttcattgggagcagttagcgacagcctctcgattagagcttagggatttttctaaaaaaatcattaaagctgcgggttgcgagacatctcaagataataaggaatttgtcaaaggcttctttagcgagtgcatgatagatagagataagactttaggtcttttaaacgcttacagttgctcgatgtcagtaaacaataatcatttaaaaactggaactatattaaaaattggagatgaaaaatgggtgtgtgttacccctgcttgtgatatggtgccaggtcagagagttaagcagtggcaatctcgtataggagattcttatttagcctttaaggcagttaaattagaatccgtccccattaaggatgctaataaaaatgcgaatcgaaatgaatatcttttcttgaatgatggggatactcccttagcttattctctaggaaaagataatatcgtatgggacactttttttgcaagtggccaaggaaattataaagacgaacagtcaataaccctatatgctgccagagaagaaatttcagaagatagtaaagcactggtaatgaaagaagtgagggcagttgcgattgctgaattacgatatgaatatgcattaaatatattacataaatttggggcatctcaaactcgtgtaggtcttgattttcaggatattaggagcatgtgggcctaa

SEQ ID NO: 98609 - DNA, 2967 bp, Enterobacter aerogenes
atgactgatcatgtcacttttcaaactagggcaaggacaattgaccatctaggccgagagcagatagccgattgccctacagctatttctgaattatggaaaaatgcttatgatgcctatgcccgtgatgtagcccttcatatttttgatggtgatctcaacgtttcagccatagtcgataatggtcacgggatgaatcgggatgagtttgagtcgaaatggcttgtagttggtactgagtccaaaataaatggattcaatattcctgaagatgatcgagatggtttgcctgaacggcctaaacaaggtcaaaaaggtataggacgcttatcctcagccgctatcggacctctattactgcttatatcaaaaaggaaaaatagcgattttgttgctgcacttattgactggcgtttatttgaaaatccctttttattcttaagtgatgttcaaataccagttagagaatttagtcataaaaatgagctttgtgaaatacttccccttttgtttgaccagatgatggggaatgtatggggagactctcatgatcttgagcgaaccaagagaattgcagtagcatgggattcttttagtcgtcaagagttagaggatggtttagacatcacaactcaaaagaaaatagagcaaaccctgatccaggatgtttttaaagaaaaacattttagtaaatggtcagtatggaatggcgagtcattacatggaacggctatgttcattgcagatgtgcaatatgacttatacattcaactttcaaatgcagatcttaaccaaactgatgatacggaaaaaagcacccgggagcgttttttccaaacgctttcaaacttcaccgatccattttcgaaaaatggcgaaccattaattagtgattttaactacagcgtaactggttgggttaatggtttgcctaaagtaattataggtgaaaatcgggaatttgatttacgaaacttagaagacttagaacatatcattgaaggaactgttgataacgagggatactttaaaggacgagtaaaagtttttggtgagtggattgaagattatgtcataaaaccaaagcaaatatacaaaacaagaaaagacagtgcttttggctcattccatctgcgaatcggagcatttgaacttaatattaacagcacatcactcaatgattcacagcatgctcattttatggaacagtctgaaaaatattcaggcttcagagtgtatcgagatggtttgcgagtaatgccatatggacgtgctgatagcgattatttctctattgaagagcgtcgttcaaaaaatgctggtagatatttttggtcaggtcgccgtatgttcgggcgtatcgccattactcgtcatgacaatcctaatttaaaagataaagcaggacgcgaaggatttattgaaaacagagcgtctaaaatattccgtgaaattgttcaaaaaatattgatcgattctgctgataaacatttcggcagttattctaagggaagaggcgaagctttagaagatattagggaaaagaaaaccctacaaaaagctatagatgatcgcaataaattgctttccaaagaaaggaaaagaatacgcacatccataaagaataacttaaatcccttacacaatttagcattaacaatctccgattttagtaaaaacttagaaaatcgaataaatctaaattcaatcgatgatctccaagccttaaagggaactgtagatgatttttctgagcagattcaaggattttctttaagtccaatacctactaatttaggcagattagaagaggactatcgcgcttacagaaaggaagaacttcaatgcaaagaaatgataaaaggacttacatatctaatcaacagagcaatagaagattctactgacaagagcgaatacgagaaagcaagcgaggtttatcgaagtaaggtcgctagtattaataatagtattacaaagtacgcttctcgaggtaaagatatgcttgtgaagcaacaaagcgagttcgaggagctagttaagaattgtcgcgagcaatacaaaattgcaatggaagatagccttgaagacctaaatcttcagaaagtttccctcgcctatgtacttgagaaactagatgcagaacatcaaaaaatagaaatagaaaatgcacagaaactttccccttatataactgctttagaaagaattaatgagcagattgatttggagggattggcaatacatagtatgaatgagtctgttaggtatcaagaggaaataactcgacttcattccttagcacaacttggtatcacagtagaaattattgggcatgaacttgatgggctagaccaggaactcacgcatgctctcaaaatgatgagcaatactgatctaacagacttccagagaaaaaatttagaactggcacttacataccatgaatctttaatagataagttaaagtttctatctcctttaaaactttccggtaaaaaggaaatacaacgaattacaggttatgatataagtgaatatgtgagaggatatttcgctaaacatttcgagagtggcaatataatattcacatgtactcctgagttcaataatatatctcttatggaactacaatcacgtatttatcctgtttttattaatttgataaacaactcagtatattgggtacaacgacaaaacagggttgataaagaaataattctatcattcaaggatgatgagataattgttagtgataatggtcccggtgttgatgaagatgatatagatagtctgtttacgctcttcttcacccgtaagcaaagaggtggacgaggagtcggcctttatctctgtaagcagaatcttatggctggtgggcatagtatacgctatgaaaccagaaatgattttaaaactctttgtggtgcgaacttcgctctttcgttgaaaggattgataaaatga

SEQ ID NO: 98610 - DNA, 999 bp, Enterobacter aerogenes
gtgaaagctggggaactggatctcattttgggaggccccccttgtcagggtttttcgacgcatcggattaatgatgcaggaaaagatgatcctcgaaacgctttgttgctccgttactttgattttgtcgaaaaattcagaccaaagatttttctagttgaaaacgtacctggccttctctggccgcgtcatgccgagtatctgactcaatttttctcattaacacatgagcatggctatcgggtgattggtggaaaacctttcattcttaatgcaagggattacggtgtcccacaaaacagaaggcgagcttttatactagcggttagatcggatatagataccagcggttttgtatggcctcccgaacctacccataccaaaactggcaaacaagaatgggtcacatcttcttgcgttttcgaacgcccgccggagtcgactttaattgaattcagagagcgattagtcgaaaaattcaacatgtcgattgagcttgcagaaaatcgtctaaaacgattgcaatggggttcaccgctccccaaagaagatccatgtaatgttcatatggaacattcagctgaaatgcagttgttgtttaaaaatacgccattactaggagacagaaccgagtctgggagacaacttgcctgccacaagaactacagtggtcatctggacgtgtatggtcggatttatccacatttgccttcgaacacaataaccactggttgtaacaacccgtcgaaggggagatttgtccatccttggttgcatcatggtattacattaagacatgcagcccgtttacaaacatttcctgatgactatatttttcatggtggaacgatggccattgccaaacaaataggtaatgccgttcccgtaaaattaggtgaagcattacttaaatcgattattaatttgctatcaatacagcaaattgaagtcgattcggctaaatgtggatatattgattatgataaggaatgcatttga

SEQ ID NO: 98611 - DNA, 435 bp, Enterobacter aerogenes
atggggctttacaggagttcatcacatgtatattggcgttgcaaataccacatagtctggacgccaaagtaccgcttcaagatcctgaaagataagttgggtaaggaactttacaggacaatctacattctctgtggaataaaagattgtgaggttctggagctaaatattcagccagatcatgtacatcttgtagtaatcgtcccacctaaaatctcgatatcaactctgatggggcatctgaaaggccgcagtgctatcaggctctacaatcgttttccacatatacgaaaaaagctatggggtaaccacttttggtcacgtggatactttgtagatacagtcggtgtaaacgaggaaattatcagacgatatgtgcggcatcaggagaaaacggaacaaacgcatgaacagcagatggaattgttagagtag

SEQ ID NO: 98612 - DNA, 870 bp, Enterobacter aerogenes
atgagcgaaaaattcacacttttgctggacgatacagcggtaacccttgccagcggcgtcttccctgatggcgcaggctggctgaaagtgaccggtgagctgccggcctccgccgcgttaatgcgcatccgggcggtcgcgctacgtgatatgaatgattttatgctgctggcccagttggtggaggccgttcgccatgtgaccgatgtcgccttcagccatctggagctgccatggctgccgtgggcgcgccaggatcgccatatggtgccaggcgacagctttgcgctgaaagtttttgcacagcagctgaatacactgggattcgacaaaattgtagtcctcgacccgcatagtgaggccgcggcggcggcggtaaacaacctggtcgcgattagccaacaacagtgcctgctgcagaactcccatctgcgacgtgccatcgccgccggggagttaatgctggtggcgccggatgctggagcgttaaagaaaattcagtatgtcgctaaagcctgtggcgccagcgagtttgcgatcctcagtaaggagcgagatgtcgctagcggcgcgttaacaggcttttcgctgctggccggagaggtggcgggtaaagcggtactgatcgttgatgatctttgcgatgccggtggaacgtttatcggctcggcgcaggtcctgcgtgacgccggcgcgcgtagcgttagcctgtacgtgacgcatggcgttttttccaaaggcattacgcatctattgaataatggcatcgatgccatttactccaccacctcttatgcctctccggctttagtccatccacagctggaactgattgatattgacactatttaccgcgcttattggggataa

SEQ ID NO: 98613 - DNA, 720 bp, Enterobacter aerogenes
atgaccaccgacgccgattacctcaaccactacgaagccagccgttttccttcaccgctggtaaccgtcgacagcgtgctgtttacccttcatcagggagccctgtgcgtactgttggttgaacgcgcgaatcctccacagcaaggcgcatgggggctgcccggcggatttatcgatatggcccacgatgagtccacccgcactacggcgctacggaaactgacggaaaaaaccggcatttccccttcctggctggagcagttcggtaccttttccggaccggaccgcgatccgcgcggttggagcctgaccgttgcctggttcgcgctaatcgcctgggtcgactgtcagccgcatatcgccagcgtcagcgatgcccgctgggtgccggtccagcagcttgatgaatatcgcctggccttcgatcatcggcagatagtcagcgccgcgctggagcgcctgcgccagaaaacgatgtattcgttattgcctgtttactgtttgggggatacctttacccacggccagttgcaggaagcgaccgaaatcatcctcggccagccgattcagcgtaaaagcctaatccgccgttttgaggcctccggcatgttcgaagaaaccggagaaacgctggcgacaggggcgcgaaaggcgcgattgtggcggctcaagcccggtgcggatatccacctcttctcgcgcaatctgcttgccgattag

SEQ ID NO: 98614 - DNA, 1152 bp, Enterobacter aerogenes
atggctgcatcgactttttatattccgccagtgaacgtcattggcactggttctgttactgaagcgatgaatactatccagcaatacggatatcgtcgggcattaatcgtcaccgacgcgatgctgaataaattaggtatggcgggtgaagtacaaaaggcgttacaggaacgggatattttcagcgtggtgtatgacggcgtgcaccccaacccgacgaccctgaacgtcgaaagcggtctggcgctgctaaaagaaaataactgcgactgcgtgatttccctgggcggcggctcgccgcacgattgcgcgaaaggcatcgcgctggtcgcggcaaacggcggcaacatccgtgactatgaaggggtggaccgttcggcgaaaccgcaattgccgatgatcgctatcaataccaccgccggtacggcttccgaaatgacccgcttctgcatcattaccgatgtcgatcgccacatcaaaatggcgattgtcgataagcacgtgacgccggttctgtcggttaacgactcctcgctgatgatgggtatgccgaaatccctgaccgccgctaccggtatggacgcgctgactcacgctatcgaagcctatgtttccatcgcggcgacgccgattaccgatgcctgcgcgttgaaagccatgaccatgatttcacagaatttaactcatgcagtggaagatggcagtaatgaacaggcgcgtgaagcgatggcctatgcgcagttccttgccggtatggccttcaacaacgcgtcgctgggctacgtccacgcgatggcgcaccagctgggcggcttctacgatctgccgcacggcgtctgcaacgccgtcctgctgccgtttgtgcaggagtacaactgcagcgtcgccgccgcgcgtctgcgtgactgcgcgcaggcgatgggcgtgaacgtggccgggctgaatgacaaagagggggcggaagcctgcatcgcggccatccgcgagctggcgcgtaaagtcggcatcccggctggtctgcgcgatctgaacgttaaagaagaggatatcccgctgctggccagcaacgcgctgaaagatgcctgcggtttaaccaatccgattcaggcgacccacgaaaagattatggcgattttccgcgccgcgatgtaa

SEQ ID NO: 98615 - DNA, 777 bp, Enterobacter aerogenes
atgctggctggcctgctgttagcgggctgtgaccagaagaatgacaatgccaaacacataaaagtcggcgtgattaacggcgcggaacaggatgtggcggaagtggcgaagaaggtggcgaaagaaaagtatggcctcgacgtcgagctggtgggctttagcggttcgctgctgccgaacgatgccaccaacgccggggagctggatgccaacgtcttccagcatcgtccctatctggaacaagacaacaaagcgcacggctaccacctggtggccatcggcaatactttcgtctttcccatggccggctattcgcgcaagattaaatccgttgccgatattaaagatggcgcgactatcgccattcccaacgacccgaccaacctcggccgcgcgctattgttattgcaaaaagagcagctgattaccctcaaagcgggtaccggcctgctgccgacggcggtggatatcaccagtaacccgcgtaatctgaaaattatggagctggaaggggcgcaactgccgcgggtgctggacgatccgaaggtcgatgtcgctattatcagtaccacctacctgcagcaaaccgggttatcgccggtgcgcgacggcatctttattgaagacaaaaactcgccgtacgtgaacatcattgtggcgcgtgaagacaataaagatgccgaaaacgtgaaagagtttatgcagtcgtaccagtcgccggaagtggcgaaggcggcagaaaccatcttcaacggcggcgcggtaccgggctggtaa

SEQ ID NO: 98616 - DNA, 1470 bp, Enterobacter aerogenes
atgaaagattttgccattccggcctcacgcaatacggcgactgtcgcgccggtcgatgaggtcctgccaattacgcaaatgattctctatggattgcagcacgtgctggtgatgtacgccggggcggtggcggtaccgctggtggtgggcaacgcggtcggtttgcctgcggagcatattattttattaatcagcgccgatttgtttatttgcggcgccgcgaccatcgtgcaatcgatgggcatcaagcagtggttgggctgccgcctaccgctgatccagggctgtactttcgccgcgctgatcccgatggtgcttatcggtaaagagtacggtatcggggcgatctccggctcggttatcgtctcgggtatttttatcctctgctgcgcgccgtggattagccgtctcattcgcttctttccgaaggtggtgatgggcggcatcgtaacgctgatcggcctctcgattatgccggtcgcgggggggtggatcggcggcggcagtagcgagatggccggtttcggcgatctcttctcgctgctgatggcggccatcacgctggtcattattcttaacctttatactttcgccaccggcgtggtcaaaaacacctcggtgctgatcggtctggtgattggcactattttatggagcttcttcaagccgctggattttaacctcgtcaatgctacgccgtggctgcatctgccacaggtgatgcagttcgcccggcctgaatttcatatcgtgccggtcgccctgctgtcgatggtgatggtggtggtgatggtcgaaaccatgtcgtccatcatggccaccggcgatatcgttggtaaacaggtcacggccagcatgctgcgtaatggcctgaatacctgcggactggcgacgacaatctgcggtttcttcaatctgtttccctacgcggccttcgcgcagaacgttggcctgattggcctgaccggcgtacgcagccgcttcgtggtgtcggtctccggcgtcattctgatgctgatgggcattttcgccaaaatggcggcgctggtggtactgattccgaaaccgatcctcggcggcgccggtatcgttatgttcggcatggttgccgtttccggtattcgtactcttggtcaggtcaactatcgcaacaataacaacgggatggtcgtcgcactcacccttggtctcggcatgatgccggtattggtgccgaatctgtttacccagttcccgccaatgatgcagctgtttctgcatagcggcatcactatcggcaccctgacagcaattgtcgccaacctgacgctgaacggcagcgtgccgttccgtatttctcacgatgtcccggaaccggacccggcgccgccgagcgcggctgcccgcaacatggccgtgcgtacggtgcgcatgtggctgctgctgcgcaaggtacagaaaggtcaaaccgccgctgacggccaggagtga

SEQ ID NO: 98617 - DNA, 1026 bp, Enterobacter aerogenes
atgaaagtatcaactcttggtatcgacctggcaaagaacgtttttcagcttcatggcgtcgatcacgaaggtcatactattttgcgtaaaaagctcacccgggctaagtttgttcagtttgttattcaactggagccttgtctgattggcatggaagcctgctcatccagtcatcatttcgcgcgattattcacccgctatggtcataaggtaaaactcatccctccccagtatgtaaagccctatgtgaaaacgaacaagacggatgcagctgacgctgaagctatctgcgaagcggtaacccgcccgaatatgcgttttgtacagataaaaaccgaagagcagcaggccgttttagcgttacacactgaacggggaatacttatccgtgagcggatcgcctgttccaatagtttaagagccacacttgctgagtttggtagtacgattgcggccggacaaagccatttaacccatgaactgccagccattctggaggacgacgaaaatggtttatctcccttcgtcagaaccagcatctacagacagtctaaacatatccaagaacttgaggagcaagttaaacaggtagaagaagctctggcctcctggtacagaacgcaggaagcctgccagagaatggccaaaatcccgggggttggcatgttaacggctacttatgtggtagcagcagtgggtaatgcccgacaattcagcactgcaaagcagttcgcttcatggctggggctgacaccaaaggaacattccagcggcgggaaacagcaacttggagggatcagtaaacgtggagatggatatttccgatacctgctggttcacggcgcacgcgcacttaccgcctgggtcaaccggaacggcgcggttgagaagaatgcctggcttcagggactacttgagcggaagcactacaatgtagctgttgtcgccatggcggcaaaaactgcgaggatcatgtggtcaatgttgacacacaatactgaatatcagcctcgtcagctcgcctga

SEQ ID NO: 98618 - DNA, 231 bp, Enterobacter aerogenes
atgaagttcaaaggcgtaaaaaaagagaaaatcagcggtagtgattttctcttttccgcgtataagggcattttcgttgccagatcaataacgatcggcgattttgataaacgttgctctcagagtgatacggcttatcaaaccccgaccagctcatactttttgattttgcgatacagcgtcgcaatgccgatcccgagctcatcggcggcctgctttttattgctatag

SEQ ID NO: 98619 - DNA, 186 bp, Enterobacter aerogenes
atggcgctgcgcttatccggcctacaactcaaaatccccggtggcgctaccgcttaccggggctacagcgctgtgcgatttagtagcccgtacaaggcgcaatgcgccgccccgctactcctgcgcggcgtcgatttcggcaaacacctgctgcgccagatgcaacgtggcgttcgccgccggtaa

SEQ ID NO: 98620 - DNA, 813 bp, Enterobacter aerogenes
atgagcaacgaaaccgcatcagaagaatcattcttcgacaatattaagagtactttaatccaacggttcagtactccattgtatctatatgttatcaccgcattctgcgtggaaaactgggataaaatcttgtatgtagcgtttggtgagggaacgatagatacccgcatgtctatagtacagatggaaggcattcacttttgggaacctatactctgtggaataggtatgactatagctatgccgttcctatctcgtggtatcgaatggtgccatttactctcagatcgttttcattgctatctttcatcaaaacgtgataaagaacgtgttgctagcattaatggccttaaattacttgagcgtcaatatgaaattgatagggcaataaaggaagttagacataatacagctatcgaattaataaagcatagaaaagagttaagattaaaaaacctcaaaaacaaagagcaaatacttttaaataatattaaaaacttaacaagagataatgatgaaagatacaatataagattaaaccttgataatgacttcaatagactttacaaatttttgaaagtaatgaaagatgctttttcaagcatagatagtgttaacaatttagactgtatagacagtaatctagaagcatttgaattaaaaaaagaaattagcacaatcaaatcattatattttaaagacattgagaaatatcttaaagatattaaattgttagaagaacgattaaatccacaaattcaaagatccgtgcaagaaaataaaaatatactatggaaaaacgcccaaaattaa

SEQ ID NO: 98621 - DNA, 1059 bp, Enterobacter aerogenes
atggatgaaatcaacgattcttggttaacggaatacttgcccaagtatgaacttttaggtaaatatattacctttatattggaaaatctattgcaacaaaaaggaatagattacttgtctgtatcttatcgaactaaaacaaaagatggggtttacgaaaaaatagagagaaaaaaatataaaaagccaaaagccgagttaatggatttttcaggagtgagagttattttatattttgaatcggatatagataaagtctgtgctctgatagcggatgctttcaatatagattcggaaaatagcgttgataacgagaaaaggttatcaaaggataaaattgggtatagatctatacattatgtttgcgacatcggttctaagcgagaagacttagcagaatatgaatacatatctggtttgaaatgtgagattcaggttagaacaatgttgcaacatgcttgggctgaattaactcacgatagaaattataaattaggtgtgaatctgccattagcaattgaaagaaagataaatctctactcaggaatgcttgaactcgccgaccaaggattttcagaaataataaattcgattgtgaggtatcaagcagatcttaagggtgaagatttgattaattctgcatccaatcaaattgatactttatctattgtagagttttcacgacaaattgcatcagagttggggatagatcttatagagttaaattctaataaatataaattcttagatgatctcattgatgagattaaattcttaggaattaaaaacttccaagagttgaagtctattatccctgataattattctaaggtttttttagaaagtgaagaggaaagcaatgtattaggatttgtgagagatttacttctcataaaagattttaggcgacttgctcaatttccgggattatcttggggattattgaatgatgattatgatcagaatgagcgtagagacagaatcgaatactttgcaaatttcatgagcttagatgatgctgagaaattagttgccactttcagtgagaacgtagactga

SEQ ID NO: 98622 - DNA, 480 bp, Enterobacter aerogenes
atgaaacccggcaaatttttgctctgcgcctcgctggcgctgttttccattgccgctcaggcgcaatgtccggatatgacaggaagttatcggtttagcggtgctgaaaatcccttctatctggttaaggctgccggggggccaacctataaggcgtttttccccaccggatcaggtaagtatgtgagcacatacaccattgatatccccgaggaaaaacggttagaggagcaaatcccgcaatgtgccttgctaatcaaaggcgctgggatgttggtgaaaacggagaagggaaagaaaattaccaccacgagtcagtcgcaaaattatatgactgagaaaaccattactaccgattatggtttaatggtttattccggcttcgcttcagagcttattggtatcgacaaattgagcgctcatgtgccgaaagaagcgctaaataataccctgccgatagataaagagatgacagagtaa

SEQ ID NO: 98623 - DNA, 1197 bp, Enterobacter aerogenes
atggaaattttttcaggggaaaaacaaagcagtagtcatttttttgtttttcacggtcgggcaaagagttatttttttatttgtttggttaatattatactgtctgtaattactttagggatattcattccctgggcatgggtacgtagtcgccgttatttttgtgaaaatatggaagttaacggtaaccgttttgcttaccacgggcgcggtttcacgattttacttagctggctgctgatgtttatcgtgctggttttacttagtctggcgcttgccattttctctcccggtagtgaagggctcgagacgctggcatttcttatcctgctgccggtcatggtaatgaaggggttaagctatcacgcgaatatgacctcattcgctaatattcgttttgggtttaaatgtaatctactgcgcgcatggtggattatgctcgggttacctttgctgatagtcgtgctaatggcggttatcctcttcattcccggaagccgtctctggttaggttttagcataaatggcatgttagtgggtttcgttgccctgcttttactggcactgtgtgtcatggccgccgccagtggggtggtttacagtcactggcttgagctgatcggcaaaggcggaaacttaggtaaaactaaatttaatatttatatcagcactaagcgttgcatcgtggcgtttttatgggcaacggtaattttgttgccgtttatggtgctgtttttgggttttttcatttccgcatttatgcaatttttcacaggatgtatgttcggcatgtgtaatgaaaatacagcgctgtttatggcattgcggcatcttagtgcggtattgagtggatatttatctctcaccattggtatcgtattagccatggcatttgtccgggtggccttacgtaatcacgcgtggaataatttggtgcttggcgacagcattcgttttcgttctaccctgacgttttttggccttgctccgcgtttattggctctgacgtttctttctccgctgacattgggtctggcgtatccttggttaaagattaatttgatgcgctatattgccgccaacactgaggtgattggtgactttgaaacgctcgacctgcagcaagatgaggcctgtcagccgccagtagctggtaaattgtgcagcggttttttacctaacctgccgttcttataa

SEQ ID NO: 98624 - DNA, 189 bp, Enterobacter aerogenes
atgagcggtaagcgttatcccgaagagtttaaaactgaagcagtcaaacaggttgttgatcgcggttattctgttgccagcgttgcaacacgtctcgatatcaccacccacagcctttacgcctggataaagaagtacggtccggattcttccacagttcaaaaacagatgctttttcctttgctgtaa

SEQ ID NO: 98625 - DNA, 615 bp, Enterobacter aerogenes
atgaaacgtgtcgggataaaggctcaggtcggataccggagcccgcgggcacgtaaaggcgaggccagtatcgtgtcgcccaacaggctccagcgacagttcaatccggatgctccggatgagcgttgggtaacggacataacctacatcaggacccacgaaggctggctgtatcttgccgtggttgttgatctgttctcacgcaaaattatcggctggtccatgcaatcccggatgacaaaggacattgtcctgaacgcactgctgatggctgtatggcggcgtaatccccaaaaacaggtgctggttcattcggatcagggcagtcagtacacaagccatgagtggcagtcgttcctgaaatcacacggcctggagggcagcatgagccgtcgcggtaactgccatgataatgcggttgcagaaagctttttccagttgttgaaacgcgaacggataaagaaaaagatctacggaacgcgggaagaagcccgcagtgatatttttgattacatcgaaatgttttataacagtaagcgtcggcatggttctagcgatcagatgtcaccgacagaatatgaaaaccagtattatcaacggctcggaagtgtctag

SEQ ID NO: 98626 - DNA, 1557 bp, Enterobacter aerogenes
atgaccagtttgcaacagcgtgccgagttacaccgccagatatgggcgattgccaatgatgtccgaggctccgtggatggatgggattttaagcagtatgtgttaggggcgcttttctatcgcttcatcagtgaaaattttgccagctacattgaagcaggtgatgacaacgtgaaatacgcaaagctggatgacagcgtcattactgatgatattaaagatgatgcggtcagaactaaggggtacttcatctatcccagccagttgttcagtaacgtggcagcgaaagccaacaccaatgaccgcctgaatgctgacctgaacagtatctttgtggcgattgagagttcggcttacggctatccgtctgaacccgacattaaagggctgtttgctgactttgataccaccagtaaccgactgggtaatacggttaaagacaaaaacacgcgtctggccgccgttctgaaaggcgtggaagggttaaagctcggtaactttgacaagcatcagattgacctgttcggggatgcttacgagttcctgatttccaactatgcggctaatgccggtaagtctggcggtgagttctttacgcctcagcatgtttctaaactgattgctcagcttgcgatgcacgggcagacctccgtcaataaaatttatgacccggcagcaggttcaggttcgttactgcttcaggcgaagaaacactttgataaccacattatcgaagacggctttttcgggcaggagattaaccataccacctttaacctggcgcgtatgaacatgttcctgcacaacatcaactacgacaagtttaatatcaagctgggtaataccttgctggctcctgagttcaaagatgacaagccgtttgatgctatcgtttctaacccgccttactctgtgaagtggattggcagcgatgaccccacgctgattaacgatgaccgctttgcacctgcgggggtgctggccccgaaatctaaagctgactttgcatttgtacttcacgccctgaattacctgtctgcgaaaggccgtgccgcgattgtctgtttccccggtattttctaccgtggcggggctgagcagaaaatccgacagtatctggttgataacaactatgtggaaaccgtgatttcattagcgccaaacctgttcttcggcaccaccattgcggttaatattctggtgctgtcaaagcataaggccgacaccaaagtacagtttatcgatgccagcagtctgtttaagaaagagaccaacaacaacgttcttaccgatgcccatatagaacagattatggcggtgttcgacagtaaagccgatgcagactatctggctaaatctgttactgctgaagctattgcagctaatgattacaacctgtctgtcagtagctacgtggaagccaaagatacccgcgaaatcgtcaacatagccgaactgaatgctgagctgaaaaagaccgtcaccagaatagaccagcttcgtactgatattgatgcgattgttgctgagattgaaggtagcgaggttcaggcatga

SEQ ID NO: 98627 - DNA, 693 bp, Enterobacter aerogenes
atgaacgaactgagttatctggaaaaactgctggatggggctgaggttgagtggttacctttaggtgatatttctgaaatttatggcggtcttacgggtaaaacgaaatctgattttgatggtgggaatgccaaatatatttcatataaaaacatatttagttgtattgatattaatcaaataccagaagataccgttaaggttggtgaaggtgagagtcagcaccgggtgaggtatggtgatgttttatttactggctcatctgaaattgcagaggaggcaggcatgtcatcagctatcacgatagaatttgacgaacctgtttatttaaatagtttctccttcggagttagattcaatgaaggtataaacataatccctgaattttctaaatatctatttagaacgaatttcatgcgtgctgaaatatcgaaaaccgcaagtggcgtaactcggtttaatatttccaaggctcgtttcaggaagcttttgatacctataattagtcccaacaacccggaaaagtccctcgcaatccagtcagaaatcgtcaggattctagacaaattcgacacgctcaccagctccatttccgaaggcctacctcgtgaaatagagctacgccagaaacagtatgagtactaccgtgacttacttttcagcttccctaaacctgaatccgtaacaaactga

SEQ ID NO: 98628 - DNA, 1512 bp, Enterobacter aerogenes
atgacgcagcagaccagaaccatcgccgaatccaataactttatcgtgctggataaatacgtcacagaatgggaagccggtgagcgctaccagagtgaggcagagttagagcgtgaactgattcaggatttacgtaatcagggctatgagtttgtgcctgatttaacctcccagtcggcgatgctggcaaatgtcagagtgcagcttcagacactgaatcaggtggtgtttaacgaaggggaatggcggcgttttaccgaacagtatctggataatcctagcgatacgatagtcgataagacccgtaaaattcacaccgattacatctgtgactttaccttcgatgacggacgactggaaaacatctacctgattgacaagaaaaaccttgtccgtaacaaggtgcaggttatccagcagtttgagcaaaccggcagccatgccaatcgctatgatgtcacggtgctggttaacggcttacctctggtgcaaatcgaactgaaaaagcggggcgtggcgattcgggaagccttcaatcagatacaccgctacagcaaagagagctttaataccgagaactccctgttcaaatatttgcagctcttcgtgatttcaaacggaaccgatacccgttactttgccaataccacaaagcgggataaaaacagctttgatttcaccatgaactgggcacggtctgataacaccctgattaaagaccttaaagactttaccgccaccttcttccagaaacacaccttactcaatgttctgttcaactacaccgtgtttgatgtcagcaacaatctgctgattatgcgtccctaccagatagcagcgacggagcggattttgtggaaaatcaacggggcttatcaggcaaaaaaatggagctccagagaggggggcggtttcatctggcacaccacaggtagtggtaaaaccttaaccagctttaaagccgcaaggctggcaactgaactggatttcattgataaagtcttctttgtggttgaccgtaaagaccttgattaccagaccatgaaggagtaccagcgtttctcgcctgacagcgtcaacggctctgacagcaccgctggactgaagcgtaatctggagaaagatgacaacaaaatcattgtcaccaccatccagaagctgaacaacctgatgaaaggtgaagcagatttaccggtctatcagcaacaggtggtctttatcttcgatgagtgtcaccgcagccagtttggtgaagcccagaagaacctgaaaaagaaattcaaacgtttctatcagtttggctttaccggtacaccgatatttgtcggtaaaaatgccttaggggatgaagacaccgccagcgtattcggggcagaactgcactcctacatcatcacggatgctattcgtgatgaaaaggtgctcaagtttaaagtcgattacaacgacgttcgcccgcagttcaaagagctggaaacggaaaccgacgaaaagaaactcagcgccgcctga

SEQ ID NO: 98629 - DNA, 1923 bp, Enterobacter aerogenes
atgacagcaaaatattatgccattctgaccaatcagggcgcggcacggctggcgaacgcgaccgcactcggcactaagctgaacctgacgcaaatggccgtgggcgatgccaacggcaaattaccgacgccagaccaggcacaaacagcgcttatcaaccagcagcgcatcgcgccgctcaatatgctgaccgttgacccggccaatgccagccagattatcgcggaacaaattattcccgaaaatgagggtggtttctggatccgcgagattggtctctatgatgatgatggcgtgttgattgccgtggcgaactgccccgaaacctacaagccgaaactggcggaggggagcggccgcacgcagaccattcgcatgattctgattgtctccagcacgacggcaatcacgctgaaaatcgacccgtcggtcgtgctggcaacccgtcagtatgtcgacgataaagccatcgaggttaagggttatgccgatgagctgatgaaaaatcacattgcggcggctaacccgcatgctcagtatttgcaggcaaaaaataacctgtcagaactgaccgacaaatcaaaagcgcgcggctcgctggagctgggaacggcagcgacaaaagacgtcggaacaggcgcgggtcaggtgattggcgtcggcggctttggtctgggggcggataaaatcagcaccactgcgattgattttaaaacacgtattttccgcgccggtgagtctttgctcctcaaaatggagagctgcaccaacgtccctgatggcctgccgaaaggccctggcgaatatgtttacgcgcattgtttaggtgtcagggataacagctacgggtgcaccgttatttttatctctcacaactcagggaatatttcttttattggtacccgatataacaatacgactagcggatggacattaatgcgggtcggcaatcaggccgaactgtcgaaatacctctctttagccggtggtgatattaccgggcgcctcggtgtttcgggggcgctgcaggtcggtaaatcgggtacggaatctctgattacgctcggtgcagcgacggtgctcagggataacgcgaatggtgcgctggttatcagtagcgagtcgggggcgggaacgaaagcgggtgtatttttacgccctatcgccagcactgatagcaccatgcaaatgcagggcaacgccgacgggtgggcgactgacaacttttccacgaaaaacctcaaggtgcccggtaaggatgccatcatcaaaagcggcgcgtattcctacaccgatggaagtcagaaatttaatcagactgacggcctgtttatgctgggcgttggtgagcagtacggaaaaatcagattcactgaaatggtgggtaaaagggcttttattggttttgaaatcaaaggcggcgataaaacggcatggctggaattccggcaggacggcagttttgtcatcaacggtgctgacgttgcccctgttggtattcctcagccgtggcctctgacgagcgccccgcttggctggcttatctgtaatggtgcggcctttgacaaggcgttgtatccctatctggctgcggcttacccatcgggcaaattacccgacctgcgcggtgagtttattcgtggctgggacgccgggcgcggagtggacgcggggcgagccattttttctgcacagggcgacgctatcagaaatatcactggttcaattaatggcttaggtggcgagggtggcgcgatctattacaaatccactcctgaaaaaacctcatgggtgcattggggaggtgacaatactttccacgatgtgatgtcgtatggctttgacgcctctcgtgtcgtccccaccgcatcagaaaaccgaccacgcaacatcgcatttaactacattgtgagagcagcataa

SEQ ID NO: 98630 - DNA, 747 bp, Enterobacter aerogenes
atgaaaaataacgttttctcacaaagccagattcaggcaatggccgacattctgcactctgacagttttgactatcaggcaacatggttgcgggtcggtaaactcaatattgaccgcagcatcaccaaatcgcgccagattggcgcaacgcagctttttagccgcgaggctctgctcgatgcgctgacaacgggcgataatcaaatctggtttgctcacaccattgagcatgcgcgcgtggcgctgatgtacatgaatgacctttcggcgcgtgtcggtgtccgtcttaagagcaacggccacagcctgcagctcgacgacggtgcggttatcagctttgtcggcgaggaatcccattgcgccgcgctggcgggtaatgtctatcttgatgagttcggatggttcaataccccgataagagcggccaaagtctcggcggctatcgcctgccataaacgccacagcctgacgatgttcacctcgccctctgataactttgacgcttttcgggtgtggaacggcacgttacgcaggcaacgaccatcaccgctaatcactaccgacgacagtgtattctgcacagatggtgtctggcgtcagtcggtcacgctcgatgctgcatgccagcgcgggtgcaatctctttgtgccagaggaaataaaacgcgaatacagcgacgacgattatcgcaggctgtttggctgcgactggtcttttgctgttgcagcgggtgaggtggaagcatga

SEQ ID NO: 98631 - DNA, 432 bp, Enterobacter aerogenes
atgtccaaaaacctcgaattatttaacaagcagacggcgaaaatcttcgcagtgttatgggataacttcccggctccacaggtcattacctacgaaaaatttaacgccgcgctacctgatgactactttgaccaacttaactcaccggaaatgaaagcactgaatcagttgcgtagtgtggttgagggtacattcacttttctcagagaaaacggctacattcagtatgaaacagaccatcagacctattttcggaatgtgcgcctgaccgagaaggcgctcgccgtgctcaacaaaaagcccgaggcgctcggcggcaatgaaacgatgggggataaaattatcagcgcggtgaaagacggggcgccgggagttattgctggtgcagtgacaaacctgctgaccctcggtgtcaacctggcaaccagctaa

SEQ ID NO: 98632 - DNA, 1041 bp, Enterobacter aerogenes
atgaaacacaaaaaagtaagcattcttaaagaaaacggtgaattttctgtgagccttctcagttatgatattgttcacgtcaaaaaatcaaaagaacataaaagaagcgttaactattattggaacactcggacacaggaaattatcatcgggtctggaacgttgcgcaatcacaacttcattccatcaatagcacattcatttaactataaaaaaccgagctctgacttaagcagagaagaaattcaacttggggactctgtatgcgtattacttaacaccaccgcggccctttttctttttggttccatagttggcattgataagtccaagaaaggaacttattttcacattctaccgcacgataagacatttcccttccagttaaatagagtgatcaaagtcaaacatcaaaaaaacaacatctatcttctgaatgacggtgttaatgaacgacatgaatatatggcaaccaaaaatcttgcatttgcaaaataccaatatcaagtagaatttgtagaattcatcatatcatatataaaaatcgcccccttagtaatcagttacgcatccgataaaaataaaataataaacgagaaaaccctactgcaatgtcataaagttctttttgagcatatttactcgtgggcgggtgtatatagaacacaccctgtcgtcgttggagataaagaacgaccaacaatggagcatgacgaaataagaaaagcgcttaaaacaagcctcagagcctgtactaaaagagagttagaaaaaataaaatcaagggaacaactagtacttaagctaacaacacttcatgcagaacttgcgtggattcacccttttgaagatgggaatggacgttcaatccggttatttcttcaaattgttgctgctacgatgggatatgaatttgacatggaaaaactagatggaagtaacaaaaacaaacgcgcctaccattacgctgtaagatgtgcaatacataacaacaaacgcaatttgattgcccttatatcaagggcaatcaaggagctttaa

SEQ ID NO: 98633 - DNA, 198 bp, Enterobacter aerogenes
atgagcaaaaagattatcacgatccaagtaagaggcgagcacgctgacgctaaagctgtacgtcgttcaaagcttgaacaaagtgttaatcgttctctgcgtgcctcgttttctctggaaggtaaccacattaccgatacgtcatggtctaaaatggagcaggcagctagatttttgacgagaattgccgtcgcttaa

SEQ ID NO: 98634 - DNA, 1341 bp, Enterobacter aerogenes
atgaacaaactgattcaaagcggcacgatgctgctggctttactacaccctttcctggcgttggccaacgatacgtttttttctcccacagcaaaaaacatgaccggagagtggggcggcgtgcgcacggatctgcgccatcgtggttatgactttacgctggaatatagttcgatgaccgctacgaatatttccggcggctacgatcgcgataaaaccctgcgctacagcgatcagtatattctcggcatcgatatggatctggagaagattttcggcattcacgacggagaatttaaagcgtcgctaaacgatcgtaacgggagagatttgactcaggatcgtctccaggacccgcgcgctccggtaatcggctcgggtgttcagagtaactacggtcggggacaaacatggcacgcggcacagttctggtttaaaaaaacctggcaggataaaaagtgggatctcaaggtcggtctcatgccgccaggagaggactttgataatagcggctgtttttttcaaaacctgtcgttgtgcggttcgttagccgggcacggtagcggcgtctggtataacactcccataggccagtggggtggccgcattaaatacagccttacttcggcgctttatctccaggccggcggatttcagtacaatcctaactacgccacccgccacggaagcttcgagctggatggcaccgggcatctgggatacatgtatatctttgagctgggatatttacctgccgcaggcacggcaatattccctggcacctggaaaattggcggctggtacaacacagcggatgccaatgatgtactggatgacgacaatggcgatccctatgtcctcacacagcaggctgcccggcaacacggtggccgttacggaggttatttctatgtcagccagcagctgacccacccgggcagccagcgccaaaatggcctcaacattttcgggcatctggccataaatgataaaaatacggcgacaatggactatcagatccaggctggcgtcatttataagggccctttcgccagtcgcccgcaagactttatcagctttggcgtaagtaaaatgcatgccaacgccaaagtcgctcgtcgagcgcaactccagaaccagatgcgagggatcgatgattatgatgatcccttgtatgtcccggttcgcagaagcgagtatgccgcagagctgcattatagttttcgcgttacaccatggttgaccttgcggcctaatctccagctactcgcccatccgggaggaatagaggagattaaagatgcatgggttatcggaaaccaggtgaccatcaaactttaa

SEQ ID NO: 98635 - DNA, 147 bp, Enterobacter aerogenes
atggctggctttgtcgggtttatggcgctggcttacgtagtcgcctcagaagggcatcgccagcaatgtatatccagaatcacgctttgcataatgttaaccaccgtgctgattgcccggcagaaaaatatagccatttgtacatag

SEQ ID NO: 98636 - DNA, 1725 bp, Enterobacter aerogenes
atggatagcttgagcaatttattgccctcgtggatgtttacttccggcatcgcggtaataatcctattaatcatcggtattattttcgccagactctatcgtcgggcttcagcagaacaagcgtttgtccggacagggcttggcgggttaaaagtggtaatgagcggcggggctatctcaatgcctattttccacgaaatcattccgatcaatatgaacacgctgaaacttgaggttagccgttccagcgccgatagccttatcaccaaggatcgcatgcgcgtggatgtcgtcgtcgccttcttcgtcagagtgaagccctccgaggaaggcatcgcgacggcggcgcaaacgctgggccagcgtacattatcaccggaggatctgcgcattttggtcgaggataaattcgttgatgccctgcgcgctacggcagcgcagatgaccatgcatgagttacaagatacccgtgaaaactttgtgcagggtgtgcaaaacaccgttgccgaggacttatccaaaaacggcctggaattagaaagcgtctcgttaaccaacttcaaccaaacgtccaaagaacatttcaatcccaataacgcctttgatgccgagggcttaacgaaactcactcaggagacggaacgccgtcggcgcgaacgtaatgaagttgagcaagacgttgaagtcgctgtgcgggaaaaaaaccgcgatgcgctggcgcgtaaactcgagattgaacaacaagaatccttcatgacgcttgagcaggaacagcaggtgaaaacccgtaccgctgagcaaaacgctaaaattgccgcctttgaagctgaacgccaccgtgaagctgagcaaacgcgtatccaggctgagcgtcagatccaggaaagcgaaattgaacgtgagcagattgtgcgcacgaaaaaagtggaagccgagcgggaaatccgcattaaagagattgagcaacagcaagcgacggaaattgcaaaccagacgaagtctatcgccatcgccgcaaaatcagaacagcagtctcaggcggaagcgcgggctaacgaagcattagccgctgccgttaaagcgcagcaaaatgttgaaaccacgcgacagaccgctgaagccgaccgtgcaaaacaggttgcattaatcgccgccgcgcaggatgcagaaactcaggccgttgaattaaccgtacgggcaaaagcggaaaaagaggccgctgagttgcaggcagcggccatcgtcgaactggcggaggcaaccaagaaaaaaggtctggcggaagcagaagcgcaacgcgcgctcaacgatgccattaacgtattgtccgatgagcaaaccagcctgaagttcaaactggcgctgctgcaatcgctgccagcggttatcgagaaatctgttgaaccgatgaaatcgatcgaaggtatcaagattattcaggtcgacggtctcaaccgcagcggaaatgcggaaaataccggcgtaagcgcaagcggcggcaatctggcagagcaggccctatcggcggcgctaacctaccgcgcacaggcgccgctaattgattcactgctaaatgaagttggcctttcaggatcttctttagcttcgctggcagcgccattaaccgcgtcgatacccgaaaccgcgccgacaaacgcagcaacgcacttcattgccgttccgcaaaatcaaccctctcagccatctacgatcccggccgaataa

SEQ ID NO: 98637 - DNA, 630 bp, Enterobacter aerogenes
atggatttactttccgaatacaacaacccttatctatttgctttatcatttgtcataatgattggattgttagaaatcatctctcttatttttggacatctattatccaccgttattgatgctcacttgattcatttcgaatcgttatcctccggcaatataggacaggcacttcattatctaaatatagggcgaattccggcgctgattgttctctgcctgctcgcgggttattttgctttttttgggatcatcgcccaacacgtaacggtcaacctcaccgactcacctttgagtaatatgctgttagcccctatctgcttgttgttagcaggtatcgcagtacattacacaggaaagacgatcgctccctggctgcctcgggatgaaacgacggcaataacggaagatgattttattggcaacatggcaattatcaccggccatagtgctaaacatggttggccatgcgaagggaaattcaccgataaatttggccaaacgcattacttattactggagccagaggaaggcaaagagtttaaaaaaggggatcgcgttcttatcgttctcaggctgaccccaacacggtacctggccgaactgaatccctggccacatattttataa

SEQ ID NO: 98638 - DNA, 444 bp, Enterobacter aerogenes
atgaaaatttatcaggcacagccacaagatgtagataagattcttcctttatttttagcatatcgtgacttttataatgttgaatcaaataaagaagaggtatttctctatcttctaaatagagtgaaactcggcgaatcggtgatattctttatagaagaaaacaatgaagttgttggttttacacaattatatcctcttttctgctcgcttgaaatgaaacgcatttggttactttatgatctttttgtaaaaaaagaatacagaaaaaagggtattgcgaaggcacttattcaacgagctgaaaagcttggtgaggagtcaaattcagcatttattatgcttagtacgggtatagataactttaaagctcaatctctttatgaacaaaatggttttgttagagataatgatttttatgtttacaataaatgtattctttaa

SEQ ID NO: 98639 - DNA, 126 bp, Enterobacter aerogenes
atggaggtgctcgaggttaagcgcctgaagtcgcttgaggaagagaacgccagactcaagaagctgcttgccgaagccatgctggataaggaggcacttcaggtggccctggggcgaaagtactga

SEQ ID NO: 98640 - DNA, 786 bp, Enterobacter aerogenes
atgcttataggcttgtccctgtcgacctgtcgctatgaggctcagcgaccggcggctgatgcgcatttatcagggagcatcactgagccggcgctggaacgcaggcgttttggttaccgccgcatctggcagttaatgcgccgtgagggccttcatgtaaatcacaagcgcgtgtacctcctttatcatcttggagggctgggcgtaaaacgcagacggcgtcgtaaagggctggcaacagaacgtctgcctctgctccgcccggcggtgcccaacctgacctggtcgatggattttgtcatggactcgctcgccaccggtcgcgggatcaagtgcctgacctgtgtggacgacttcacgaaggagtgcctgaaaattaccatcgcattcgggatttcaggtgttcaggtcacgcgcattctggacagcattgctctgtttcgaggctatctggcaacaataagaactgaccaggggccggagttcacctgccgagtactggatcaatgggcttttgagcatggtgttgagctgcgcttaatccagccgggcaagccaacgcagaacggatttattgagagctttaacgggcgatttcgcgatgaatgtctgaatgagcactggtttagttgtatcgttcacgcaaggaaagtcattaataactggcggcaggattataacgaatgtcgtccacattcagcactgaattatcagatgccatcagagtctgcagtactgtggcggaatggaaaacgtgaaggtatacaaaccaacattactaactga

SEQ ID NO: 98641 - DNA, 207 bp, Enterobacter aerogenes
atgaggccgctcgttgttatattccatcagccagcgctctgtaatttcccgtacttcattcagtgttctgaacaggtaaaaatccaggatttctgtccggtatgtccggttgaaccgttcgataaaagcattttgtgtaggtttccccggcttgataaattcgagctgcacaccatgttcttcggcctattgtgccagcgacagtga

SEQ ID NO: 98642 - DNA, 168 bp, Enterobacter aerogenes
gtggttaatgtaatggaagagttacggacgctgggcaagcgcctgccggtgcatatgcagacagataacggcagagagtttatttcgaaaattccagataaatgggtgtatgataacggtgtcacactagacttctcccgctccggaaaaccaacggataatctgtaa

SEQ ID NO: 98643 - DNA, 711 bp, Enterobacter aerogenes
atggttattaccttcacccgtttgagagccgttcgccgcaagggcgtaaaccagcgcgggcgatggcggatgtccggggcgcggtttaccgcgtgccatttaccctggacagctgacagcgactgtgcttgtctcagccccggcgaaaggactcaaagggggaaaaaccaggtaaggaatgagcaggaacacgccgcaacgacggaacgcgtgggcgcgaaacggcgttgcccctcagaggcccggcagcattaccgccggaccggtgggagcggcgcatccgtttacggatgccgcaagcgtgatgttgatgttgcgacagtgcgatggaagcccggcagggcggagacggcttgccggctccgtttacgacagcgccggttcccgtcagggaagtcgcccggaagtagacacaacgggaagaaaaaccgacaggacagcaatatcagccaatacggcatcgatatgaccactattgccaacagcaacagtatggtaaccagaacgggaaaacccacacccagctgcagcacaatgctattcagaaccagccgggactgcggcataagacaaaggcggagaaatgcggcgccggaggcacggcgtactccgccggcaggcgtcgcctgccagggttttgcccgcgggctgacaggcgccctctggcccggacgcctgccattatacttactggccttttccaccctgtaa

SEQ ID NO: 98644 - DNA, 405 bp, Enterobacter aerogenes
atgaacacacagaacgtcaacgtcaaaaccgccaccaaagaatcttccgaaagatggggggcagacccaaaagcgcgtctggcctgtgtcatcgcggagcaaaagtcatacctgctggagctgtgtcaggtccggaatctccagctgagccagaaagacgaggcagaggaagtcctgcgccttctcagcctgatgggtgacaacgttcacaaggaaggcgtgctgtgctgggaacgttcatatccgctggtgtcgttttatgtcatgcagccgtggttgcaggcaaaagatcatgccatctgcttatacggcgttatcgggcgtgaggcgtgggacattgcgcgtaaagacctgtgcaacaacattaattttgctcaggccatgctgaaaattgaagagtgttaa

SEQ ID NO: 98645 - DNA, 348 bp, Enterobacter aerogenes
atgcaattacatctgactgaatccgatgccagctatggctttcatgcaaccgctgaggccgagagattgtactggcagagccgtgaaagagcggcagtgaaagcgcccgctgaaatcgacgtgcatgcctttcatgatgcgctgggggtgatgtatccgctcaactggtcaacgagtgaaagcggtcactgggagtcgttcatgatggcagaaatgacctgcggagaagtcaccgagatttatgcccgctatggagccagatatttctgtctgcgggatgtgtgcaacctgagccatgcgcaaatcaaaacgcgcattaaggaggcgtttaacctgttccataaatga

SEQ ID NO: 98646 - DNA, 147 bp, Enterobacter aerogenes
atgaatttcgacccacaaatcgtcgcacaggcgaatgcgtttgtaaatgccctgcgcagtggtcagcgcgcccgtgttccggcactgaagctggagtactggcagcagtttatgactaccgtgtacgctggcctcggcctcgcgtga

SEQ ID NO: 98647 - DNA, 831 bp, Enterobacter aerogenes
atgtcacagatgagttttgccggtttttttgaccaggtgaaagaagccgcccccttaacccctgctaaaccggtattgcctgctgtgaatgcgcgggcgataccgcagcggatgatgaccatcggggaagcccgccgccagtttgtcagcgtattcatggacaccgcccgtaatttgcgccgctgggaggtgttcagcgacttcatcacgctggccgccagcgagctggatatggcgcggatcagaacgccggagaacatcgggcgcagccgtgaaatctgcgcgaagtacagcgaaagcgatatcagcaagctgcacacgcttttctgcctgatggtctgcgcactggaggcgaaattccacgacttcctcggcgcgatcttcatggagcttgagctgggcgacgaccgcaacgggcagtatttcacgccgtattacgtccagtctttgctggcgaggctgctgaggccggacgtcggggagacaatacgccgtgagggttttgtgaccgtcagcgatccggcaagtggtgcggcggggatgattattgcatatgcagagcagctactggaggcgggtttcaatcactctgaacatatgttcggtagctgcattgatatcgatccgatagcggcggatatggcattcatacaactttccctgctggggatccctgctgaggtggtcacgggcaatacgcttacaatgcagcttaacagggtgcgttatacgcccgtgtactacataaacaactttgaaaaacgcctggaagaccagcgtcgaatccgtgccatgcgcgaatttatccgcagcatgagtcaggccgcataa

SEQ ID NO: 98648 - DNA, 789 bp, Enterobacter aerogenes
atgaacacacagaacgtcaacgtcaaaaccgccaccagagaatcttccgaacgatgggctaaaacactgctggagaggctggaaactatgcagaaaaaagccagtggggcgctgtttgattttcagcgcaaaccggataaggcggtattgtattcggcaacctgccagttgaatacggagctgacgcagttgattactggcgtacctgctgttgatattattcagcaacgggtcgatgaactgaatgattttctgtcggtgatgatgcaattatccgggcatactgctgttaataagagtgccgtcgaaccggaaaggccggatgttcgccagtgtattacccatgccggaaagcgtcttcgttttattccgtcatttttctttacacactgcgccgataatatggtggcggactggttacaccagcattctgattatgatggcggctactggcattactgggtcattccacaggggaccggaggaaatgtggctccgaacagcatcaggttcacgacaactgataccgggtatatcgcaccggaaggcgagcaatactacaacatggttattcccggtaattattttgaagctgaagtcagtgcagatgcggcgggtattattgccacgctgatgatactgaacaggttagcctggaaggtgtcagaaatgggggcgcaatatgaaaatatctgtcagcgccttattgccagacaggatgcactgaaagattatgtcagcattattaaacacccggaggcgaatcttatctggcgtgcgattgactga

SEQ ID NO: 98649 - DNA, 402 bp, Enterobacter aerogenes
atggctaaggtacaggcttatgtcagcgatgaggttgctgagaaaattaacgccattgttgagaaacgaaagactgaaggtgcaaaagataaagatgtgagtttttccagtgtatccacgatgcttattgagttggggttgagagtctatgaagcacagatggagaggaaagaaagtggctttaatcagatggcgtttaataaggtgcttctggaaactgtaatgaaaacgcaatttgctactaataaaattctgggcatatcctctcaaagccctcatatcgccggtaatcccaagttcgagtggcgtaacatgattgagaatattcttgaggatactcagcaagtggtgcagatgttttttcctgatagtgatgaaacagattcagttgaggaacagtga

SEQ ID NO: 98650 - DNA, 696 bp, Enterobacter aerogenes
atgtgttcgatggatcgtattgaaaacactaccactagtcaattggaattctttagggaattgcaaataaccgtcaatcttttagatcatcccgcgtgcgtgagactaccagacgggtctttctctaactataatctctcttttgcaacaacattcctttgtaatgctaacgtcaatgtctggtttaacagtattgagactttatcttctgtgcgtttatccgctctggatactgaaatttatgttacggaacaaaaaatattcattgaggagaacgtgacgataaatggaaagaagtgggatttcattgttgaaaaaatgagttttaaaggaaatgagtttacattatggaagttttgtcatcttcaaagaggtggttttcttttatcacctgcaaggaataactcactttcaaaaattaacgcttttaaaaatgccgttatcattttaagcgatgttcaatttgaaaccttgtctttatatgcttttggtgcatcacatcaaattatatccgaggttttgaatatttcggttggcacttctaaaaacagaataaatagaatttattccactcttcctgtcaaaacaaaggatgaggtattttatttgctttatgcgagtggtttggctatgtcgttttttagagttgtgggagagttagtgtcgaagcgggttaatagattgttaaataaatag

SEQ ID NO: 98651 - DNA, 216 bp, Enterobacter aerogenes
atggccaccaccaccggtacggatttgatgaagtccggtgatggcaccgtaaaagcgacttttggtaaaggttccagtgtcgtgaaatgggtgattctggcggaagttattgtcggcggcatcatgtacatgatgaccaaaaacgttaagttcctggccggttttgccatcctgtcggtattcgttaccgtcggcatgtctgttgccggatattaa

SEQ ID NO: 98652 - DNA, 414 bp, Enterobacter aerogenes
atggtgttaaatattgattttataaagtatctgtatttactgatgaaagaagattcatcatatattattttgagtattgctctttttggggggcttgcagcactgttattgccgggtgtattgcggattaaaaacagaatgaagcgcttgctgtcgttaatgattattatgatagtttcagttggatcgctcgcattgctccaaccagaaagtaagtacaaagcaatattaatcaataagcaaaatactgaatatacattacaacactgcacagtatcggcatttaacgcgcaaccagaaacaccatttaccagtgcaaaagatgcctggcgttgccctgatgacattacccgctatctgggggttaagtaccgggataagggcattcaaagcctttctgataaaaaggagtaa

SEQ ID NO: 98653 - DNA, 399 bp, Enterobacter aerogenes
atgcatgcttacataaacggtatggatgtgtggtgggttttagtcattgatctagtaatattagttgcaggaatcattggggtgttcttagcacttattcttcccgaacaatatcaattcaggggaaatctttttctggccggtgcgttcactgcgctgactggcattgcaatctgtttcgttatggtgatgttaacctatagtgccagcgagatcgatgctggccggcactggaaaacagagtgctcacttattgaagcaaatgtgcagaccggttttttgaatgacgccgtcaataaattaaggtgtgagggtgttattgttaatgttccggtgaatgcctatgaaacctacactgaacagtggcagttattacaaaagaaaaaaggtggagaataa

SEQ ID NO: 98654 - DNA, 387 bp, Enterobacter aerogenes
atggctttcctgaaaagatacggctttctaatttatcctctaatgtactggtttgtttatctcactttaaggtatttgttaactaaatctccagatcaaagtacagaggagtttcataccgctttgcgtcgcgagttggtttttattatatgtagccttggtgtgtattatttcttgtgtgtgtcggtaacgggttattatgaagttcttcgtctcggtatcttatcaacactgattattcatagtgcattgctcattatcacgcttctggtatcactctggaatggaaagattgtgattggtgaggtgatatttgcacagttgatggcggcaaaaataattcttttctttatgccgtttactttattttattatcgggaaagataa

SEQ ID NO: 98655 - DNA, 5256 bp, Enterobacter aerogenes
atgctcagtttcagtcaggtaaaatcggcgggcagtgccggtaactactacacagagaaagacaattattacgtcatcggcagcatggaagagcgctggcagggtaaaggggccgaagcgctggggcttgaggggaaggtggataagcaggtttttaccgagttactgcagggaaaactgccggatggcagcgaccttacccggatgcaggatggcgtcaataagcaccggcccggttatgacctgacgttctccgcccccaaaagtgtatcgatgctggccatgctgggtggcgacaagcgtcttattgatgctcataaccgcgcggtgacggtggcgctgaatcaggtggaggctctggctggcacgcgggtgcagaaagacggtgtgtctgaaacagttctgaccgggaatctgattatcgcccggtttaaccacgatacctcgcgtgcacaggagccacagatacacacgcacagcgtggtcatcaatgcgacacagaacggtgataaatggcagacgctggccagcgacaccgtcggtaaaaccggattttccgaaaacctgctggctaaccgcatcgccctcggaaagatttaccagagcaccctcagagccgatgttgaggctatggggtataagacagtcgacgcgggcaagcacggcatgtgggagatgagggacgtgccggttgaggcgttttccacgcggagtcaggaactcagggaggcggcgggacccgatgcgtccctgaagtcccgggatgtagcggcgctcgatacccgcaggtcgaaggaagccatcgacccggcagagaagatggtggagtggatgaatacgctgaaagagaccgggttcgacatccgtggctaccgcgaagctgctgatgccagagcggaagaaatagcccgtgcacccgcagccccggtgaaatccgacgggccggatattacagacgtagtgacaaaagcgattgccggcctcagcgaccgtaaggtgcagttcacgtatgccgatgtgctggcgcgcacggttggccaactggaggcaaagcctggcgtctttgagctggccagaacaggtatcgatgcggcgattgaacgggagcagcttatcccgctcgaccgcgagaaaggcctcttcacctcaaatatccacgtccttgatgagctttccgtgaaagcgctgagccaggaagtacagcgtcagaaccacgtctctgtcacgccggatgcgggagtggggcgcgaaaaatccttcagcgatgcggtcagcgtactggcgcaggacagtccggcgatggggattatcgcaggtcagggcggcgcggcaggtcagcgggaacgggtggtcgaactgacactgatggcccgggaacaggggcgcgatgtgcatatcctcgccgccgataatcgctcccgtgattttctcgccggggatgcgcgactggcaggagaaaccgtcacaggcaaatccgccctgcaggacgggacggcgtttatcccgggcgggacgcttattgtggaccaggcggagaagctgagcctgaaggagacgatttccctgctcgatggcgccatgcgccataacgtgcaggtcctgctgtccgacagcggcaagcgcagcggaaccgggagcgcgctgtcggtcctgaaggacagcggcgtgaacacctaccggtggcagggcggaaaacaggcgacggcagatatcatcagtgagccggacaagagtgcgcgctacagtcgactggcacaggagttcgccgtcagcgtgcgtgaggggcaggaaagtgtggcgcaaatcggcggagcacgtgagcagaatatcctcaacaacgttatccgcgacaccctcaaaaatgagggggcgctcggcaaccgggacatgatggtgaccacgctgacgccggtatggctggacagtaaaagcaggggcgtgcgtgactactaccgggaaggaatggtgatggagcggtgggacccggagacccggagacatgatcgctttgtcattgaccgggtgacggccagcagcaatatgctgaccctgaaagaccgtgagggtgagcgtctgaacctcaaagtctccgctgtcgacagccagtggacactgtttcgcacggataaactggcggtagcagagggtgagcgcctgtcggtgctcgggaagatacccgacactcgcctgaagggcggggaaggcatcacggtactgaaagcggagtccgggcaactgacggttcagcgtcccgggcagaaaaccacccagacgctttctgtcggcagcagtccgtttgacggaatcaaggtcgggtatggatgggtggagagtcccggccggtcggtcagcgaaacggcgacagtctttgcctccgtcacgcaacgtgaactcgacaacgccacactcaaccagctggcacagagtggaagccatatccggctgtattccgcacaggatgcggcccgcaccacagagaagctggcgcggcacaccgcgttcagcgtggtctcagaacagctgaaggcccgttcgggagaaacagacctggaagcggccatcgcacagcagaaagccggactgcataccccggcagagcaggcccttcacctctccgttccgctgctggagagcaacagcctgacctttacccgtccgcagttgctggccacagcgctggaaaccagcggcggtaaagttccgatgacggagatagactcgaccattcaggctcagattaaggcaggcaatctcctgaatgtaccggtcgctcccggacacggcagtgacctgctgatttcccgccagacctgggatgcggagaaaagcgtcctgacgcgtgtgctggaaggtaaggacgcggtgacaccgttaatggaccgggtgccgggcagcctcatgacagatctgaccgccggacagcgggctgcaacccggatgatactggagacgcctgatcggtttactgtagtgcagggatatgccggggtggggaaaaccacgcagttccgggcggtaatgagtgctatcagcctgttgccggaagatacccgcccgcgcgtcatcggtctgggaccgacacaccgcgcggtgggcgagatgcagagtgccggtgtggacgcgcagacgaccgcctcattcctgcatgacacgcagctgcagcagcgcaacggtcagacgcaggatttcagcaacacgctgttcctgctcgatgagagctcgatggtggggctggcagataccgcgaaagccctctccctgattgcggccgggggaggccgcgccgtactcagcggggataccgaccagctgcagtccatctctcccgggcagccgttcaggctgatgcagcagcgcagcgcggctgatgtggccatcatgaaagagattgtgcgccaggtcccggaactgcgaccggcggtctacagcctcattgaccgggatgtcagccgcgcgctgtccaccatagaacaggtcacgccggaacaggtacccagaaaggacggagcctggataccggaaaattccgtggtggaatttactcccgctcaggaaaaaacgatgcaggatacgctgaaggagggtaaggaaataccgcctggcatgccagtgtccctccacgacgcgattgtgaaggactacaccgggcgtaccccggaggcgcaggcgaatacgctgattatcacgcatctgaacgccgaccgccgcgcattgaacgggctcatccatgatgcccgggtacagaacggcgaggtcagtaaagatgaggtgaccctgccggtactggtcccgggcaacatccgtgacggcgagttgcgtaagctgtccacctggtcagagtatcagggctcagtggcccttctcgataatatctaccaccgaatcgacagcgtcgataatgaaaaccagctgattaccctgaaggacagcgagggaaaaacccggcttctctctccccgggaggcctcagcggagggtgtcacgctctaccgcgaggagaccatcaccgtatcacagggtgaccggatgcgtttcagcaagagcgaccctgagcgcggctatgtagccaacagcgtgtgggcggtgaaagcaatatcaggtgacagtgtcacgctttctgatggcaaaagcacccgcacgctgaccccaaagacggatgaggcgcagcgacacattgaccttgcctacgccatcaccgcgcacggcgcgcaaggggccagtgaacctttcgccatcgcgctggaaggtgtggaaggcagccggaaagcgatggtcagctttgagtcggcctatgtggcgctttcccgtatgaaacagcatgctcaggtctacaccgacaaccgggagggctggaccacggcggtcagccgttcgcaggagaaagccagcgcgcatgatgttctggagcctcttaacgatcgcgctgttaaaagcgcagagcagctgtttggtcgcgccattcccctgacggagagtccggccggacgtgcagcactgcaacaatcaggtatcgcccgcgggcagtccacagggaaatttatctccccggggaaaaagtatccgttaccgcatgtcgcgttacctgcatttgaccgtaatggaaaatccgccgggatatggctgagcccactgacggataaggatgggcgactgcaggctatcagtggtgaaggacggattatgggggatgaagaggctcgttttgtcgccctgcagggaagccggaatggggaaagcctgctcgccgggaacatgggagagggcgtaagaattgcccgggataatccggacagcggcgtgatagtgcgccttgccggcgatgaccgtccatggagccctggtgccatcaccggaggccgtgtctggggcgataccgacggcgtggttacgggggatagtggggtgaatattccgttaccacctgacctgcttgctcaaaaaacggcagaagaactgcaacgccagcagattgaaaagcaggtgcaggaaaccgcgcgtgaactgaccggtgaaaagcgtaaacaggacgaagtgggtgagcagatcaaggacattatcacggatgtggttcgcggcctggagcgacagaagggacaggatggacgattccagtttccggatgaaccggaaaaccgtctcagaaatgaggctgttcagaaagtggtggccgataatcagcagcaggacagattgcagcaaattgaacgggatatggtccgggatctgacccgggaaaaaacacccgggggcgactga

SEQ ID NO: 98656 - DNA, 849 bp, Enterobacter aerogenes
atggataaggttcatcactcaacctatgtacaggtgcataatcctttcccggtttttaccgtaccttgtaagaagggaacacagacacctaaacgtacactaccatttaataaaaaactgatgtccaaagtttcggggtttacggatagctttgtcttttctgttttggtggcagcaacaagagccaatggcacccgcaaaagaaaaccaccagtactgaggcgacgcgccattgacgcattacttcagggactctgtttccattatgatccactggcaaacagggtcaatgcgactatgacgacgcttgcctctgaatgtgggttactcactgaatcctgcaaagggacgttgtcgatatgccgcgctacacgcgctttgcgttatcttgctgaagaactagggttgataacttaccggacggagtatgagcctgagataggttgttatctgccgacggatattacttttaccccacttctgttcgaggcattggatatttcgccagaggcacgtgaatccgttcgcaaaagtcgcgctgagtacctgaatctgcagcgtatggcgcagggaaagccccgtataaatccttgtgaactgattaccattgcctggcaagtatttcgcaaacgatttaaagaatacagacttatgcgtaagacatatggtgagaaaaggcataaaggccgtaaagaggcccaacttactttccatgaaatttctgaacgagtcagaaaggagcttacacaggagatagcgaagggcttgtttgtatcagacctttccacattacgtagtgaaataaaaaatcgggttaaggagaggatgttgctggcacgttgtcattga

SEQ ID NO: 98657 - DNA, 321 bp, Enterobacter aerogenes
atgttggatttatcactaaccaagccagatgaaatagtcttacttctgtgcgaccggttacgcaaagaaagaatcaaccaacagatgactcagtccgagttggcaaagcgggcgggtattggggtgaatacactctccaacctggaatcagggaaaaataccggttttgaaaatattattcgtgtagcaatggtccttggccggacggatgagctggaatcactgttcaaaccaaagcttgaaagtctggacgatctccgccgatatgagtccacgttaacccgtaagcgcatcagaaataagagcttaaaaaatgattag

SEQ ID NO: 98658 - DNA, 1263 bp, Enterobacter aerogenes
atgattagtgttgatgttttatatgatggttggggagagcactggcgttggggaacgttagccacaacgacggcactaacgggacggccggtaatcgtcttcgaatatagtccggaagcacaaaaaaaaaggctggaactggcaagctatacgctaccgctggctggcccgaaactccggagtgatttccctgtgcaccagttagggctccctggaccggtttatgactccctgccagatggatggggaatgctgctcatggacaggttgtttcgtaaacgcggacttaacacggcaagaatcggcccccttgagcgactcacctatatcggcagtaatgctatgggggcgatgtcttataagccggtatcaccggatgttacatcagttcaggaagatatcccggtcagccagttagctgcagaggttcaggaagtacttaaaggtgagggaggggagttcctcaatcgtcttttgcttatggggggctcaccacagggtgcccgcccaaaagctctgttgtatcgtaactctgtgactggtgagtttacgacaatgccttcgcagaaacttgaaccatggctgattaagttccccgccaggcaggaacaccccgaagtttgcgctgtggaaatggtctactcccagtgcctgcgagaatgcgggattgaaacaccagaaaccgaatattttgaattacctgacggacaagcggcttttgcaagccggcgatttgacagagaaagagaaatgaaagtaccgatgcaaagcctcgcagctttcacgggagcagattaccaggttcctggctccatggattatgcaaacttcatcagggcaacccagctctgcacgaatgatatcagagaaaaaaaacgggcatttgagcgcgtggtatttaatgtcatctttaataaccgggatgatcatcccaaaaactttgcctatctgatgtctcaggaagggaaatggtcgcttgcaccagcttttgacatcactttctgtgatggccctggtggatatcaccagatggatgtcatgggggaagcgctcaccatagaacgtaagcatctgcttgcccttggtacccgggaggcggagcttgaaaagaatcagatagacgaattaattgagttgatttcgactgtggctaccacattttccgcgaaatgccgtgatttacttcccggaaaagtgactgatgatacaattagttatattcaaagccgcatcaatgagaatcttgccggtattcaatcctga

SEQ ID NO: 98659 - DNA, 645 bp, Enterobacter aerogenes
atgttcatcagagcttatttaagggcatcgacggaagatcagttcgccgatcgggcaaaagagatgttggagcagttcgttcaggagcggggacataaaatagccagttactaccgggagaatatcagcggtacaaaacttgaccgtccggagctgggacgcttactgatggacagtcaccacaatgatattttactggtcgagcagatagaccgactgacccgtctgagtaacagcgactggatgacgctgaaaaaacagatagaacaacacgagctgcggattgtcagcctggatgtccccacatcatggcaggcgctgtcagataaagatccttcgcaggctgatccaatcacccgcgcagtgataaccgccatcaataacatgcttatcgacctgatggccgcgatgtctcataaggactggctgagccgtcgccagcgccaaaaacagggaattgaacgggcccatacgcagggtaaataccggggtaagcaggccgatctggagcgtcaccagaaagtcctctactatcggcagactaagaagctgagcattcaggaaacagctgaagctacgggctatagtcgttcacaagtctgccgtatacagtccctttaccgacaggaagataaaggattatga

SEQ ID NO: 98660 - DNA, 564 bp, Enterobacter aerogenes
ttgaacagattagtaacaattaggagagcatctgcacatgatgctgagacattgggtgtggttggtcctgccgcttatgctgcggcataccattacctgtggagtgactgcgttgctctagctcatcaactcgatacttttagtaaatcagcatttttggtactgttacaacgagataactcaagggtatgggttgccgaaatatcgggtaaaattgttggttttctaacaatgttaataaattcggaaaatccagttacacatgatattagcggtgcagaaatttcgaggatttacctacttccaggtagccaaaagatggggattggcatgcaactgctgaatgcagcacaagaacatgcgagtgaacttgagcttacgcatatgtggcttgatgtaatggagtcagcaacagcagcaaggaatgcgtattataaatggggtttttcagatatagggagtaaagattttcctcgtcaagtcaaagcagatttatcgaaaatgattgttctgagtataaggctcaatgctaaaggcaacagaacattgtcgtgtatgaggtaa

SEQ ID NO: 98661 - DNA, 471 bp, Enterobacter aerogenes
atggaactacgaagattcgtagatggtgacgaaattgctttgctcaatgtatttttatcctctgtacgtcacatcgcgtcgcactactatacacatgagcaaatagaggcttgggcttctccagatatggacccggaacaatggggcaactacatgagggaattgcggccatttatcgttgaggtggatggcgaaatagcgggatacgcagacgtccagctgaatggatacatcgatcacttctttgtatcgggaacctatcccagacagggagtagggacactattgatgaataccattcatgaaaaagccagacaactgggcgtttatgaacttacgtcaaatgtaagtaaggcagcagaagcattctttctacgacacggttttcacgtagtggagcgaggttttcctgttcgccgtggcgtagtattgcaaaatgcattgatgcgaaaaaaactcttgaagccataa

SEQ ID NO: 98662 - DNA, 606 bp, Enterobacter aerogenes
atggttagcacaaaagagatgatggagcattatgtcatcgatcctcaggatagctactttgttaatggtgtaccgccgattgagaatgttgcggtcgttgcttatgatccgtcgtggccggaaatatatgcagcattggaatctaaaattaagaataaattaggttcgaatctactaaaaattgatcatgtgggttcaacggcagtacctggtctgaccgctaaacccgttattgatattgacgtgacggttgccgatgctgcagatgaagaaatatatttattagcgcttgaaaaccttgggtttagactaattgttcgtgaaccccgcttccatggtcatcgtctttttcattatgaaaatcctagagttaatctacatatttttactcaggacacccctgaaacagctcggcatttgcttttccgagattggcttaggcagtcagaagatgactgtctgcggtacgcgaatgcaaagcttgaggcagtgcaaggttgtagcgtagatatcgcaaaatatcatgaaaataaaaagagagtagttcatgatatttatagaaaaattttccaatctcttggttatttagatagcgaagacgcatag

SEQ ID NO: 98663 - DNA, 900 bp, Enterobacter aerogenes
atgctatcttacatgctatctcaatatgccaagctacctgtgcctgaagttaccctactttcatggctaaaacaatggttgtcagagcaggaatcgatgtgtacagacagaagtttctcggcgcgatttccctggagagaaactggattatgtcaggaatattttttacaacgaaaactcaaaattgatggaaagcaatttcttaccggcccccgttatcagggcggaaatattaacaaaccttttattgatattgtaggtatggattctgacctaaatcatactgcattagaactcattagtaaggaatggtcacaactcagagctcagtatgtccgcattcttgtaccaggccagtccttcccgcagggtattcccgaccagtatatatatgccacctctttttctgaaccccctgaattcaatgataaatctcttactttgcaagtggcgacatacgaagattttgactggtgtagtcaggccctgggcgatgcctataagcatacatggcagtcagttcgcgaactgtctgaaagcaatttggtagcagttgacgacgaagagttgtttgaccatatttctgagagagaagtatatattatctatgaaaacgatgttcgcgcggggttgctaatatgccagaaaggaaatatcgcttttctgagaggatatcgtattactgacaaagtaatacttcctgcttttcgcggtcgatcattgtcagcccgagcgcaacgcctgctgtaccgattattagctcattccgattcggaactatctttgtatatgggcacaattattccggagaatattccctcgatgaaaactgcagaaagagctggacgaacttgcatcctaagttatcaatttctacccatctgcagaacccacgactaa

SEQ ID NO: 98664 - DNA, 405 bp, Enterobacter aerogenes
atgtcagatgctcttacacagttaaacaatatccgtaccttacgttctcagactcgtgaaatgtcattagatgtactggaagatgttctggaaaagtttaaaattattcttatagaacgacgagaagaagagacattacgtcttgcaaatgaaagtcagcgccgcgataaactggaaacacttcgtcagatgatgcttgatgagggtatcgacccatccgaacttatggctgctattggctctccgggtaaggttaaaaagacgcgctccccacgccccgcgaagtatcgatatactgacgaaactggagagtcaaaaacatggtcaggtcaggggcgaatgccgaagcggatctcaaagctgattgctgaaggtggggaattaaaagattttgaaatcagttaa

SEQ ID NO: 98665 - DNA, 219 bp, Enterobacter aerogenes
atgacctctagaattacaggcctggtaaaatggtttaacgaagacaaaggttttggcttcatctctcctcttgatggcagcaaagatatctttgtccatttgtctgcacttaatggcgacaactttaaaactttatttgaaggacagaaagttgaattcgccattcagatcggagacaaaggtcctattgctgcaaacgtaatgctttgcgataaataa

SEQ ID NO: 98666 - DNA, 231 bp, Enterobacter aerogenes
atggtaaatatgcgattattcgggtggcatccgggatatgtttcaaaccaggcgaaattattcaacgaaacgattgtgagtggttttataaacttaccaaaattcggcttctttcttttgagtaccttgatgatgatgaatcaagaagacaatttcttgagtatcaatgataaaacatggatttataacagaataactttgctggcttacaattcattcctgactctttaa

SEQ ID NO: 98667 - DNA, 339 bp, Enterobacter aerogenes
atgaatcactctacttggcatgagccagaatctatcccgtatgtggtcacgctttcttcaacatgccagattttcattattctcgagcggacggtgaacgtcgaaatcgtggcgtggtggcttcgcaaaccggcggttgtagtcagtcatgaactcatcggcaaaggcgtttgctgcctcgggcgtactgataccgcgaatgacgaggcgatcctgcaacgtcaggtgagccctgctcaacacgagcagtgtgcaggccggaccatgatcctcgcaccaacgatgctcacaaccatcaatctggatgagttctccggtgcaggcccgacgcggtcgtag

SEQ ID NO: 98668 - DNA, 1416 bp, Enterobacter aerogenes
atgttaaatattaaaactaagcaattcagccagacggtggtgttgttacttactctgcatagcgtgagttatgccgcaacaacatcaacacaacagcttgaaatacaagccaacgaaccgttcaccgcacatgttttggcgagcaatctagatgcaccttgggatatggtatggggccccgatggttatttgtgggtgactgaacgtaaggctgcctctatagttcgtatcaatccagagactggtgagaaaaaagtagcgattacgctgagcaacgtgcatactggcccacaacatgaaggcgttcttggcttagcattatcgcctaactttatgaaatcaggtggcgataattatatttacacagcatatacctatataaatggtaatatagaacacgcaaaaattgttcgactggaatatgacccaaaaactcaaaaactaggtaatgaaaaagaaattctgacaggtttccctgcggggaatgaccacaacggagggcgcctacgctttgggccggatggtaaactcttttatactatcggcgagcaaggacacaaccaaggagctaatttctgtaaacctattgatgctcagcgtattcctactaaggatgagctaaaaaataaaaattatgcagcttatgctggtaaagtgctgcgccttaatactgacggatcgattccagaagataacccaatcattcacggaattaaaagccatttatacacatacgggcatcgtaacccgcaaggcctagtctttatcggagatactctatacgcctctgaacaaggcccatcttctgacgatgaactcaacatcctagaagccggaggaaactacggttggccgcacgtagcaggctttcaggatgatcaagcgtatgtatatgctaactattcaaaagcagaaaactgcccatcgctaaaatgggacccaaaccatattcctgcaggtgttccgatacataaagagactgactggaaagcctccgactttaaagcaccaattaaaacatttttcactgtgaaagacggctactcttataacgatgctaactgcggtgaggattctgcatacatttgttggccaactatcgcaccttcaagcgtagcttactaccctgtgaatggagtgattaaaagctggcgtaattctatcatcgtcagctcaatgaaaaatggcgcgctctatcgcgtactacttaacgcagacaagaaaaatgttcaaggcgacgtggctaaatatttccacaccactaaccgctaccgtatggtcgttgtaagcccagatactcgcaaaatttatgtagctacagataactttggtaatgtgatggatgagtccaaccatcctactcataacctaagtaacccgggctcaatcatcgtcttcgaatatattggtaagtaa

SEQ ID NO: 98669 - DNA, 567 bp, Enterobacter aerogenes
gtggcgaaaagggttatcaacaacaataaaagcgcgcggctatgtcgggtgtcggtggtgggtatcgaccggcccggcggccatgaggttcgtgcctgcccggcggacggcgaactgctgttcgccccgtgccagctgacgctgcaggcgggcgaaagcgaatgttttaagttctattatcacgggccgaaggataaccgcgaacgctactatcgggtctcgtttcgcgaaattcccacccgcaaccaggtgatgcgcgcctcggcgggcgggcagatcagtatggagccggtagtggtgatggataccattctggtggtacgcccgcggcaggttcagttcaaatgggcgttcgataaagcgttgggaagcgtcagcaataccggcaatacctggtttaagttgttgatcaaaccgggatgcgacaccatggaagaggagggtgacgcctggtatctgcgccccggcgatgtcgttcgccagccgtcgctacgtaagcccggcaaccactacattatctataacgagagatttattaaaatcagcaacgattgtcctgttaaataa

SEQ ID NO: 98670 - DNA, 465 bp, Enterobacter aerogenes
gtgccgacgcgtgagggatacgtcggcagcggcgaatcggcgctggatttcggctacatcgtcaccaccagtggcaaaactgccgccgatgaggtgttgattaaagtgaccggcccgtcacaggcgattagcgggcgctcgtattgcctgttcagctcggcggacggtaccgcgcaggtgccgtttccggcgttgctctctttcattacccaaagcggggcgacgaaaagttacgacgccggctgcgatgatagctgtcatgatatgaccgatgcgctatggctgaccacgccgtggactgatatttccggcgatgtggggcggatggataaaacaacggtgcgcttctcgattgcaatggacgatcctatctcgctgcgcaccatcaccgacaacggctggtttggcgaagtcagcgcttcaggagagattcatgtccaggcgacgtggcgtcacattaattaa

SEQ ID NO: 98671 - DNA, 135 bp, Enterobacter aerogenes
atggaaatctctgtgtttgatgagttcacaggtttattgaaagacgcctctctgttgacacgcttcgatcacatcatagttgatacagctccgaagggccgcacgattcaacttctccagctttatgatgcctag

SEQ ID NO: 98672 - DNA, 477 bp, Enterobacter aerogenes
atgattaagttattttattctaaaactatattttgtttgttttttttaattactaccagtgctctcttttgtttttacaagtttcattctggtgaaaaaactttcaatcttgcatgttctgctaaaggaattttatctgttaatgattatactttaacctatgttagttcatacagatttaaaaaaaatgggaaaggtgctactgcattaacaggtaaattagaggggaaagatggtgtagtagacaaagttggattacaaatctattttgattatagcatagattcaggtcttttgatgttaaaaactattaacatagtcaagcaagtggaaaatacagcttctgatgaggttattaaaaaagttttcccttctatttattatagattaaatagtatacataatgttgccatttttaaaatgggtagcgggtatagatttgattttaatacataccctatattgtattgctattga

SEQ ID NO: 98673 - DNA, 795 bp, Enterobacter aerogenes
atgaccgttcattcatatattattaacagaaacattttgtttaattctaaagagtgttatttattctctacagaaagtggtaatcgcgagatcataggtagtaatccctcagggttgttgttgtatctgattaaaaatcaaggtagcacagttacacttgatgaaatcagtgattactttatgggaaaaggacgagtggtcaatgctactacagctatacaatatattagtaagttaaggaagacgctacgatctcttgaagaaactggttctgtgattgaaacaataaaagggggggggtattatattcctagccatattgatatctctgaatataattcaaatgatagtgttgtaagcaattctgatataaacacatatcaagagtcttttgatgaaggaatttctgaaataccaattgctcatcaagggtttaaattgaatgggaagtttactagtataattcctatggtgtttttatttattttttctttcttgatttttgttatatggaattcatatttttttactcaccttggagatgttgagtatagaattaaaaaagttaatgaaggatgttctatctcaattgatcatgattatccggaagagggaagttatgctgaaaatattttaattaaagatttaagtcgctattgtaataaatataaatttgcttatttgacgtatttcgattattcaaataactattctattatattttgtaaagatcctatttacaaaagtgcggatcgtgatatttgctcttctctgtcgaggttagggaatgattaa

SEQ ID NO: 98674 - DNA, 576 bp, Enterobacter aerogenes
atgtatccaccaacaacattaaaaaaaagagaaataacacaaagagtaatttttttaagtgaatgctcctacatgaaagctgggttaaaatccctgctatttaaaaaggccgaagaaattggtatcaatatacagtatattgaacttaaccccgaagactgtatccttgacttagccgattattacaggaatattagtgacatccaggtaacagtactatgtgatacaagaagcagacatttcccatatttctttgataagttgagaaaatttgaaacgcctattaagaacaggaagacctcatggataacaaatctagcaccatcgataaccaataaaccacagcaatactatcagagctatgcgtatcggctaagtgctcttgagaaccagatagtaaggttattgatgaaagcatggaaaccgaaacaaatatctgagtttattggaatggacgttaaaagagtcagttattataaaagaaatgcgatgagaaaaatgggagtcatgaactcgcatgaactctttcatagatattacggaagcagcaaactaagggatattgcaatattataa

SEQ ID NO: 98675 - DNA, 540 bp, Enterobacter aerogenes
atgaaaaaggtaattttagcatctgttgttttttctgctattgcgctcaatgccgctcacgcagcctcaaacgcacaaatgactatcactgcagatgtcgttgctgcgacttgtgatgtgtctttatcaacatctgctatggatctgggtaactattctccaaaagattttactgcagttgcaactcctattgctgccagcactaagcagtttactgttggtattaataactgtgatactccactggcagcaggcgatactgctaacttggttatttcagggcaaactctgggcggtaacccgaatattttcaactctaccggaacaaattccggtattatgctgaatcaaaaaggttcttccacttatctgaaaaatggtgacaagctacaagttgcaactgcaactactccagatcctgcagattttgccggtaaaattattacccttgaagcaggtgtagcatctaccggaaccgatagcagtatcgaatttggtcatatcagcgcaccagttctgttcagctttgcatataactaa

SEQ ID NO: 98676 - DNA, 714 bp, Enterobacter aerogenes
atgaaaaaaatttttactgctaccgctactgctattatttttgtttttttttattgtacagcactagctgatggttttgggttaaatgttactcgagttattttcaaaggaaacaatgaaagtacaacagtcgtactcagaaattcatctcctaaggatacatatattgttcaggcgcgtatgagcaaaacagtagatggattcgaggaaactccatttacgattacaccaccaatatttcgactggaaccggaatcaacaaataatctacgaataaaactcaatcacattaatgacttaccacaagaacatgaaagtgtattttatctcaacactagggcaataccagcaagtataaagaaagatgaaaaagatggcattaatcgtataagcggaacagcgcagtttggggttgggactattataaagctattttaccgtccaaaaaacttacctggttcctcagaagaggcacagaagaatgtttccttcaaaatagtaccaaatggtataaatgtaaaaaataattctgcgttttacgttaacttctccaaactgagtgtagaaggagaatcattactgaaaaaaaacctaccagcgatgatttcaccttactctgatgttacttatgtgacaaagataaattcaggaaaagtcacatggaatactattaacgattttggtggtgtaaatgtttatgaaacggatttgtga

SEQ ID NO: 98677 - DNA, 576 bp, Enterobacter aerogenes
atgtttatgaaacggatttgtgacggagtcataatcgttatatttggattaatcatcctcagtatttcaaaatcttttgctactaatattaacatcaactttcatggatttataaaaccagggagctgtgatgtggacctagataagccatcgcttaaccttggtgatgcagactatttcacactcaaaacgggaaatattctacttaacccaactcaatttaatgtaaatataagcaaatgttttcttgcgaaaaatactattttacgtcctgctatacagattgatggtgaaggctttaatgctagtgataaattcatattcagtagtaatgactcctcagcaaaaggtattggcgttatactttatcaaggtaacagcgtgcccgaatattatgatacgtctctaaaatctggtgattatatagacttaggaggtacgggagcaatacccgaagactcaattatccctttttatgtaggagtatcatgtggttcagtcactgactgttcatcgataaatgtaactccgggcaaaatggttgcaagaataatatttaactataggtattactaa

SEQ ID NO: 98678 - DNA, 669 bp, Enterobacter aerogenes
atgagatttaatgttttgttattatttttatatctaatgcctgtcatatctttagcgggaataatagctactcccacaagaataatttatgacaaaagtagcgaaaaacacactgtggtaattagaaacgaaagcgagtcaacttttctcgcaagtgcgatttttgaggagaaaggacagcctttctttactataactccgcctataattaaacttaggccatatgataagagtattcttagagtcagaggtatagataccaaagaattaccaaaagatagagaatccgtatttagttattcaataaccatgatcgcaagtgatgataacaagcccttactacagaacagaatcgctatggctaacagatactggtttaaattattttatcgaccagacaatataggcaacccacattcaaatagttgtgatttggaattttataaatctaaaggaaaattagatgtgaaaaataactcaccattcttttccacattagtttttctttctacaaatggtaaacgtatttttttgacccctgatgaggcaatgatagcaccgtatagctcgcaacagattaagatttcgagtgatgtgaaagttgtagaatggattcgtattaatgattatgggagtctggaaaaaaaatgcacatcttctttgacttaa

SEQ ID NO: 98679 - DNA, 744 bp, Enterobacter aerogenes
atgcacatcttctttgacttaaaaaaaacattatgtttcattttatattcatttattttaatatcgccttcatggggtaaagatattaatggaatatcttttaattttacacgtttagtgatgactgataaagatacaaaaggagtttattttaaagcgtataataataatgcttttccaatacttgtacagagctggggtagtaaacttgatacagatacagggtctgtcgatgactcaacatctgatataaaaatcccatttatagttctccctccacttcagagagtagagccaggggaagaatttaccctgcacttacgttttaacggagaacgggttccttctatgacggaatctgtttatttattgtcattcaaagctatccctgtatctggatccaaaacggctaaaacactttcgatgactgttgtaatgaatatcaaagtttttatcagaaatcaattaccggataatgatgggatatcatctgcaattaataaagtaactgcatcatggcaagcagatggagtgcttataaataatccatctccatactggctaactctgtcatcaatgatactagataataaggaaattgaaagaaaggaattgttaaaaatggcaactccaatgcaatccaccttattcaaatggaagaatggaagacctcgagagatattcataaagtttatcgacgagtacagtatggaaactgaaactgtacgattaaaaatagaataa

SEQ ID NO: 98680 - DNA, 2538 bp, Enterobacter aerogenes
atgaacaaaacttgcaaaaaaaaattttttttatttaagatcacgataacatcattattcgttaataatgctatcgccgatgattattttgatccaggtttacttgctataggacaggtttcagttccgcatgttgatttatcacgatttgaaaaatcaggtgcaattgttcctggtatatataaccttaatgttttcataaatggagatgaatttggatatcaggatattgaggttgtggttctcaatactggcgagcccgggccggttgttacacctgagctattaagaaaacttcatgtcgatattgattcgatcgatacttttcgcgcactaagtaactctgaaaaaatcactaacttaggagctttaattcctaaagctactgtaaatattgatttgaaagatctgacacttctgatacgtgtacctcaggccagaatggatattaccgctgcaggaactgtcagccctgagttgcttgataccggtatacctggtcttatgcttaattacaacgttaactcaaaccgaacctggaacaaaattagttctcctagttcaaatcttttcagtagcattaatggtggcctgaatcttggagcatggcgtttacggagcaattatacgtacaaccgcaatgaaggaggtgggtaccgttacagtagttcagacttcaatggaactcacataaagagaacactaatcccttttaagacggaattatctattggagaggtaaacacttctgcagatgtctttgatacatttccggcaagagcaattatgcttagttctcttgagcaaatgaaaccttacagtttgcgaggttttgctcctgttatatccggtaacgctgagacaaatgccagagtaacagttctgcagaataataatattgtttatcagacttacgtttctccgggtccatttataatcaatgatttataccaaacagcaattggagcagatcttacggtaatgatacgtgaagctgatggccgggtaagaacgcagcagattgcgtactcttctttacctaatatgttacgccaaggagcttataaatatcagttagtggcaggagattacaataataattatagcccccatgcagattcatctcattttattcagggcacgttaacttatggacttcccatggatactactctttatgggggggttctggtttctgataaatattactctggtgtcttaggggctggtttctctatgggcaccttcggcgcactatctgcagatgtgactcagtcatacttatcagaagtatcagataatacttcattatcaggtcagtcatatagacttcgttattccaaaagtattatggaaactggtacttctgtagatcttacggcataccgttattcaacaaaaaactattataattttacagattttaacaaaaaaatgtattcatctaattctgatgaatatccatggatatcgaaaagacgtagaagtagtttccagactcgtatttctcaggacttcaataaatttggaatgctctctctggcagccagcagggatgattactggggaagtagcatggtaaataataacctctctgctagttataatattacactaaataatattaattttggtgtaagttacaatattgagcgaattaaaagtaatgatagctggccggaaaatcgtagcatttatatgaacgttcaaattccattcaatttttttgaccgtgatagcgtcaacaacgcttatgctacctatatgttatcaaaagataatcatggcagagttcagcaacaggccagctatagcggaacaatgcttgacagccgactctcttattcagcgcagcagacctggagtaatagtaataatgatcattcaatcagcggtctcaatttaagttatcagggaagcaagggattgggtagtctaggttatagtcaaagctctgaatggcgctcacttaatattggtttgaatggaggaattgttgctcattcaggcggtatcacactttcccaggcgctgggaagttcagttgcgctggtgcacgctcctgaagctataaatacaagagtaattaatggtaatgtcaataccgattcctctggttacgcggtagtaccttatcttgctgatttccagaagaatagcatatcattagaccctacaactttgccagaaaatgttgagatctataaaaatacagtgaatgtataccctgttaaggactctattattcgtgcagagtttaaaaccagatctggttaccaggctatttttactttatttgataagcacggtaagtatatcccatttggctccactgtttcagttctcaaggacaacaacgatgaagatgctatgtttattgtaggtgataaaggccaggcatatattagcgggcttgcaacgagcggaacattaattattcgctggggtaatgatacaatccaatcgtgccaggctaattataatctaaaagatggcataaaaagcaatattattagtctttcactgacctgcaactaa

SEQ ID NO: 98681 - DNA, 1122 bp, Enterobacter aerogenes
atgttattgagatttatgtatttattaattagtataattgcattttcgcacttgcctggttatgcggtaaccatcctagttggtccaggaaaggggattgtatggtccggatatccttttaatttgagtgtcactggtacacatggaaatacctcacactcttattattatggccttggcccattatattctggcggttcttgtgttgagtcagcaaaattcgaaactctgcctgaaggttttgttggttataatattacaactggagtttatctcgtaccaagagcccgtgtaagtggacagttatattatggaccagtcaggaatgatccagccagtgcatctaatcacattttttcaggtacattaggctatcctgagactaaagtgacagatcaaaacggcacaccatgggagttagcaacaggatggtgtactagattatctaatgtatatcctgttcttggtaaaaataaggaaatgaatcttagcggtgactggataatctacgcaacaggtaatcaaataccgtcatcaactgtacataaacttagtagagatatgtcagcattaatacgtactatcattaaccccatgtcaggctatgaatcagatacaggaccagaccacttaacccaacttttactatcagaaatctcagtcagaataattggtgtacaatgtagtgttaatacgcagacaaatattaattttggcgaaattctttatgatgccagaccaaacactgagttagcttccgttacatccccttttactataagttgtaaacaagggttagaccccgttacagttaacattaatgcctccttcagggctaacactggatattataacggagattttacacaattagctttaactgaaggagggggatatattactggagaaattggtaaggggctgactggaagtggggaatgtacttctcatccttcttctcttagttttgctcaggttccaattaagctggccacacttctttcgactgacccgggtgttgatgcgaataacacaataacctggcgtctctgttcagggggagcagatcttcctgtcggaggtataaacgccagtactgaactgagtattgtgttcagttga

SEQ ID NO: 98682 - DNA, 222 bp, Enterobacter aerogenes
atgaagaggcgttctttcgacaaacagatcattagtattttccgcgaggattgtgctgggatttctgcccgcgagttccgccgtaagcacactatttccggtgccaccttatattcctggcgcaagaagtatggcggtatgatggtgacagaggttaagcgcctgaagaataggggtcagtttggatatcgaaaattattgtacgttaaggtcgttttttga

SEQ ID NO: 98683 - DNA, 543 bp, Enterobacter aerogenes
gtgtctggcaacctcgataaagcagggaaccgtgacggcatccctgatgctgaaaaactggccagctatcccaaacaaaatggcctggcaaagacgctgagagaaattggccgcattgagcggacgctgtttatgcccgactggttccgcgatccggttcttcgtcggcgggtccagacgggactgaataaaggagaagcccctaacgcgctggcgcgagcggtattcctgcaccgtctgggtgaaatcagggatcgtaaaccggaaaatcagagctaccgcgccagcgggctgacgctgctgacggcagctatctcgctgtggaataccgtctatatggaaagagcggtcgatgccctgaagcgtaaagggatgaatatcaacgagcaactgctatcgcatttgtccacgctggtctgggaacacatctatcttacaggcgattatatctggaaaagcaaccggataccggctttaggtaagtttcgtcggctgcggccagctaaagtaggaaggtcaaaaaacgaccttaacgtacaataa

SEQ ID NO: 98684 - DNA, 597 bp, Enterobacter aerogenes
atgagcacgttgcgctcggtggtgtcacagccagtacaaggttataacatggattatccgcaatggaaagagtccgttatccattggtatgcacaacagtatgatactgacatcaagccgcactggttgcattttattcccggtgtcataaaaactatcgtactttctttaatggcgcttacccgtctgggcgataatattttaacctgtacaccaatatatgacccctatcctaatctggtaaaaaccagcggcagaaatttgattcaaacgcgcctcattgaaaaagacggtcattacgaatttgactggcatgatttcagcgagaaactcaagcggtgcaaaatatttcttttcccttcgccgcataatccgggcggtatggtgtggtcgcgagaaacgctggaaaaagtcagtcactattgcaagcttgctggcgtcattattctgtctgatgaagtgcacagtgatttaacgctgccaggcaagcgccatctgccgttttttactctcgatgattggcataccaaaaatggcaggacgcgtagaacaaattacactatttgccccacactgtggggtaaaattatcctataa

SEQ ID NO: 98685 - DNA, 231 bp, Enterobacter aerogenes
gtggtggatgattttaaccatgaagcactgacgatagaaatcaacctgaatatcccggctcagcgagtcatccgggtgctggacaggatcgtggcaaaccgcggctacccgctgaaaattcggatgaacaacgggccagtgctggtctcgctgttacaatgtaccaaagaacatgacgtccagttcagatttattaaaccgggtaatgagtggtgtaacactaatggttag

SEQ ID NO: 98686 - DNA, 858 bp, Enterobacter aerogenes
atgcaattcgactatttagcaaagcatatcgataacgatggtcttgccagaattaatgctgagacgagaagtaatacagataaactcacgcacgcgggtaaacttgtttatgtaaatgatgattattgcgaaataacccgtaactactcatcatcttatggcgctaacattttattagttgcgttattctctcccattattcttgtgatagttatcggagtcattgtttttttatatgaaataatttttgattttgaatggtatattaacgcatattggggaaatgagcaggaattaaatagcacactcctttttcattttgcaattttactttcaatagccttatcctttattttctcagccatcgtaaattacgcttttttcgcacctcgccattatccaattcgctttaaccgtaaaacaggaaaaatctatgtttacgagtatattctgtctggtttaattaagaggcaaccctatacatttttccttcacagccctttttataaaaaaccaaaaccagaatgcaaggaatttgactggagtgatataaaagggagctattctctaaattataacgcaataataaactgtcacgtatatgaaaaccacagcatcgttgactccttcatcctcacctcgaatgatacaggaactgaaacgatgttgatgaataactataaactatggctgtggatcagtagctatatgaatttcaaagacgagatgctagatatgaccgtcaatcctaacgtgggcatttacgggcgcaaagtcgaatggcctgaggtgatacttaaaaaatctaccgcgtcatcgttagaagaatatgaaaaaatcgccgaaacggtatcatag

SEQ ID NO: 98687 - DNA, 867 bp, Enterobacter aerogenes
atgctcccgatccaaaaccactatttagcaaagcaaattcccgatacggatcttaaaaaccttatcactgagactccaggcgatacagataagctaacacattcgggaaagttattctatgttaatgatgattattgtgaaatcacgcgtaatcattcaacattttattggatgaacattttctatatcattatgttattacccttaactattttatcatgtttggtaatcattatatttttatactatatgattttcgattttgaaagttacgcggcgtttttttggcaagaaaaaagtgaattactgctaacactcaccattcattttagcatcattgcaatatttgccatagcttatttctcgtcttttgcagtaaattactgcttcttttctccacgacattacccaattcgttttaatcgaaaaacaggaaaggtttatatctgcgaatatgtttttatgaagatacttcaaagaccaaaccgcaactataaagccagaacccgctttccattctataaacggacccgaccagaatacaaagaattcccctggagttctataaaaggttattatgatttttataatcagagatcgtttatttgcttacatgcttatgaaaatgaaagtattactgatatatttacgcttatttcagaaaaaactatcattgagtctaaatatttaaataactataaactctgggcctggattaaccgctatatggatttcaaagacgagatgttagatatgaccgtcaatcctaacgtgggcatttacgggcgcaaagtcgaatggcctgaggtgatgcttaaaaaatctaccgcgtcatcgttagaagaatatgaaaaaatcaccggctaa

SEQ ID NO: 98688 - DNA, 1758 bp, Enterobacter aerogenes
atgaaacgctcaatgctttatctggtgtgtgcactggcgatgtctcctttttcagtttattctcagcaagataataaaataattatatatggtggggacatttatagcgctgatgcgtcaaatccgcatcctgaagctattggtattgaaggggaaaaaatcgttgccgttggtaaataccaggacgtccttaaactagttggtgagcatgcccggcaaatcgatctaaaaggtcggtatctgatgcctggattggttgatacccatgcccacgtcgctaatgctggttttcagacgctaacgctggaattccccggcggcttgcaggatgccgcagcagtgcgtgctttcgtcgctaaaaataaagataatccgcagcgcgatctgcatggtgtgcagtactacagtaatgtgccgttggattactgggatcgaattagtctgctagatagcgtattcaatgcgccggaatataaaaatacgccggtggtgttgggtggcgctgacgcccataccggctgggctaatcaggcaatgctacgtaaagcgggtttaacaacggaaaaattccgacatgcggatagcgcttttaaagcgggaacgggattgacagctgacggtaaaatcagcggttttgtcactgaaggcgcgtgggatttcgtgatgaatgccatccctgccgttgatgacgagacattatcccgcgccattattgcgggagcggatgccatgaaccagttcggcattactgcctggatggatccgctaagcaatattcgcccattgtcaccgatgtttgacgccagccctaatcgcaacgatgtaggcttgcttccagcatactcggcgttggctaaggccgataggctaaccgcccatgttagcggcctggcgttggtgaatattaatgccgggccttcaattattgacgatgtgttagcgctgcgcgataaattctctcaaagccctgatttcaggctggcggggattaagatctttcaggacggtgtcattgaatacccttcacaaacggcgaaactgagcctgccttatttgaatcgtccaggctatcgcggcagcgaatcgttaaataaaaccaggttctgtcagctgattacccgtacggatgccgagcatctgatcgcgcattttcatgcgatcggcgatcgcgctgttgaagaatcgctggatgccgtagcttgtgcccgaaaagccaacggtaatagcgagacgctacatagcatcacccatctggaagtggtcagcccgcagagctaccctcgttttcagcagcttaatgttgcggcctcgatgcagctattatgggccggtaaggatggtgatggcgccacgacaaccttactggagggcaaggtacctgcacctctgttaactcatctttatccggcaggcgatctgtaccgtcaccatgcattgattgccggcgccagtgatttaccggtgtccagcgcgaacccgctattggctatttacacggccgtcacgcgcaggggggagttgggcgagctaccgccggatagtgagaaaattagtcgggaggcgatgcttcaggcctatactttgaatgcggcgaaggtgattggccggggagatgaaataggttcgctggccgtaggcaaaagcgccgattttgcacttttcgatcgcaatcttgaaaaagtgagtattgaggagttgcgtgacgcgaaggtcgtctggacgatgtttgagggccgtcaggtttatcaagcggagtga

SEQ ID NO: 98689 - DNA, 705 bp, Enterobacter aerogenes
atgcatttgattgaatctccatatggcgatatcaccggtcttgctttgcagatcggattttccagttcgcaaaattttgctaaagcttttcgtcagcatttttcactcacccccggtgagtttcgtcgtcgttttgcgagacaagagaaaagcaaacctggaaacgtcagtattgtagaaagcgactattctcaatccgacgcgatgttgagcacatggaatgatgctggttttatcgcggctggcgtggaatatttaccggcagtgcgcctggcatatatgcggcgattcggcctgtatgggaaagagacgtgccaacaaacgcacgcagacctgttagcactgtttcctgatacgccattgcagcccggaggaatgatttgcctctattgggattcgccagaagttacaccggagttacgttgccgcaccgatgtgtgcgtagaactcgctggcagtgtaaaaaccgggcgagaaattgccgtacagacgcgagcgagtgggcggtatgccatttgtaagtttgctgtttatggggaagatttggataccgcctgggatatcgcatttgcttgggttaatactcagggttatttaaaaggcgatagcccgtgctatgaaaaatattatccagaaacggatgtctctcgcgattattatgttttcgatattggtattcctttgaaaaacacaccagctgaataa

SEQ ID NO: 98690 - DNA, 156 bp, Enterobacter aerogenes
atggtgagtaccgatggcaaaccctcggttctgtgcatgggatttgttatcctcgttgcacattcggtccgttttgaaagtggggctgagctgattcgcattattagcgcccggaaagcagacagcaaagagaggcatcgttatgagcatggttaa

SEQ ID NO: 98691 - DNA, 303 bp, Enterobacter aerogenes
atgagcatggttaaacataaacgcgacaatccggatacgcttacagtcgggcgtgatgctgaactgaaagcgctggcgaagaaaacggatgataatattgattacagcgatattccgcaaacagcggatgagcaatggtcagatgcggtgcgcgggaagttttatcggccattaaaaacgcaggcctctgtacgcattgatgccgatattatggagtggcttaagcgcccgggaaaaggctaccaaacgcgactgaatgcgattttaagagaagcgatgattcgcgaccttaataagaaatag

SEQ ID NO: 98692 - DNA, 336 bp, Enterobacter aerogenes
atgactaccccgcattctattgcagaattcaccgatccagaagtctccccggccgttagtcgtcaattaaccgtgagttatgcgactcgtcatcctgattatcagcgtattccggcgttgaccatgaagggtcagtggctggaggcggcaggttttgccaccggtaccgcagtggatctcaaggtgatgaacggctgtatcgtgattaccgccaaaccagcagagccggagctcaccgccgctttgcgtcaggtcagcaagctgtcggcgcgtaagcaaaaacagatacaggcgttaatcgacgccatcgtcgggcaaaagcagaagctggcatag

SEQ ID NO: 98693 - DNA, 1755 bp, Enterobacter aerogenes
atggcggtggaaaaactgattgtcgatcatattgatacctggaccacggcgctgcagacccgctccacggcagggcgcggcagctcgggcaagattgacctgtacggtattaagaagttgcgcgagctgattctggaactggcggtgcgcggcaagctggtgccgcaggatccgaacgatgaaccggcgtccgagctgctgagaggaatgaaaaagcagcaagaagacttaattaaagaaaaaaagataaaaaaaccgaaaaaactcccgccaatagatgaaattttagaatcaatttcaataccacaaggctgggagttgtgttatttgaatgatattggcgattggggggctggagccacaccaaatcgtacaaattctggatactacggtggaaatattccatggtttaaatctggagaattatctgaagattacataaccgattcagaagaacatattactgcattggcactaaaagaatgctccttgcgtgacaaccagccaggagatgtattgattgcaatgtatggggctacaataggcaaaacatcaatactcaatactcgttcaacaagtaatcaagccgtctgcgcttgtacccctttcgatggtttatcaaatcagtatctgttgaccttccttaaagcgagtaaaagagtatttacatccatgggtgcaggtggagcgcagcctaatatttctaaagaaaaaatcgttgctacccattttgcattaccgccgcttaaagaacagttgcgaattgtagaaaaagtcgagcaactcatgtctctctgcgaccaacttgaacagcattccctgaccagtctggacgcccatcaacagctggttgaaaccctgctaaccacgctaaccgacagccagaacgcaaatgaactggccgaaaactgggcgcgtattagcgagcatttcgacacgctgtttaccaccgaagccagcattgacgccttaaaacagaccattctgcaactggcggtgatgggcaaactggtgccgcaggatccgaacgacgaaccggcctctgaactgctcaaacgtattgcgcaggaaaaagcacaattggtaaaagacgggaaaattaaaaagcaaaaaccgctgccgccgattagtgatgaggaaaaaccgtttgaacttccagatggatgggaatggtgccgcttaggcgaaattgtgactatcagaggtggaaagcgggtgtcaaatggctataaattactctctactgttacaccgtatgtttatatccgtgtttctgatatgaaagatggcagcattgatctcactgatcttagatatattgacagtgatatgcagaaaaaaatatctagctatatcataaaaaaagaagatatttatatgacaattgttggtgcaacaattggaaaatgtggaacgatccctgctgaactcgatggtatgaacctaacagaaaatgcggcacgccttactcctcatgcagaattgtccaagcaatatttatttcagtgtttaagaagtactttttgccaagctcaatttatcgataagacattacaggtaggagttcagaaaatggctcttaatcgattatcaaatacattgattccactaccccccgttttagaatgtgagaaaatagttaataaaataaatgagattgagacaatttgccatggtatagcagaaaaaataattaatacccaacaaacccagctccacctggccgacgccctcaccgacgccgccatcaattaa

SEQ ID NO: 98694 - DNA, 1470 bp, Enterobacter aerogenes
atgtcaatcagctcggttatcaaatcattacaggacattatgcgcaaagacgccggcgtggacggcgatgcgcagcgcctcggccagctctcctggctgctgtttctgaaaatctttgacgcccaggaagaggcgctggaactggagcaggataactaccaactccccattccgcagcgctacctgtggcgcacatgggcggcaaacgccgaaggcatcaccggcgattccctgctggagttcgtcaacgatgacctgttcccaacgctgaaaagcctcaccgcccccatcgataaaaacccgcgcggctctgtggtcagacaggcgttcagcgatgcctataactacatgaaaaacggcaccctgctgcgtcaggtgatcaacaagctgaacgaaattgacttcaccagcgccagcgagcgccatctgttcggcgacatttacgaacagatcctcaaagatctgcaatcggcgggcaatgctggtgagttctataccccgcgcgccgtcacccgctttatggtcgatcgcgtcgatccgaagctcggcgagtcaattatggatccggcctgcggtaccggcggcttcctcgcctgcgcgttcgatcacgtaaaaaacaactacgtgaagagcgtggccgatcaccagacgctgcaacagcagatccacggcgtggagaaaaagcagctcccgcacctgttggcgaccaccaatatgctgctacacggtatcgaagtgccggtgcaaattcgtcacgacaacaccctcaacaagccgctgtcgtcgtgggatgaacagctggatgtcatcgtcaccaacccgccgttcggcggcaccgaagaagacggcatcgagaagaacttcccggcagagatgcagactcgcgaaacggcggatctgttcctgcaactgattattgaagtgctggcgaaaaacggccgcgcggcggtggtgctgccggacggcacgctgtttggcgaaggcgtgaaaaccaagatcaaaaagctgctcaccgaggagtgcaacctgcacaccatcgtgcgtctgccgaacggcgtgtttaacccgtacaccggcatcaaaactaacctgctgttctttaccaaaggtcagccgaccaaagagatctggttctacgagcacccgtacccggcgggcgtgaagaactacagcaaaaccaaaccaatgaagtttgaagaattccaggccgagatcgactggtggggcaacgaggccgacggcttcgccagccgcgttgagaacgagcaggcgtggaaggtcagcatcgacgaggtaattgcccgcaactttaacctcgatatcaaaaacccgcaccaggcggaaaccgtcagccacgatccggacgaactgctggcacagtacgcgaagcagcaggaagcaatccagaccctgcgccaccagttgcgcgatatcctcggcgcggcgctctccggtaaggaggccaactga

SEQ ID NO: 98695 - DNA, 2430 bp, Enterobacter aerogenes
atggctgagctgaacctgagtaccctgacggaagcagacatcatcaccaaacgcgttatgcccgccatcctcgatgttggctgggacaacacaacgcaaatccgacaggaggtcaaactccgggacggtaaggtcatcgtgcgcggcaaagtcgcggcgcgtagaacggtgaaatccgccgatatcgtgctgtattacaagccgggcattccgctggcagtaattgaggccaaagccaataaacatgaaattggtaaagggatgcagcagggaattgaatacgcacgcctgctggacgttccttttgtcttcgccaccaacggcgatggctttatcttccgcgatgccacggttgctgaaggcgaactaatggaaaaaccgattaccctcggcgaattcccttctccctcagaactgtggcaaaaattgtgcttatcaaaaggctacaccgaagcccagcttccggtaattacccaggactactacgacgacggcagcggcaaagcgccgcgttattaccagctacaggccatcaataaaaccattgaagccgtttccgccgggcaggaccgcgttctgctggtgatggcaaccggaacggggaaaacctacaccgctttccagattatctggcgcttatggaaagcgaaaagtaagaagcggatcctgtttctggccgatcgcaatattctggtcgatcagaccaaaaacaacgacttcctgccgtttggcacggcaatgaccaaggtcaccgggcgcaccatcgacccggcatttgaaatccatctcgcgctgtaccaggccatcaccggcccggaagaagatcaaaaagcctttaaacaagtagctccggatttcttcgacctgattgtgatcgacgaatgccatcgcggcagcgcctcggaagacagcgcatggcgcgaaatcctcgactatttcagcgccgccacgcagattggcttaactgccacaccaaaagagactcatgaagtctctagcaccgattacttcggcgacccggtatatatctactcgctgaaagaaggcatcgaggacggcttccttgccccttataaagtggtgcgcgtcgatatcgatgtcgatctccagggctggcgtcccaccaaaggccagacggataaaaacggcgagctgatcgacgaccgtatctacaaccagaaagattttgatcgcacgatggtgattgatgagcgtaccgaactggtggcgaaaaccattaccgattacctcaagcgcactaacccgatggataaaaccatcattttctgtaacgacatcgatcacgcggagcgcatgcgccgcgcgctggtcaatctcaacccggaacaggtcaaaaagaacgacaagtacgtgatgaaaatcaccggcgatgacgatatcggcaaagcccaactggataactttattaatcccaaaaaagagtacccggttatcgccaccacctccgagctgatgaccaccggcgtcgacgccaaaacctgcaaactggtggtgctggaccaaaacattcagtcgatgaccaaattcaaacagatcatcggccgcggcacccgcatcgatgaacgctacggcaagctgtggttcaccatcctcgacttcaaaaaggctaccgaactgttcgccgacgaacgcttcgacggcatcccggaaaaggtgatggacaccacgccgcaagatatcgccgacccggactccgattttgaagagcagttcgacgagcacgaagaagagaccgaagacgatgtcatcggcgccaatgaagatcccgccccgtataccgttaccggctcagatgatgtcggcccgctgccggaagaggacgagaacaaagtgcgtaagtttcacgtcaacggcgtcgccgtcggcgtgatcgcccagcgtgtgcagtattacgatgccgacggtaagctggtcaccgaatccttcaaagattacacccgcaaaacgctgctaaaagagtacgcctcgctggatgatttcacccgcaaatggcagggcgccgagcgcaaagaggccatcatcaaggaactggagcagcaggggattatttgggaagtgctggcggaagaggtcggtaaagagctcgacccgttcgacatgctgtgccacgtggtgtatggtcagccgccgttaactcgcaaagagcgggcggagaacgtgcgtaaacgcaactacttcaccaaatactccgacgccgcgcaggcggtgctgaatacgctgctggataaatacgccgacgcgggcgtgcaggaaatagagagtattcaggtgctgaagctcaagccgttcgacagcatgggtacgctgccggagatcattaaaagcggattcggcgaccgtaacgggtataatcaggccatcagcgagctggagagcgaaatctaccacttaccgccccgctccgcgtaa

SEQ ID NO: 98696 - DNA, 969 bp, Enterobacter aerogenes
atggaaattattcaagtatggaggaagttttttcagcattttaaacggaaaaaattggatgctgcggtggttgtttacggcataatcgcaatctatttaattccctataagtttcctttaaaaagttacctggttgcatttctttttatatttattttaatattctcttgcactcaagaaattcgaattagggaatatattagtttctttgtacgcacaggcaatgatcatttattgactcggtgtgctggcattctatcactatccgcatggtcaatttttttgcttttattgttgtctgctaatgtgtttgtcaacgccataacgtattggttagcaattttattttcagtctctatccttattagcagtattttgactgttttagatattgccagaaataatacagcaaaaacccttaaagttatcggctttgctgttactgtgttttcaggtgtttttacatttaccagtagttattcatccagtattttctggcaaatcagcaatctggcgctatcttcctcgccatggttagaatattgctggaaagccacggcattccttatgttcttcctatggctatcacaaccaatttgttatggattatttatcacttacggtgataaagcgaaagggtatcgaatatttacattaacgggtgcctttattatgtcagtttttttgttgctactcgttcctaaattgattggtgatgttgcttactatgtgttaaaaatctccatcaattatgaatggcgtgacgaagcaaagtgtggcaatctaaaaatcaataataaaaatgaaaaatactttggctttaatactgacaaatatactgttttttattcggataaaaatgataaatggggtttctataagttaacttgtcaacaagggagtaacaggaaagattcttatgcagtcgagtacttacctgaatataatattcctgcgtggttaaaataa

SEQ ID NO: 98697 - DNA, 165 bp, Enterobacter aerogenes
atggaatttcacgagaatcgggcaaaacagccgtttatcggctgggtatttctggcgcgagcaattagaaaatggtggcttcgtgggcaaacgcgcaaagtattgcagcgaatgagcgacgaacagctgaaagatgtcgggttgcgccgggatcagatcaattaa

SEQ ID NO: 98698 - DNA, 240 bp, Enterobacter aerogenes
atgcgcgtaaacatattcacctggacctttcggcagaccatcagggacgttggtgcaactctccattttgagaaggagagactcaccggcgcggaaaatgcgggttttaaaatcaatcgcaacggtgttaattttatccgcacccagaccaaagccgccgacgccaatcacctgaccggcgcctgttccgacatcttttgttgctgccgatcccagctccagcgatccacgtgcttttga

SEQ ID NO: 98699 - DNA, 411 bp, Enterobacter aerogenes
atgcgggtttacctttttttcgtggttatcaatgccgtcgctcactgctttcggcgttgcggcctttttctcttcctggctctgatagtcgttactgagctcaataccgatagtggcaacttttttaccagtgctatcgatcatgtcctcagtaagttcggtcacgccggcaggcacgcttactgtgcagataagcagctcaccctcacccaacacaaagctatcggtgtaggttttggcgttgatttcagctgcctgtatattcgatttggagttaacctgataggtatcagatcccagcgtataaacgcctttgaggacaatggcaaattttgtgccagcagacagctgcaacttcacgtccttttgctggcgaatcgtgagctggtagtcggagccgatattcactga

SEQ ID NO: 98700 - DNA, 438 bp, Enterobacter aerogenes
atgacaacgactgtctccgataagttatacaaaagccaaattctggattactactatcagcgccgcgccgagtcttctatccgcatcggtgagcgctttctgatcagtaaagccgtgtttggcaccagtaatcttgtcacgaaaaatgaaaacggcgattacgacattgccgacttgccccgaaactttgcgctgtctgacatgacaagccagttttgcactattccgctggtaccgacctattccgacggtgtgatcaccattcgtatggaccttgatcagaagcagttgactgacggccagagctatccgtttaacaccttggtagtgctcgacaatctcgacaagccgatcgccatcatgtgtgttcaggaagactcgttgtacgtagggaaaacgtacaccgcagttatgggcattaacaccactcttgcataa

SEQ ID NO: 98701 - DNA, 1119 bp, Enterobacter aerogenes
atgaaacaatcatggtttaaggaccgactgacttcggcgaaacaggagtctgtgctgtattcctcaatgtctgagatcatacagtcgctagtgggctccttcgtggagccctggctaagccgcatcacaaaccggaagtcaatattctcaatggatgcggacgatctggccacgcgaacggacgaactcggccagttctttaccatccgcacggaaaattcatcttcagtacctatgttgctacagcagcgcctcgatgaaattcactttaaggggaccgatcggcctattaaccagacgatttatcgtgaatttgatggcatcaatgttacctgggagccactctatgccccagtagaccttgaaaagcatccatacggcactgtgctgattactgagagcaccctggaaagcaccggcggcatctacggtgagatgttcctgacgtcgagaggcatgatcagcgtgtcgattaacgaacttaccgagattatgaccggtgaaggcgagattgattcagaagggacagatcaggccacaatcacagaagctgtactaaccaaatttaatcagtttgtgcgaccactgctaccgctacacattgtttttgacggactatcgctctatatctccgtctatgcagatgaagctcctgaaatgattacgctaatcagcgtgtcagacaccgaaaaaacctttgcatggtccgaaaatgcggatgatgtggccagcttcaatgtcattacggcgatgtctcctgttatcgcgacaccgagcggtgcgaaagactttacctcgatcacgtttgaccgggaaaaagcggatggaggggtcctggattacaacgagaaaggcctgtttgacgacaggattgatgtctggagcgagcatgttgaatgcagcgactcaaccgttctctacagcgtggctttaggtggtttatatatcccgctttctgaggagcaagatttgctggaaggcacgcagttagtacagatcatcgttacgcctgctggtggggtgattgtgcctggatgggatagccctatggctttgctcgacgatacgaaagctgactcgctgttgctcgacagtgaagtaggtaaacaggacgagtga

SEQ ID NO: 98702 - DNA, 1443 bp, Enterobacter aerogenes
atgagcaatttaacccccaccaaagccagcgtgcaggcagaatttgaggcgctggtagaaaacgattcgtactggtcccggttcgtgggttcacagtttgtttccatgatggcgctgtttatcacgcagatcatctatcgctgctaccaatatgcagatgcagctctggcagagggctttatttctacggctacgaggcggtcgtctatcttggctgctgctgaaacaaatagctatgtcggttcccggcctgctccgtcaaccggaccggtggaaattaccgtgactgatgcaggtgcgccggcgaacatttctcaatacaccccgcttatttcggatgaccagtacccgtatatgacgatgagcgaatgccagtttaatgccgacggtaaagcaaccgtagatgtggcacagctggaaatccaggaggtgacttataccgtaaccactgagaagccattcctggaggtggttttatcgaaggcgctgacggcggtttgccacaaattggaagtatttgtgaaaactgatgccacaaccactttgtggcagccaagcacgatgttcaggctggccaatagtaacagcgaggtctatgtagagttttataagccttcagaacagcttggcgttcgctttggtgatggccggatcggtaaaatccctccggagggaactaccatcacgctgcgcgtctggtgtaccaatggtgatattacgctggtggccgggcaaaccctgacgccagtagatgcagccgcagaacttgccaattacatctccgttaaaaccacggctcctattactaacggtaccgatgcggaaactacagaggtaacgcgtaaccgtgcgcaatactatctcgcatatgacaaccaggtcgtgtggggaggcgactacacgttcttcctgctccgtaatatctccggtatgacgtgggtaacggcctggggggaagaggagcaggaaaggctcgacggcgcttataacgttaaaaacatcaaccggatctttatttctggctggcatccgcagcacagccaggaagaacttgccgcgttggtaatggatgccttcagcactgttccgaacgagctgaataagaaattcacctatacccccgttaatcagcttccgttccgtgttgagctgatcggtaccatctcgccaagcctgaccactgccaatgtgcttagcgagctgcgcgcagcgctggagcagcgatttgggcgtgattccaaattcttcgacgagaagagtgtgggtgagtacaaccttatcaagaaaaaagacctgtgggcctatatcgaaagtctgggctattttgccgacttcagtcttgaatttttagactggcacacctcaaacgggttcttcgattttgtttacctcgacgtcgaaaattctaccttcgatattgattacgagggcgcggaagcataa

SEQ ID NO: 98703 - DNA, 360 bp, Enterobacter aerogenes
atggcgagctataacgaaatagacccactgctaacgctggacctgtccggcgtaaaaacctacaacacacagcaggaggcatgggccgctcgcctgtacgagtggttcaacacgtttcagggcgaaatatacggtgatcctgcttggggcaatattattcctcggtttaagcatgagccaacgaatctatctcacgttcagatagtgatagaggcgcaactgctcgcaaagctggccgaagatctgcctgatgtgccaattagcggtttagcggttcgggagggcagcgaaatcgataagctgcgggtgtccatccagatccaggacatcgtaatcacagaggaggtgagaaccaaatga

SEQ ID NO: 98704 - DNA, 3228 bp, Enterobacter aerogenes
atggaaagaaaaaacgccgggattggcgacgttattgaagcggtagatgcagccagcgcagccgagctggcagaactcgcacgcatccgggaatctgttgataacttgacggagactgcgcgcacgccgcgtagcgttgcggccggggctaagcataatccgccggtcaaaaaacagacggaaccagcgcttagcgatgatatcgttactgcgatgaaaaggatgaatttgggacagcctcctaaatcctccaaccgttctcctgctgctcggccgccagaaactaatttttccccagcggtccggcagcccgacgataaccaaaagacgcctactccggcggcgaacgtgaagccagtcctgcccacacagcgaaaggaaaccataacgcccgcgcaacgggttgaggccgccgcgcaggcgcgcaacgcatttaaccgcattggagcggaaaataaccgcaccgtgcccggcgcgcgcgactcgcgtggtcggtttgtcggccgttcgggaagtaaggcggctagcgatgaggcgaaggctgagcgtctggaaaaggcgcgccaccgggacgaggaagaagaaaaagacgatcgcgagtctttcctgaaaaaactagtgaaggttgctggtgagatcggcaacccctcagaaactcgcgccgctgatgctgtgggctatgccgtcggcggtccgttatgggcgatcggtaaggagttgggcggcgtcacgagagaagtgggcggtacaattaataatgctcgtaaatctatggcggaagtcttcaaaggcgacggcgagcgcggcgggcgaaaaggactgtttggccgccgagccaaaaacagcgccgacgtcgtgcagttgaacacccaaaagcgtaccgtacaggagcttgctgagcagactgaagccatcaaagatggagatcagaagatcctggagcgtctcgacaaaatcgccgggaatactggcaaaaagggcggggggattttctcaaaactttttaacttattcggcaaaggcggcagcagcgcggcgaaaatcctcggcgggattatgggagggcgcttgctgggtaagctattcggccgtgggttgttaaatactggtggtcgggggatcggcaagctcggatcgatagcgctgggcggttttggcctcaataagataacccgcgcgttgttcggcggagggacccgtgcagcagctggagcagcaactgatgctgctggtggcgcaatcgcctcacgcggccttacccgcctcggcatgaaagctctgggtaagggggctttgcgcgcgattcccattgtgggcacgattgctggagcaatgtacgacgcggtgacgggttggaacgatagcgacgcgcagcgtaaggcttttggtctgaaggagggagaagaaccttcgcttcagcagaaggcggcctatacagcagctaatgtgatggacatgggggggttggtttcgggtatttccagcgcactcggcagtgtattggaaagcatgggctttactgatatcggtaaaatgctccagttcactaccgaggatatggccaaaactattgacgagtattggaccaatctggaaaacgctatttcgggcctcggcaagaccattaccggcacctttacggaatataccagcaaaatcggtgaaactgtttctggttggttcagcaacatcagaacagatctaatcaaaaagctcgatgacatcgctaaattcttcacgctagagaatcttggcaagctgttcaaggatgccatcagccaggctctggagtttatcaaacacccgatcgacggcatcaagaagcaggctgataaggttgtcaccgtcactaaggacaaggctgaggcggcctggaactctgttaaaaatggtgccaaaggagcctatcactggtttgcaggtgacgataagcagccgggagccgtagagaagggggtagagaaggccaaaaccgtagccaaaacagccgggaaagaagtttctaaggctacagacgcgatcctgaattccaaagttggtgaggctgcgaaacaaggcgcgcaggcgctgcaaaattccattggccagacttccggaaccgtaaccaacgtagcccgctcagcagcgagcaatctcaccggcagtgaccagaacgatatccagaaggcagccgaaacgtacaataacggtaatgccaacgttcgggtaaaccagttgtccgccgaaggggccgaaaatcttaaaaggcttgagccgctgttcaaaacacttgagcaggagaaaggtcttccggaaggagcgctttactctcttgcggccactgaatccggtgggaaccctactgcccgttcacagactggcgcacggggtatgttccagttcacaagtatcgcgcgtaaagatgttggcctgtcaaaagaagacgctgacgatccggaaaaggcagctgaagctgccgctacgctcctaagcaagtacctaaaacaggctaatggcgactggaatgaagctgtaacggcttacaacgccggattcgggacgataaacaaatggaaggcaggggagggggagctctctaaagagaaccgtgaatacgcggttaaagtcaattctcaccgcgcccgttatcttggcggggctgctcacacaccgggtgccggttccaatgcagcgaaaatcccggcaggggtaaaggttgatgaagcaaccggtctggctttctcacctggcgatagcccattcaagaaaggtggattggtagacaagatcggctcgaaggtgggcatagacgatcttgtgaataaattcatgaactcgcgcggcatgcgtcatgaagtggtactgggcacactggccgaacgcgcctacggcaaaggcacgacaaccgcaatgggaaacgttagcccggcaacaattccgcagcttgagccaattcagcagccgacctctcaggtgaaactagacggcagaacgataagcgatctcggcggttccggcgctaaaccaacaatgcagttggcagataataccgtctcactggatagcgagacgaaacggatattcaaacgcatgactgatctgctgaacagcatcgaggaccatactaaggaatctgcgaagcaaaaagggaccactatcaaggtcagcacaccccagcccggagtgatgagcgccgtgccgctcaccattaacgaccccctgatgaatgactatgcgagggttgattga

SEQ ID NO: 98705 - DNA, 882 bp, Enterobacter aerogenes
atgctactgcctgaatttccattaccatcccggccgacggagattgtccagttccgccagccgaacatcgccgacgcgatgcgttttaacaagatctcgcgtgaagaggaggaacagcggacaaccgcttatctcaattctctaattgctacgccgggcaaacacgatgcacggaactggactgcgcaggaccgtcgtacggcgctctggtggatctataccggctcgcacgacacgccggtagaaacgttcacatatacgtgccggcactgcggcaacgaacattattacgattgcgatatgaatcttctggcgggcgatattcaggtgctcgacgtgccgccgtatatcgacggcgtggaaatcagtgtagagggagtgccgcatcaatggcggatcgttccgttggatggctggtcaatggaaatgctggaacttcgacgcaccgcgctgccgccggaaggcgctccggaatatgccgatgagatgattgacctccgcctatgggagttcgtctatcaatgcgagatctaccacgacgtcagtggtactcgcgaagagcaggccgatcgccggttcgaaatcatcaagcgaatggccatcgacaccgaatttatgaaactagcagcgcaaatcagattggcacaggaaaaactggatcacggcctgccatgccatatcgataaaggtcaggcgctgttgcacctgccgccgcacttctgccctaacgatgaacacaaggaggccaccggcggtttttctacccgtctgtgggtccagtttcggcctgtccacttcattccacaggtggggcttgagcgactatcagaccttagtatccagcctggttttgtatgggggtatgcccgtacaggatgctaa

SEQ ID NO: 98706 - DNA, 603 bp, Enterobacter aerogenes
atggtagcgagcgtttcgtcttatttgtcctctgccgtcactactactctgtttggttctggcatgggcgaacggcaggtaggaaagctcacgtcagtcattatgaacaaaatgctgttcgctcagggctggcagttctccgttgaggtagacggcctggagggcgctgactttttcgcgaaggacattacgtatcacgattacagcgttgagtatgaacccacgaaaattggcggtggcactattcagcaaccggtaggccgcgagccagggcagattacgatgatggtccgcgataccgtggacggaatagtgatggactggttcaagatggccaaaaatcgtgtagtaaacagcaatggcaccgtgaacctacccggtgactacctgctgaatatccgaatttaccggctattggctgctggaataacccagatagaaaacgaaatgacggttttcccggtaacggtcggcgatgttacctacgcacgcgatcaggttacagaatttaaatctttcccgatgacgtttgccctacacagcacatttaaccaggcgaccacctcgctggagtcgctgctgggcttcagtttttctctctaa

SEQ ID NO: 98707 - DNA, 567 bp, Enterobacter aerogenes
atgactccccaacaattacttgaacatgtaaaagcgcgttttgtgccgcttctggctgacgagccgcagttgctggatacgctgctaaaacaggcgctgggaacctatcaggaccgtgccgggcttattaaacgggtgcgcatcaccgacaccagcacttcttctattgaaccgcctgctgacttcctggcgctggtgtccgtaacggaccataccggtgatttggtctactccgatgtttatgatggtgtaatcgagctggatggcctctgcaatgccatttacccgctgaccatgagttatttggttaatctccgtgatatggatctggagcgtggtgaggttcctgctgacatcatcgggctggtggccgactatctcgaagctctgatcgccatccccaatactgaccgcctgcgccgcgtctctatcgcgggcaagttggacatgaataacctttctgacgaaaacacgctacatcagcgcaagctggacctggaagctcagatgagcgcgacgcgggcgatcatccccggctacgtgctgtattcatcctggatgaagtga

SEQ ID NO: 98708 - DNA, 468 bp, Enterobacter aerogenes
atgaaagctgctaaaataattttcggcctcgcgcttttaacgtccttcagtacggtggccagcgtcggcaaatggagcgtagcggaagagaagggcgctcgcgaaatggtggtttccagtaaagacggatcgcttctgaattttacctgcgatatgggttataaaaacggatcaccagatgcagccggggaccggatcctgtttcttgaggggccgatgaatgattacgattccgatgaggacactatctctctggtggtgggcgatgataaatatgatatcagcagtaccggatctacagtggcagatagcaactggtacggtttctggagcgatgcatcagatgcaaccgctaagaccgtagacgcctatgtagacggcaaaaagattgccacgttcactatgcgcaaagctgccgaaatctataaatccgctccagaagatggctgcctgaagcgcgctaaataa

SEQ ID NO: 98709 - DNA, 576 bp, Enterobacter aerogenes
atgaaaaaattagccttaaccatcacgttatgccttgctgccggcgctgcaaatgcggcctctagccttcaccagatttgcaccgactacacacgttacctgggccatgtttacggctacgctgtaagccaggatgaaggtatgcgtaaaaaactcgtctctgacatgacgcgtctgaaactttcggaagctatggtgcaggaagagctgtataaggtggccaccaacgaaaacgccaaataccagtattcgcgcctgttgaaccctgacgcaaacactgttaaccgcagctcattcgactacatggttaaggcctgtgaaacagctcctgactttgcaatacccagctggggcgtcctggtggccagcaatgttgttcgcaaagaagatgcgggtaaaaacggcattgattccattcggaatgcgcccggtatgcgccagcagccatctgctaaagatcctgcatttaaatcatgcgcagagcaggagtacgcgaaacaaagagcgcagaaccccggccttgcggaaggtgtgttgagatctacggctgagtcaatttgttaccggaagagttaa

SEQ ID NO: 98710 - DNA, 510 bp, Enterobacter aerogenes
atgggacacagtaatactaaagggaacaaagcgttcctgaagaaccgctacacggctaacgtagcaaaaggggagaagcttgtttcttccgagttcgagctgacgttttccggctttgaaggcctcagcgtgcttgtgcgtaccgctcaaattcctgagatgacgcgcgaggatgtcgaggattacggtccgaatggcctcaaatttaaccagcacggcccgatccgtaactctggtgaattgcaggtacaatgtgtggaaaccatagaaggggaaattctttcgttcatcaaggcgcgtatcgctgcgaaggactacgtggatattacgatggcagctacgccggaatccaaagcaacaggtatcctcggtgcgaagaaccctgcgaccactatcgaaatgttggactgtaagatctacagcgatgcggtggatatgagcaccgaagacgtgacggctgtagttcgaccgccgcttcgtatcgtgtacaactggatcgattgggattaa

SEQ ID NO: 98711 - DNA, 582 bp, Enterobacter aerogenes
atggtgatggagtattacggagcgatattctcgcaggacggggtatcggattacctgaaagtcacgctgtccagcagcaaatactctgttacggggtatatcagccaaggcgcggctatgaacctcgctcaaagctgggaagcgccgtttacgggtatgactatgggatcggttgccggtgcaatgagtggcttcgcgcaggcgggcacagaaatgacctctgtagcgcgctggaacacgctcatggtttgggagggggggacgcccccaacgttcaccctaccgatgacgttccttgcgcagtatgacccgttcgttgaggtatcgggagctattgcggcgctgtcagcaatgatcagcccggagctaaaagatgccgatgtggctgggcgtatcccggaacgcgtaaccctgaatatcggacggcgtattaacctgaccgacgttattatccaggacttgagtttcgatctggatgcgccacgcgacagtacagggttatttttgcgtaataccgtaaacctccagctcagtggctccagagtgtacaacggctccgaaattataggcgctttccaatag

SEQ ID NO: 98712 - DNA, 813 bp, Enterobacter aerogenes
atgagcaaaaacttttttgaatccggctcgttcttgggtaatggcttaattcgttacgcaatgagtgccgatccgatccagctgctggagtccgcccgtgctaaacctcagcctgaacctgaaccggcccctgctccggctccagcgccgattccggcacctgaaccggctcccgcaccagcgccggcgccgaccgacccgctgttggaaagtcggggcgcgaacatgactctggagcaggtccaccagctgattctcgaagccgcaaatcgcagcgcgacgcaaaatgacctgagcaatgccgccgacgcggtgtttgcgtgggctgacggtggtgaactgacctttgatgcactggatggtttcgcccaggcggttgctggcatctcagatgaggacggtgacgttaccgacgagcaggaagacgcttataacgttgcctggggcaatatcgctaacttcctcgccgcttgcggcgttgatgatgagctgatcgaagcgctggcggatgatgaagatgacgatgcggctgccgatgttggcgcggcgattgcaggcctcgatgatgaagatcgcgacgagttagaagccgcgtttattgtcgccggttccgctgatgacatgctgaccgaagcgttcaaaaaggttgttcgcaacggtgaagttaagctcatcaaaaagcgcctgcgtaaaaaacgcctgaccgccgcacagaaatctgcgttgaagaaggcgcgtcgcaaagcgcacaccggtgcggccaaattggctcgtaaaaaatctatgaaacttcgccgtaaacgcctcggctaa

SEQ ID NO: 98713 - DNA, 1590 bp, Enterobacter aerogenes
atgtctcaatattcaattcaacagtcgctgggaaatgcctcagcggttgctgtcagcccgattaacgccgatgcgacgttatctgtcggcctgacactaaacgcgagcctgtgggctggcgtaggcgtatttggtcgcggcaaaccgtttaccgtattgtctgtgactaaatccaactatctcgacgtcctcggcgagccgcttaaaccgtccgcaggttcacagttcgaaccgatgcgccatgtgttcgaagcggttgagcaaacctccggctacgtcgtccgtgtcgtggctgatgacgccaaattcccaattatcaccttcaacgacaaatgcgaaccggcttatgacgcgctgccgtatggctctgaaatccagctggatagtggtgaggccttcggaatttatatcgacgatggtgatccatgcatttctccgacccgcgaggtttccattgagcttacggatccagaccgtgccggtaacgcgcgctttatcctgaagctgcaacagactagctcgctgggcgtggtgaatacgttggaaactcacacggtttctctatctgatgaagctaaggatgacatgggacgcctgtgctatctgcctgctgcactggaagctcgttcccgctatttgcgtgcggtggttagccatgaccttatagagtctgttgtacttaaagagcagaaagagctgcgctttgctggtggcaccaacggcgatcagaacaacattacttctgaagcgtacctgcgcgccgttaaagcattggataacgcgccggtgatgtataccgctgtgttggggcttggctgttatgacgacgcggcggtcactgcgctgggggatatctgttccgaccgtctgatcgacggcttttttgacgtcaaaccgacgctgacctatgccgaagcgctggaggcggtaacatctacccgtttgctgggcatcgaccatgttagctgctgcgtatatcacttcccattcacctgcaaagataaatggacgcaatcccgtgtggtgttcggtctgtccggtgctgcgtatgcggccaaagcgcgcggcgtgaagaaaaacgctgacgttggcggttggcattactctcctgcaggtgaagaacgcggcgtcatctctcgctcctctatccaaccgctctatccggaggacactccggatgaagaggcaatggttacaggtcgcctgaacaaggttgccgtaggcaccaacggccagatgattattgacgatgctctgacctgctgcacgcagaacaactacctgcgattccagcacgtcccgtcgctgatgaataccattagccgcttcttcgtgcagctggctcgccaactcaagcataacccggatggcattacagaaatcggccttcagaaaggaatggcgaagctgctggaccgtttcgttgcagctggcgcactggttactccgcgcgatccggaatctgatggcaccgacccgtatgtgctgaaagtcactcaggcagattttgatgagtgggaagttgtttgggcatgctgcccaacgggagtggctcgccgtattcagggcgtgccggtactgattaagtaa

SEQ ID NO: 98714 - DNA, 1704 bp, Enterobacter aerogenes
ttgaacaacatgcacgaatatcaggcacgtctggccgacatttcaaaacgctctaaacacgttttgggttgggcgagtgccgcacagtttaaagatgggcagtttatttctgatgataacgcccgcgcagccagcatcctggaagctgctgcgcaagacccgatctttgaaggcatcaacgacaaagtggttggtcagatctctaccgcgtgggcgggcgcacttgccgacttctccgcgaagtacaaaaccctgccgcgtccggaagtgctggcgtcctgccaccagaccctggaaaactgcctgctggaatctgctcgtaaagatatgggcaataccaacaaggcgatgctggaatctgtcgctaccgacatgatgagcgtgtccgatggcgttatgcgtctgcctctgttcctggcgatgattctgccagctcagctgggcgcggccacctctgacgcgtgtaccttcatcccggtaactcgcgaccagtccgacatctacgagatcatgaacgtagcaggttcctctttcggttcctacgctgccggtgacaagctcgatatgcagtctgttggcgtttacagccagctgcgtcgtcgttatgtgctggtggccagcgctgacggctctgcgaaaaccttcagcttcaaaatgcaagactttgaaggtcagaaagtgccgatccgtaaaggtcgctccaatatctatgtgaaccgcattaaatccactgtggataacggtactggtactctgcttcacaccttcaccaactccgccggcaagcagatcaccattaccggttctctgaattacaacaatggtcagattgacctgtccttctctgacgcaccggatgcaggcaccgaaatctctattgaagcagagatcaacatcgaagcgtctccggagctgatccctctcatcaaccatgagatggcgaagtacactctgttcccaagtcagtacgtcatcgcagcagaacacaccgttcaggccgcgtatgaagcgcagcgcgaatttggtatcgacctcggttcgctgcaattccgcacgctgaaagactacctggcgcatgaacaagatatgctgcgtctgcgcatcatggtatggcgcaccctgtacaccgacgcgttcgatatcgcgctgcctggcaatcaggacttcaacgtgtgggccaccatcatcaaaggcaagttccagactgttttccgcgacatcattgagcgtgttaaatcctctggtgcgcagggtatgtttgctggtgctgatgcagcgtccttcttcaagcagttgccgcctggcttcttccagcctgccgaagattactcgcagacgccgtatgttcactacatcggtacgctctggaacaacgtgaaggtgtttgaagtgccggttggcgtctgtgaaaacatggctaaagaaggcattgacttcacagcaatggacgtactgtgctacgtacgtgacgaaaatccgggtaaagcgggattcgttaccggtgacgcagttccggccgttccgttccagcatccgaccagcaccgcgctggtgaaccgcaccactttgtggggctccgctgttaacgacatgcacccgcgcaatggcgctgattacttcaccaaagtcaccctgactatggcgaaagaaggcggcattaacttcctgactggcgacaccattgccgccggtaaatctgagtaa

SEQ ID NO: 98715 - DNA, 966 bp, Enterobacter aerogenes
atgaaaaaaatagtttcccgtggacgtgtgctgggcaaaggtagctctgagtttgcccgcatgctggaaagcggagaagggaccaaaaccttcactcttaaatcaggccgacaggctactttcgtgcagaccgtcgttttaagcggcgagattgagtcccgcacttttgtagaccaggcggttaacggtcgcgatcaatcactgatcacccctgagtctgtaagcgacatatcacgcaccattaaatttcagcagttcttccccgccattggccgaatagttggcgatcgcatagagattgtggatggttcccggcgtcgtgcttcctgcatcttcaccgagacgaagtttgaaatcatggtcactaaagacgaaatcagtcttgatgatgcccgccagttggcccgtgatattcagaccgcccgcgaacacacattgcgcgagctgggtaagcgcttcgcggtgatgtacgacaaaggcatgaccaaagaagagatcgcgcgtgctgagaacatctcccctgcaaaagtgacgcgtgcgtttcaggcggcggcggtgccggacgaaatgattgcaatcttccctgtcgccagcgatctctctttggctgattaccagctcttgctccagattgccgaggatgccaacgctaaaggtgtgccggttcaagaactggttgatacggtgaatgagcgaattgccgagacagaaggcgcgaaagaggataaagcgaagataatggctatcttcaaagccgaaagcaaaagtcttaagcccgcgcctgttaaatccgtggcggtagagaagctgcgggagttctctgatcgccgccagtacgctcgaaagaagacagatccgaaaaaacggttagtggcgtatgagttctcccgtctcccgttagaagtgcaaactgaaatcgacgaagcaataaaaaaaatcattgagaagatcccagcaggggaataa

SEQ ID NO: 98716 - DNA, 1206 bp, Enterobacter aerogenes
atgaaacgcgattacggcggtgtaggcaccatagctcttcgtgcaagctcattactgaagtccatgagtcaggacattgaagagcagcgcaaagagttcaacttgactgagtattaccagacgttcacccgtaacgccgtggccaagctgccgaagttgagtcgtcgcatcgtcgagcaggctatcaaagagatggaagatagcgggtatgagttcaacaagaagcaggtaggtaacgttgagcaatacgcgctgaccatccagaacgtcattgatatttacgcccaccgcaagattccaaaatatcgcgacattcaccaatcgccttacgttatttttgtagtaaacctgaaaggtggcgtatccaaaacggtttctactgtcacactggcgcatgctatgcgagtgcatcaggatctactacgtcacgatctacgtattctggtcattgaccttgacccgcaggcctccagcacgatgttcctggaccatacacacagtatcggctccattctggaaacagccgcgcaggctatgctgaacgacctggacgcagagacgctacgcaaagaagtgatccgcccaaccatcgttcctggcgtagatgtgatccctgcctctatcgacgatggctttgttgccagccagtgggaagagctggttaaagaacatctgccgggaatgaagccgtccgaagtgctgcgcaagaaaatcattgagcgcgtcgctgatgactacgactttattttcatcgacactggaccgcacctggatcctttcttactcaacggccttgcggccagcgacttgctgctgacccctaccccaccagcacaggtagacttccactcaacgctgaagtacctcacccgcctgccggaaatgctggagcagctggaggaggaaggggtagagccgcgcctgagcgctagcatcggctttatgtcgaagatgaccggcaaacgcgatcacgagacgtcgcacagcctcgcgcgcgaagtttacgccagcaacattctggactcttccctgccccgcctagatgggtttgaacgctgtggtgagtcctttgacaccatcattagcgctaatcctcaatcgtatcctggcagcgctgaagcgcttaaaaaggcgcgtactgaggccgagcgtttcacaaaggccgtgtttgaccggattgaatttgtcaggggtgaggcagcatga

SEQ ID NO: 98717 - DNA, 861 bp, Enterobacter aerogenes
atgaatcagccatttatctctgatgttctctatgcagacatcgaaagcaaggccaaagagttaacagttaattcaaacaatactgtacagcctgtggcgctgatgcgattaggtgttttcgtaccgaagccaaccaagagccaggccgaaaacaatgagatcgatgcgtctcgcgtgttctcccaattagagatcgcacaggccgaaggttacgacaatatcaaaattactggtccgcgactcgatatggataccgattttaaggtgtggatcggcgtaatttactccttcagtaaatatgggctgtcttctaacactgtccagctatccttccaagagttcgcgaaagcatgcggtttcccgtcaaagcgtctggacggcaagttacgtaatacaatacatgactctctcggtcgcttgcgtaacaaggggatctcttttaaacggggtaaaagcgctaaaggcagctataacaccggcttgctgaagaccggatatttcgacgctgaccgtgacatagttgagcttgaagccgattctaagctgtgggagatcttccagttggactatcgcgtgctgttgcagcaacacgctctgcgcgctctgccgaagaaagaagcagcccaagccatttacacgtttatagaaagccttcccgcccgcccaattcctatctccttcgaacgtatccgcgagcgtctggctctcatgtcgtcagtcagcgagcagaaccgaaccatcaaaaaggccattgaacagctgaaaacgattggctatctcgactgcaccattgagaaaaaaggccgggaaaacttcatcatcgtccattcccggaaccctaagctgaaattgcccgaataa

SEQ ID NO: 98718 - DNA, 423 bp, Enterobacter aerogenes
atgtcgattttttccacgctcagcagcgcgctgtcgctgaaagagaaacttctggcgagcaccggtattgccgtggtgataggaatggttgtcgctggcgttgcatgggaacaccaccagctaatgcaggcaactgcgaacgttggccgtctggagcaggttattagcgaacgggacgccacgattcggatccagaacacgtcgataaccgcgctcaacgacgcacagagagctttccacgttcaggaggtgaaagacaatgacgaacaggcgaaatatgcctacaggcaggaagagcgcaaagaaaaggttcgtaagcagctggatgctgcgggcacttctcgccagcgcattcctgctgacactcaacgcctgctcagggagtcaatcagcgaatttaacgctgacgccggcagagattaa

SEQ ID NO: 98719 - DNA, 777 bp, Enterobacter aerogenes
atgctggagaaggattaccagttatccgcgtataaagctctggcggcagctggcgggatgaaaacgccggaggcggtcaccacctccaccagctgtgcaacgtcggcgaaaatgctagcggatcagctggctggtctcgtgctggatgccatcacgtaccccaccactatcactgaatacattaccgagatcaccgggcacgccaacacgctcggcgccatcaaccaactggccagcgaacatgcaagtctgctggccgcaaacgcggatctgtcagtgctgttgcagctgaacatcggatgggatgtttactgccgtgcaaacgcgctggaggcctcagagttgccgatctctctggctatcggcgacaaagagacgcccggcgcactgctggatgctctgaatgccctcgatggcgccgccgtggtggcttccatgaccgaaattaaccaggtgctgaatacgggcgctggtggcggcacggaaggcgggacggtgccaccgcctccttcactgtctcaggaccaaatcgacgccctgaaggccgcctgtgctgaatttagcgtgatgatggataagctcccttccccacgcgacgcgctgaaaaagcagcatgacaaagccagtgagagcgccagcactggtttgcaggcgtacagcgacgctgtgagcaccgctttggctgaggcctccgcgaacaattccagcaccgccagcgccgtcgccgcgttggtgccggagagtgttatggcagaactgaagaaaggagctgtctga

SEQ ID NO: 98720 - DNA, 285 bp, Enterobacter aerogenes
atgccagccatagcaactaaaaacagtattggaaccggccacggcagctttcccgcacgcccgccgatagagggtgaaccactactaaaaatcaatgggatagatgttcttgtagacggaaaccagtatgcacaacacagcgacggcaacagcacgcacggcgggcaggctatttctacgcgcccctggtttacggtgaacgggaaagggatagtgtgcgtaggcgatcccatttcctgcggctcctccgtggcatctggagattcattagtacaaattatctag

SEQ ID NO: 98721 - DNA, 285 bp, Enterobacter aerogenes
gtggaattattaaatcgccgggagttcgacaagctcgtgattgcgggtgaagtcagcgcgctacaggcaatccaggtgaaagagggcatttgcatggtagcgaagaagaacaatacgaatgcggcctacatgctccaacggagcgacctcaaaccgtatctgtggaaacacgttaccggcccgctttcctacgctgaatccagaggccgtgccgaactgaccttccttttccgcgaaaaccaatccgtaaacgacatcctttcagaaggagtgaaaagtgcttaa

SEQ ID NO: 98722 - DNA, 906 bp, Enterobacter aerogenes
gtgcttaagagctggaaaaaaatctctgtttacagcctgtctcgtgacattgatttcactgagatcgaaaagaagagcaaagatttcgcctttactccctgcaccagccagtcaatggcctcatttggttttgtttcacctttcggtaaagactcggccgtgatgaacatgcacggcaatggctttatcctggtagaggcccgccgcgaaaccaaaatactgccagcgccggtcatcaaaatggagctggacaagaagattgccaaactggaacaggaccagggccgaaagctgaaaaaaacagagaaagactctctgaaagacgaagtgctgcatacgctactgccgcgcgctttctcaaaattttcctccacccaggctatctacgatggttcaactcatcgtatttacatcaatgcaggtccacggcaggccgaagacatgctggcgctgattcgtaaagcgctgggttctctaccagtggtgcctctgaccgttgaaaatgcgattgagctgtccctgaccgaatgggttcgtaacggcagcgcgccagcaggtttcactatgggcgactccgctgaacttaaggcaattctggaagatggcggtatagcgcgtctgaaaaaacaggatctcgtgtgtgatgagatctcaacccatctcgaagcgggcaagctggttactaagctggcgctggactggcaggaccgcttgaagctaacactggatgatggttttggccttaccggcgttaaatttgcggacgcgctgattgagcagaatgacgatatcgaccgtgaggacgtggcgcagcgtctgaatgctgatttcatccttctgagcgccgaactgtcctgtctgaccgacgctcttgttaaggcgctgggaggggaggccagccgatga

SEQ ID NO: 98723 - DNA, 576 bp, Enterobacter aerogenes
atgactgagccggtgatcatctctttcttcactcaggaatgggagtaccgcacccgcgcgctcgcgctgggaaaacagtgcgacgagatgggcatccaaaacgatattcgaccgatggaaagtacaggcaactggctgcgcaatactgccctgaaggcgtcgtttatcaatgccatgcttcagcaatatgagcatatcgtttggttcgattgtgacggcgtgtttatggcgcgcccgaccattgtccttgaccatgcagctcttgaaccggtaatggcagtaccgcaccaggtgctgccacgcaattggcaggtatccaccatctccattcgtcgcactccggaatcactggcgcttatggcacgttgggcagagtacgctcgtgggaacaacgtaacggacgagctggcgtttcatattgtcactactgaaatgccgggacttgttgcaccgttacctaccagctactgcgcgctgccgaatcggggcatctaccccgaaggagcggtgtatgcggtaggtctgtcaaaaagccctgacaaaatggcgatgaaagcaaggcaggcgcagcaatga

SEQ ID NO: 98724 - DNA, 2196 bp, Enterobacter aerogenes
atgaaccttacttacggatccgtttgtagcggcattgaagcggcaagcgtcgcgtgggaaccgctgggtatgcgcccggagtggttctccgaaattgagtcattccccagcgccgtgctggccactcactggcctgacgtaccgaacctgggtgatatgaccaaaatcgcggccgctatcaccgcaaataaagtaaccgcgcccgatctgctggtgggagggaccccctgccaggcattttccgtcgcagggctaagagaaggtcttgccgacgagcgtggacagttgactctcgcatatgtggaattagtaaatgcaatcgactctcgccgtgccgaacaaggcctgccaccagccgtattctgctgggaaaacgtcccaggcgtcctcatcagcaaagacaatgcatttgggtgcttccttgccggactggctggtgagaatgagccattcgaacctggtgaacgacctgcaaagggtaaaatcagtaaatactggcgatgggacaaaacgaccggtaagcactttccaaaatggccaaagtcgggttttcttgttggacgacagcgcagattggcatggcgaatcctcgatgcccaatacttcggagttccacaacggcgccaccgcgtcttcgttgtcggaggtgctagagaagggtttgatcccgaaaaggtattatttgagttcgacggcgtgcgccgggatactccgccgagcagagaagcgcggcaggtcgttgcccccattactgcaaatggcgttggcgcaagtggcgcagatccacgagacgcccaagcaggacacctccaggtagtcgttggtacgatagcggcacactcttttactggcggcgctggtggacgtccggaaggcgcggccgctggacaatatatccccgtggcttgtatggctcatgggcagggcggagcggagataaaaactgacggttctgctccgacgctaacatgcaaccatgaagcgcctatcgtatttcacgatacactggcattcccggctaacatgagcagtacgcaatgcgcagctgctgaagatgtatccccatcgctaatgtcacgcaaccccacggcgatcgtcagcggaatggcggtgcgccgtctaacgccgcttgaatgtgaacgtcttcaggggttccctgatttccacacgctgatcccgatgaataagcgcaacaagctgattgaggatgagctggcgtacctgcgcgcgcacttcccggacctttccgacgaagaagccattcgtctggctgccgattgcccgcgttataaagcgattggcaattcaatggcggtcccggtgatgcgctggattggcgagcgccttcttaaaggcctgacaaaaaccgccgcgccggctgcgcgcacgaagccgttccttaagtgggctggtggcaaattcagcgttattgatgacgtgctcgcgcatatgccgcgcggccgccgcctgattgagcccttcgctggtggtggttctgttttcctgaacgccgggtttgatgaggtgatcgctaatgacgcctgcgatgacctgatccttacttaccaggttatgcagtgtgagccgctggcgctcaccgacaaggcctacgcgatgtttcaggagggtaacaaccctgattacttcgacaaactgaaagcccgcttcaacaagcgcgaaataatgacgcagctggagcgcgccgccgcgtttatctacctcaatcgccactgctacaacggcctgatgcgttacaaccgtctgggtgagtttaacgtgggatttggcaagtaccgccagccttatttcccgcgagccgagctggaggcttttgccgccgtggcgcgccgctgcacgttcgctgttgctgactgcaatgacaccgtggcgctggcgggcgagggagatgtgattttctgcgatcctccgtatgagcctatgcctggtaaatccgggttcacaaattacagtggccagagtttccggtttgacgctcaggcccggctggcgcagtcactgaaggccgcccaccagcgcggcgcaagcgtggtgattaccaacagcggcgcgccgtctatcaccgagctttacaccagcctggggttcaaagttatgccgctgcgcgcgcgtcgttcgatctcctgcgctggcgatacgcgagaaaccgtcaccgacatcataggagtattagcctga

SEQ ID NO: 98725 - DNA, 699 bp, Enterobacter aerogenes
atggccagaataacccctccacacctggagatggcgctgtcacgcgtcaaaggctacgtgatgcgccacccgaacggcgtagacgttaaagatctgctgaaggtcgaagcttttacccggctgaagacaaaagaccgcaagcagctgctggacatcattgagcgttatgaccagctggaagttacgcacagtggcaaaggcacaaaggccgttacctggctgcgccataaattgcacaccctgacctcgccagccgcacccgtagaggttgttgtcgaagagccagttgagccgacattcatctgctgcgactgtctcaacgagaagccagcgagtgagtttgtcggaacacttcaccgttgcactgcctgcgaagcacgcgctgctgcgccggtagtgaagagtatagaaactttatcgttaaacattgcacagaaggaatttgaaccaatggcaccgaaaacagctctctcaccgtctgaaatgcgtaaacaagctgaagcgctgatgcgccaggccgaagaggcagagcgcactgttgcggctaaagatgtattccagaagcagctggaaccactgcgtcgtgaggtgctgttagcacacacaaaagtgacgaagggctttgaagcgatggtggacgggatggctgagttggacaaagcgatgactaatcttcgcgatttcaaggttagctcttaa

SEQ ID NO: 98726 - DNA, 1359 bp, Enterobacter aerogenes
atggttgatacaaaagctcctcctaattccatcgaggctgaacaggcggtgctgggtggcctgatgctggacaaccagcgctgggacgatatcgccgacatacttacctgccacgatttttactcccggccacacgccgtcatctggaacgtcatggtcgaactgagtgagcagggactgccgatggacctgattactctcagtgaaaaaatggagatcgaaggcacgctggactccagcggcggttttgcctatctcgccgagctgtcaaaaaatacccccagcgcagccaatattcgtgcttatgcagagatcgtacgcgagcgcgctgtagtacgtgaactcgtcagcgcggctaaccagatagctgatgcaggttatacaccacaggggcgcgacagtagcagcctgctggatatggcggagtcgttgatcttcggcattactgaaaaacgccagaaggccgataccggcccgcaggatattggcaccattcttgagcgcacggtagcacgcattgaaaccctgtatcagaatccgcacgatggcgtgaccgggctggatactggatttaaagatctcaataagaagacggcaggcctccagccatctgacctcattattgttgcagcgcgcccctcgatgggcaaaaccactttcgctatgaacctggtggaaaacgccgcgataaacaatgacaaacccgcactggtgttcagtcttgagatgcccggcgaccagctgctgatgcgctccctcgcgtcactttctcgcgtggaccaaacgcgcattcgcaccggccagctggatgacgaggattgggcgcgtatatccggcgctatgggcatcctgctggagaacaaaaatatctttatcgacgactccagcgggctcactcccacagaattacgttcccgcgcgcgacgcatttaccgcgacaacggcggcttgagcatgatcatgattgattacctccagttgatgcgcgtgcctgagatgaaggaaaaccgcacgctggagatcgcagagatttcccgctccctgaaagcgctggccaaagaactacaggttcccgtagtggcgctctcccagctcaaccgctcgctggagcaacgctccgataagcggccggttaactccgacctgcgcgaatccggcgcaattgaacaggacgcagacctgatcatgttcctctatcgcgatgaggtttatcacgagaacacggacatgaagggggttgctgaagtcattatcggaaagcagcgaaacgggccgatcggcaccgtacgcctgacgtttaatggccagtattcccgcttcgataactacgcaggccccgcatggaatgaggaggattga

SEQ ID NO: 98727 - DNA, 291 bp, Enterobacter aerogenes
atgaaacgcaaactgattgcccgcaacaaaataaacgtaactggcgtgctgggctatgcccgccgcaactttcttttcccgaacgatgccgcccgcatggggcgctaccgcgctgaagttcgcatgaagattcggcatgagcgccgcttcggcgccgagcctgatttgaaccaggcggtgccgtggggcccgtcgggtagcttcattatcccgtgcgtcagctcccgtgggctgatctgcaaacacattctcgttaccactgcgaaactggaggaaatgcgcaatgcataa

SEQ ID NO: 98728 - DNA, 297 bp, Enterobacter aerogenes
atgcataagttcatgaacgtgaccatgccggataacagcgtttggcagatccctactggagtaatcgcccggcaccacgcggagtattacgctaataaaaacggcatcactgtagaagaatacctggagcgtaagactctgccgctcttcaacagcgacagttacgaaattgaggattgggccgccaacaacatgaattggtccgacgtgcagccgcacgccacgatgatcagtccaggtgaagtcgattatgacgatggctgggccaatggcgaaaaagactttgtggaggcctga

SEQ ID NO: 98729 - DNA, 279 bp, Enterobacter aerogenes
gtgaggatccacgtcagggctgccccagcgcgccgcaagccgcagaacggcgaccagaagatgattaaaggcgtgctgcatgagcgcatcagcacgcgcatcctcatgcgtggctggaatgaagagaaaggggagggatgctattacctcgcctgggaccacaccggcggcaggcagcgtcatgaatgggtaccggtagatgatttggttggacattcaccgtataaacgccgttattaccctgaacttgacggggcaagccgtgacataacgcgttaa

SEQ ID NO: 98730 - DNA, 708 bp, Enterobacter aerogenes
atgactcaacaagcaaaaaaatgggtttttactgagctggtaaaagatccaaataatattgagcaacttcttgcatatgctgtttacaaaagctttaaagacgagcttgcccgtactgctcgcgaagccggtgctgctgaaaatgaaatagaatcaaaactttcagcttatcacgatcaatgcctgacatcttctaaacaacttcaagtctttagaacctctgcacaacaaacgcttgatggatacgttgcagttgtaaatcagcaattacaagatggacttgaggcggcttttgcaaagcaagaagcaaaatatcaaaagaaaattaaaagccttgagaaagagattgaagaaactgaaaaaaaagccttaaaaaggctagtggaaggcgcagacaaatacagtaaacaaattaaaaagcccactggttttatagagtgttcaaaatattacctttgggccattataaaattccttttttctggcgtgccaaaactttttgccactgcctgctctataggttttttatttatcatctggggagcatttaatggtgatgccattatgggccttagacaagggctctataagatagttgatatagctgtgcctgggggaaaagttgaccatactcctaatgaggttagttccattacgccaagcagtaaagatttagcaaataaacaacctaatgataagggtgtgtga

SEQ ID NO: 98731 - DNA, 456 bp, Enterobacter aerogenes
atgaccactaaacgtcggatgccagtcctcagcccggaggaaatacgtcagatttctaagaaagctgtggctacggtcgctgcggataaaatcattactaataaaactgctattgtaaatgcaaatatagcgggcatagtaaaaagtgcaacgtctgctgaaattgtaaaggcagtgaatagaactgccagtggttccaattattttctggcgactaaagaagcacaagaccatattaaaaatttgcaaaagcttaactcaacccttaagtctatccaaaagtcaggggatgttgcaaatataactcaagcagcaaaggcttctactgaggtaacacggacaataaaagctttggaacatactcgcatgctggcaaagtcagttttagagcagagtagcggaagaaacttgatacaagattcgtttaaccaagtccgtaaaaataagaaagggtag

SEQ ID NO: 98732 - DNA, 609 bp, Enterobacter aerogenes
atgggtaactttacagggaagtatcgcgcggttgtcgtcagcgttgaggatccgaaagggctaatgcgcacgcagatccgcgttcttgggctcatggatggcctgccagataacgctttgccgtgggcagaaaccatccttcaaaacgcaaacactttttctccgttcctgcctggcgataaagtatgggtggagtttccgtataacggtgactcacgctggccactcattatcggctatgcacaggatgcttctgacggagcgcctaacgtccctccggaggcctctgggcaagggggcggctacacaccgcctgatgttgaaggcgcaccagctatgccttccaccagcgccaaaaaagactacatttactcgcgcaacggtcttatggagatccgcaacgcaggcggcagctggtcggtaactcacttaggaagcggtacgacgatcggttttaatgaagcgggagagctgttcgctatctctcagggcgacgcgtttatctcggctgccggtgatatgaaaatcaaggctggtggcaatatgggaattgaggcaagtggtacgctagcaataaaagcatcacaggttactgtagatcaaggctaa

SEQ ID NO: 98733 - DNA, 1017 bp, Enterobacter aerogenes
atggttacgaaaacaaccacttcacccgcatctggatcaaaaagaactcaactttttttgcagagtgtaaaaattggtgagatcgagatacctcgtgaaatgattgtggggtgcgtttacgtggagcaaggacagctgacagcgccacagttgatgctgacagtgcgagacagtaccgcatatgtagttaacaaactcggcgtgaagtttggcactgtgctaacggtatccttaggcgatccggaaggcatcggcggcctactgttcgcagaagagttttttgtactgaaagcaccgcgccaggctgacacagtgatgatttacgccttcagtaacgccgttcgcctgctgaagaccccagccaccagcccgcaatacttcgttgataaacaaccaggggccattgtgggcgcgctggccccttccctgactgttaacgcggactcattcaggaaaacatccacctatcacctaaacgttggcgagaagcccacacaggtgcttcaggagatgggccgggataccggatccatgtgctgggtatcacgaggcgccattaacttccggaatctggataaactcactaacgccaacgccacactgagctatgaatcaggcaacccaaacacaaaggggcttacgatcagtcagttcaatatcctgaatgccgagtacgaataccagcgccggcacaactttaggatggcgagctacgacatgacaaaaggagtagtttactccggcagtaaggacgcgccaattaaattcaccagcaacccggatccgatggctatggccaattacaataaattcatcctcccgcgcttcgatatgctggtggagggcaacagcgcattgacccccggtaccgtgcttaaggtattggtgaacaacgtcggcggtgatgggggtatggatgagtctatcccgcccaaaatgattgtcacgtcggcaacacactatgaagagcgattccggtacgtcacgcgggcacagttaggagtggttaatgggtaa

SEQ ID NO: 98734 - DNA, 795 bp, Enterobacter aerogenes
atggcaacgcttgttgatatggagtggctgctggccattttccgtaagaaggtactgacgccgaccggaaaacaggagtttgtgccgctggactgcatcgacgcggcccttgcagcggcgcttaatgacgcgttcaccccgctggtggtgtctgtaccagaccgcaccaacaaatcattctgcgagtttctgaagcgcacaccgcgcgatcgcatcacgcgcggtgcattcactagcgttgatgcgtggctggcttcatttcaggcctcccgttctggccggaaagacagcgcctgtccagctggggggataaacaagctggctatgccgctggtcaacctatcccgatcgcctgcgttttcagtctatgagggcgagatgagccgggatgttttcgacgatgggcagatcctcgatgagaacgacgaaattactgcgctggtggccactatgccggtatcgcttgattacacgctgtggatcgcaagcgatgagaaagagtccatgaacatggtagcgacggcgctggcgttctggctgcgcttttacgccagccgagggcaggcgtctttcactgctaccagcgtattggctggtgtggaaatgagcatggaatgcgtaatcaacggacaaaagtcgatcgcttttcaggatttaacgtctggtactgacgatgacaggctattcgcggtaggtctggacctgaatgttgttgccgatctgccattgctcacttacgtagaccagacggacgcaaaactatcggttaaggcaagagttcagttgggggcgtaa

SEQ ID NO: 98735 - DNA, 750 bp, Enterobacter aerogenes
atggctggttttttcgatgacatgtttgaagacggcaagatgccacaacaagtaaccggtgatactctcccggccacgaacacggatgacgcgcaggaggattcaccagatctggtgaatcttgatgcggacgatattacggaagaggaagaaaacgatgctgaaatcgaaagcgatggtgttgacgttggcaattttgttgatcctgtggcggaccatgacgttcccaatctggatcacggcctgcttagtgattctggtgtgcgccaccgttatgaaggtcatgcagtatttaataaccttgtgcggatggactggctcaaagccatcaaattagaccctgattcattcgatgccgtgctttaccgggcggttccccaccagcgcgccggcacaccagaaacggcctctgaagttattgagccaaaccaggtgatttatgactatcaggatcctgagctcataacggcgctggattgcccggatgagatggaggccttccactcactctacgacgataccgaaaacaccggcatcagcgacgcggccctgatcttgcgcctggccgctgttaacgtgccagtaggctcaatgctggaatggctggaagagctttctgacggttccaccatacgccgattttggtacatccaccgcatctttaactacggcactgcgaaggttggcagccttttctactgcgtgccgtcccgcgcctttgaggggaattttgatggcaacgcttgttga

SEQ ID NO: 98736 - DNA, 1218 bp, Enterobacter aerogenes
atgcccgccgaatatcctcgtaatgaccaaggccggtatgaaactgaaggcctgggagcaaaagactttcaccgcgtctttgagctgatccagaagcagcagcgcaaaaaccgccgtaaagcgcgccgcacacttacgcctcgcctgctgggtaagcgaaatcgcgagctggacgccttcctgaacctggggaagaagaaagacggcacttacttcaccccggaggatattcgccgctttgacgccgccaggcagtctcataaaaagggattccgcaacactgtaccgggcatcacttacgcgcagctggtggcccaatcaaccagcatcgatattaagcgcgcgaacaaccgcgtttccgacggcactggcatcaaggcagcaacgttcctcggcatcaaacacaacctggcggtgatatcggtaaaggcctcggaagaatcggtccaccagcaccaccgcgtgcgtatccggtttgaggaatgggatcaggctgtggaggacatcggcgaggacgacgcgaagaaggcgcggatcgccgctgacctttgcaaaggccgtgtgtcgttcgactgcgattgcgggcgccaccaatactggtatcggtatatggccaccgccgggaactatgccgtcgcaccaccgaaagaatacgctttccctaagatccgtaacccggacctgaccggcgtcgcctgtaaacacgtcctgcacacaatgacccgctttcagtcatccacctggcaccgggcaatcattaatgcccttgagaaggcggctaaacaagttgcctttggcgatgacaagcgaaaaaccacgacattcttcaaaggcgagctggctaaggcgctggcgcgcaaccgaaccacaacaacagatcaggcgaaggccaagcgcgactttgagcgttaccagcaggcgcaggaaacgctgggtaaaaaactcaaatcggcggatacaacaacagataacgtccggcggctgctgaagaaagcccgcaccaccgccaataaaaaggcggcagagttgcgcgcagttaaagcgagagaagaacaggcccgcacagaagcagaagcactgaaaaaggcgctcaaagcacaagccgataacctcatcaaattcttcatgacccagggcatggataaggctgccgccaccgcccaggcaaaaaccattttgcaaacgcagattaacgaagcacggaagcggaaaggataa

SEQ ID NO: 98737 - DNA, 378 bp, Enterobacter aerogenes
atggccacatcaaccaccagcacgaacagcgtcgagcaatacccactctcgcgctatgacgatcggaacatcgcagaccctatcctgcgcgccgagctgcgcaagcaggtgatggctatgtgccaatccaacgatcagaacctgaccccatatgaggtgaggctggacgaacagtatcggcccgatctcctcgcctggcgcatgtggggtattcacgagctgcgctgggttatcaccctggcagcagggttggaggatgagtccgaagggatgactgtcgggcgcacgctgaagctcccgccggcggcgtgggtacgcgagatgatccgccacttccagtatgacgggcaggtaatcggcacgttgtcggttgcataa

SEQ ID NO: 98738 - DNA, 390 bp, Enterobacter aerogenes
atgccaaatcagataccgttagatcctaaattgcctgccaatttcgatgacacatcgaacgataagcgcagtaaagcgcagctggatgcctggtgggatcacccatatgggatcacccaacccgacggtacaatcctggtgcgttgcctgaatggaggcgcttgggatcgctctacaatactgggaagggccaccagctatgaggaagcctgcgtattggctgaggaaaaacaggcggagtgggtaaagaggcgaatggaaccggtaatgactttctcgctcaatccgccttatgagttgctccggatgccgcagcgcccggatcaggaaccggtcgtggtaggaaccttcgacacgaaagaaagtctggaagcctttaagagcgcttaa

SEQ ID NO: 98739 - DNA, 642 bp, Enterobacter aerogenes
atggacaaaaaaatatgcgttgtgtgcctgagcgtggggaaacccgccatgcttaccgctgcgtgggttaatgacgagctgatcatggccgaacgcaagaactacccggagcgccgccgcgcgatggagttggagctgctgcgcgatctgcgcgagaaagaagagaaaggcttcctggttctggtggaggaagaaagcagctttatcaccggacgcgttggccagcgtatccggctgcgtgacgaacacactaccgggcgcccggtgctggtggaagctatgcgcatctataacgaactggaccgccagaaggcgatcaagcgcccgcgcatggaatcaggcaaatacatcctgcaccagagcatttttgacgccgaccgcgataagaaaggcgaggaattctacaacatcaactggcaggagcttgagacagaacacgtcctgacgctgttgtgctgctatgccacggagtacaacaacgccgccagtggcgacttcatccgggcgatggccggcgaactgtatcgccaccaggagaaatcattgcttgacccaatggtgagcatcatacgcggcgtgcagcgcctcacagagaagcgcatgccacacggcaagctgaccgggaaaggcaatattctttaa

SEQ ID NO: 98740 - DNA, 417 bp, Enterobacter aerogenes
atgatgtacgccgacgctattaaagcagcacagaatctggcgagcattgtcccccttttggggggcagtacctcccgcaaagactacgaagcagctataaaaatggtggagtatctggttgagcatgagccagatagcccgctggtgaatatgttgaccgctcaaatcgacgaatacgaagataacgcgcctgagttcgctgaatttaacgcccgcatagccgccggttcacacggtgtctctctgctgcgtattctgatggaccagtacgggttaaaacaaaccgacttcgaagcggagattggacagcgctctttggttagccggatcctgaaaggggaacgttcgctgactctggaccatatgcgcaacctgtcaaaacgtttcaacattccggttgcgcgtttcgtcgattaa

SEQ ID NO: 98741 - DNA, 312 bp, Enterobacter aerogenes
atgcacgtaatatcgagggagccattcgatattgccgccagacaatttcccaaccaggctttagcacttgacgacttataccgaaccctcaagcgcgataagttcaccagtccggacgatctcaaacagacgtttccgagcctggacaggatgaagtaccgggaaaaatggtgggtgattgatataggtggcgggaatctgcgagtgatgttctttgcagacttcgagcgagggaaaatatttataaagcacatatcaacccacgctgagtacgacaagctgactgactactaccggagaaataaagaatga

SEQ ID NO: 98742 - DNA, 483 bp, Enterobacter aerogenes
atgacgatccaaaaagagccaatacctaattataaatcacatacttacgaacataagcgttggtgtcgcatagtcgctgcgtcccgtgtggagcgaaaaaacaacagcagaagagaattaatgatctacgatagacgggtcactgaatctttcgacttcttcttaacctgtatgggtctggcaccgacaaaaaaccatgtcgttagactacgtaatcggagcgttggttatgtgccgggaaatatgttttggcacgacaaaacgtcggagtcccaccctccctccttcatagaccttacagggaaacaatttggtcaatggattgtattaggaaattatcagcctgcattcgctggagggacctggacctgtaaatgcgcttgtgggagggaaaaaaatgtcaaagctgccagcttaaccactggcggatcaaaatcatgtaaaaaatgcgccgctcaatcccggtcccgacgagggcaatga

SEQ ID NO: 98743 - DNA, 687 bp, Enterobacter aerogenes
atgagaaacgaaggcggcaattgcatgacacattccgaacttaacgaaattgcccgccgctggctcctgcgcgctgaatccgcgcgagggcctgggtgcaagatagcgctgaacgaagtcggcgccgtgggcgattcagagcgagctgatgcatggggctatcgctggggctggcgcggcggcagtgtgctggtggaagtgaaagtgtcacgttctgattttctacgtgacaaacataagccgcaccggcagcaaggcggcatgggtgattaccgctattacatgtgccctgaagggattattaatatcagcgatctccccgaccgctgggggcttttatgggtgaataagcgcgggcacgtcaagctgatggctgggcatatctgctgtctgatgggggcaagctggggaggaaaccgcgagctggcctttttatggaggcatgaagccgacacggaggtagagcgcgggctgctggcctacatgctgcaccgcgtcggcgatccggacgccctccttcagcaacagcgcgcctatctgcgcctgaacgcacaacaggccaccaaaattaacgaactggagaggctgcggcgcgaggattcacatgccatctaccggctgcgtcgattactttctgagaatggagttaatctgccagaacgccttgcgggggaaatactggtatga

SEQ ID NO: 98744 - DNA, 1089 bp, Enterobacter aerogenes
atgatcgttaataggcaatatttagagatgccgaatgtagtcttcacacactggcggcacaacgaaaccaaaaatgaacatatcgggtataaatttacaggagatatgaatgaggcccagactgtcgttaagtattttgggcgatttgactatccgcttgaactgatgggcatgaaaccgcgcgaaacttttatattgctcgatcttgtaagtgggttcatggaagaattctcaatggcggaaatgtgccagaatttcacccctgtttccaacaatctcaaaatgttatctcccataacagacttcgctccttatctttctaatgatgatggaacgcttgttgaggctatcaaggttcctcgctggggcggattgcgccgctgggtggcatttattgaggctgaaatcagtttagatttgttacccaaagaaatatattgcgcgagtcgcaataacttcctttcacggcaccgcgaaaactcctcgttcgaggcttaccctggtgattggataattaaagattctaatggggtttttaaagcgctaaaggaatcgaaattcgaggaaaattacaaggcttgcgagcctacacctacagaaatagatctcaaggcagcagacttctccgacgccctgatgtggctgaaggaaggtaaacgtgttgcgcgtaaaggctggaacggcaacggacagttttgctggatggtgccggaaggtcattacccagctcgcatggaagctatcaaaggccatttcaccagcgatatggtgccatatggcgcttacttttccctgaaaaatactcaggacgttgtggtgccgtgggtgccttctgtgggcgatctgctggctacggattggtatgtgcatgatgtgctggtatccgacattcctccccaccagctgcgcgtgctggaagaactggcgcaggtgagcgaccgcctgaagaaactcaattcgtttatcgacggccgaagcgaaatttttgccagcctgccctgcgccgagcaatcccgtttgcgcgagcaagccacctatatggccgattatgaagacgtgctgatcaggcgtgtgattgcattctcatga

SEQ ID NO: 98745 - DNA, 249 bp, Enterobacter aerogenes
atggaattgacgaaacagcaaatgcaggtactccgccggctggcgaacggcgagcagatttttcagggcgcgggcgacgtttatcgctggtctggtgacgttggcgggcaggtttgcacggcaccggtgaagaagctggtggagatgcaactcgtacgtatcgcgagggttaagggcggttctgtactgcgctgtgctgttaccgctgccggaagtgtttacctgaaaaaacagcattccccccaataa

SEQ ID NO: 98746 - DNA, 558 bp, Enterobacter aerogenes
atgaaactgacggaacaacagatcgcccgccgccgccaacgcgccagcgaagcccggcagaaagcgatagccaaacagcgggcaaaactggcagatcccgcctggcgcgaagagcaataccagaaacgccgcgaggctgaagccaaacgccgcgcacgtaaacttgcctcccctactcccccaccagcgaaaccacgcaaagcgattaaatcacgcggtctgaagggccgaacaccaacagcagaagaacgccgcatagctgatgcgctgggtgcgctgccgtgtatcgcttgctacatgcacggcgttatcaatacagagatctccctccaccacatcgagggccggaccgcgccggattgccacaaaaaacagctaccgctgtgcaactggcaccaccagtacgctgcgccgccggagatccgccgcatttacccctggctagtgccggtccatgccgacggcaccgttggcggcaaggccgaatttgcgcgccttaataagcctgagtcggctctgctggttgatgcgtatacaatgtcaggcatattgttctaa

SEQ ID NO: 98747 - DNA, 333 bp, Enterobacter aerogenes
atgcctattcgttttatgaccttcatgctggtggcaaacgtcattgtctcaaccattaacgaccaagccctgtcaatctggtggctgatgttagtagcgtgctggttcatcattctgatctcggttctccggcgccggtattcaccagaagtacgcgcgcataaagagtacatcacggaagtgaaaacagagttactcaaaggcctgtaccgcaagcgattcaaaaacattctcacccgccacggctgggccgaagaaggcacagaaggagttgcggcgatctcactgtccaatgcttatcttgatgaatgggcatattacgaaaggatgtaa

SEQ ID NO: 98748 - DNA, 408 bp, Enterobacter aerogenes
atgaatagatcaaccataaccagagagcgcctggaagagattatcctcgacaacagcgccagccttgaagagttcatggctataactcgcatggcgctggccgcaatggacagcgagccggtagcgtggacaagcgaagaagctattgcggaagtctattgcgacgaaaccggaatgataggcccgaaatacatgattggcgatgttccgctctatcgccacgcgcagcctgcgccagtagtaacccatacgttggctgatgtatttatcgctgcaatcgaaaaagagcaagatcgccttcatggagaagactatctgatggattcgaaagattgcatcgatgtaatacgcgaggaagcgttgcgcttgagtgccagccgggccgtcatgcttcaaggagttaagtaa

SEQ ID NO: 98749 - DNA, 621 bp, Enterobacter aerogenes
atgaaacacgatgagatagttatgtacgattcacctgaggccgctagcatccagacattaacaggctgggtagaccgtcacggccgcttttggggcaaagatgagcatatggcccgcttctccggcagtacccaccagcattgtgataagaaccctgaacatgggatccgggcgaacaacagctactgcgaggcctgctatgaagaacgcgagcaggcgcgctttatagcgatggagcgccagccctgggacggagaaaccatgttggccattcacaacagtgatacctattttcaggaacaggacgaactccgcgattactgcctggaaaaccacttgcttccggaagagttacagctggtggtgtgcaaacccatctacccgcgcgaaattgacggttgcgatcattactgtgatgacctgccggacggcggcgatctcccgctggcgttgcaagaggcctttgaccgccttaacgaagcgatccgcgccagtgaaccgctgtcatggttccctggcaacatagccgctattccgcctgaggatgttctctcacctgaagaacggcatgacattgaaatagcgcagttggaggcgggaagatttggggggattcgatga

SEQ ID NO: 98750 - DNA, 279 bp, Enterobacter aerogenes
atgaaaaacactgagatgggaatgctcgactcccctgaagcaactctcatcaaacttccggcaatcgacataactaacgctatcgactttcgcatgacgtgtttgaaaaaaaaggtggatagcgcgatagaaaagttgcctgaaacaggtgaagagctacagaacttaattgccgaaatgattgaagccgggaaggcacgacgagccattgaacggcatgcccgatatttagtgattaaagatgccgccgaacagcaacacactggagctgaaaaatga

SEQ ID NO: 98751 - DNA, 756 bp, Enterobacter aerogenes
atgagtgctgagatgcaaaaccttttaaacacccttcaatcctgcgctgacacgctcggtgtctcccaagaaaagctcctcgatgagctgaagaggaccaaagaaaaagcggatgaaatggacagcttttttactctgatggaacacgctggccaccagctgaaagcaggtgatccgattaacctggagtgcttcttttccaaccggaccatttccagcatggcggcgctaatgtttgcggctgagttcgtgcgcggcggcgggcgtaacttcttcacgtttgattacgacgtaccggagtttggcccgatcaacgtcactatccagaaaccagaccatttgagccccgcgcagcgcatcgcggagctggaagatgggcttgaagagctgaagagcgaaaccgccccgctcctttgccgggccgccagtgaattaagcgtctcctggatgtttgctaaagccagcctttgcatgcaggccgcgcaggtgtgtatcaagcatggtgatctgtttgaggccagcaattggctcgcctacatcactgacgaggcacaggcagatatgccggaagatatgaccgtcgccgggctggaagattggtacaaagcgaatctggtggccaacgacggcaaaaccacgttcgtgacccatagcgaggcgctggaaaacatcaaagaggcgttccccgcccacaacaaagccattgccgaagtgactggtcaattccgcacgggagctgaagatgaaaaacactga

SEQ ID NO: 98752 - DNA, 159 bp, Enterobacter aerogenes
atgagaaagtttgcgatggcgttggtcgggatcgtaatcggctggcacatctggagagtatttcaggatcacaacgctgataaggctgctgtatttgttctaatgattgtagttttatcacttctggtggcgctcttccgcaccggcggagaggactga

SEQ ID NO: 98753 - DNA, 315 bp, Enterobacter aerogenes
atgcaaaaggccttcaacatcgacgggaaaaccgtgtacctggcagctggccaggctaatggtcggcacgttgttgttgtaggccttcgtctatccggagacatgcctgatctggccagtatcacggttgagtttcccatgaaaagccagcagagcgcgcaggcgttcgtaagcaatgccactgatgaaaccgcccgtcgcgggctggataaactggtggcggagtatggcgaactgatacgcatggttaacgagtgcctgagccgcagcgcggcacaatcagagctgatggccaagcgaggtaacgcacgatga

SEQ ID NO: 98754 - DNA, 1029 bp, Enterobacter aerogenes
atgaccgatacgttgaccgttcaccacaacttgcccgctttacccgtcaattccaccagcgatgacgtgcggaataaccttcacgcgatgttccgtgacaaggcggccttttccgaacacacgtggaaaatgctgatgtcagtttgccgcgcgtgggctggctggtgcatggaaaagggctacacctggttcccggccgacccggagaacgtccgcgattatctgctgagtttgcaggagcgcgggtgcaaggtgaagacgatccagatgcacctcggccagctcaacatgctgcacaaacgtgccgggctgccgcgtccgagcgacagtaacgcggtttcgctggtgatgcgtcggatccggaaggagaacgtggacgccggagaacgagcaacacaggcgttggccttcgaacgtcgtgacttcctccaggtgcgcgcgctgctcggcgacagtgaccgggtgaaggatatccgtaatctggcatttttgggattggcctacaacacgctgctgcgcgtcgcggagatcgcccgtatccgggttaaggacctaacccgtaccgaaggcggccgcatgctagtgcgtatcggtcgcaccaaaacgttggttagcaccgctggcgtggaaaaggcgctgagcctgaacgtcacccagctggtggagcgctggatagccgtttctggtgtcggcgaagacccgaacaattacctgttctgccgcgtgctgaagaatgacgccgccgggccatcgtccaccagcaagctaactacccgctcgctggaaaacatttttgagtcagtacaccgcactctttacggtgcgaaaagcgacaatgccacgcgctatcttgcctggtccggtcacagtgcccgtgtgggcgcagcacgtgacatggcgcgcgctggtgtaggcattatggagattatgcaggctggtggctggaccaacatgaatattgtcatgaactacatccgtaatctggatagcgagacgggcgcaatggttcgcctattggaggatgaataa

SEQ ID NO: 98755 - DNA, 216 bp, Enterobacter aerogenes
atgagaacgagtgacgtagcggtgcatctggagctggagaaaaatcggggatactggcgtgcaaagggttacgagcgtaaagcgaccgatctgacgttaacgcgcggcgaggacgtgatccggaaggaacgcggccgctggtgcctgtatgaagcgcagcgcgggcgagtaaaagccgagcccatgctgtacactcttctgaaaacaacaatttga

SEQ ID NO: 98756 - DNA, 1071 bp, Enterobacter aerogenes
atggcacagattgaaagaaatggtgagatccgcctgggcgatgcccggttgagtgtttgggaaaatccgggccgcgttgatgacgactacgagcgcgagcttaagcgcgaggtattccgccgcatcgttcagacgctaaatcgcctgggctggacggtagtgatcccgcaggacaaaatcgaagattacagcgcgagctttgcgcgccggttccgctactgcacgaaaggcgacctgaaagcagatctgaagctttccggccgctgcatcgaactggagtttttccagaacgtgaacgcacctgaccgcccggatcacgatggccgctaccagtccgacaaagaaaggcacatgccgtacctgatgcgtcttgagatgttccgcacccgcaatcgcatcttgaaatatctcaccaacgttttcaccggttacagcgtcaccgcgccgcgcatcgactggtcccgcattggccctggcaaactgaccaatctggaagtggtagcgtattcctacatgaccaacggccattacgacggcgactggcaagactatctggatcgcaacccgcacatgcgcaccagcagttaccgcgaatctgctgaaaaggcaccgctggagccgggtatgcgcgtttggtggttcgactggaaaggtcggatcatgaccggcaccgccatgtatcacatcaacaatatgtggtacgtcctgtgggggcagtacggcatcggcaatatcgccagctttgatctgtatacccgtcttcctgaaaacccgcgcctgaagcgcaacggtgaattgcgccgccgcaagctggagaggctgctgagcgatgccgtgtccagcatggattatctacgcgcccaccagctgaagcagatcctctatccggaaaatgaaccgctataccggctgtaccataccgggcaccagctttatcactgctccggccttaacgggtacaccaaagaccccaattatgcgggcaaattccgccgcagcgagatagaggcctttaacccacacgagaacaaaatggaactggtgtgcaattctgaagaggtgacggcatga

SEQ ID NO: 98757 - DNA, 207 bp, Enterobacter aerogenes
atgattcgtaaagaaaaacgcattaaatcgctttgtttggccgtcgaatcactccgcgcagctgaagttgccctgggtgaaatggtcagctcctacaccgaagaacaggacggtactttcagcgcctgccatcctcgccacggcttggccaactcgctgagtcagatttcccacctgcgtaaggccctggaaaaatcccgcgtctaa

SEQ ID NO: 98758 - DNA, 852 bp, Enterobacter aerogenes
atggtcaactatgcttatggcgctaaactttaccgggagttcgacaagttccgggcaaaatttctctctgattccattgagcgagcgcagcacgtagacgttacaagtgatgggcgtaaagtgcggccagtctgtgttgttccttttaaagaaacaccacgaattcaggctgatattgataaatgggctgaaatggttaatgagcttgaacaatatcctgatttaaaaattccgaaaactattctctaccctataccgaatattcttcgcggtgtgaggaaggttacaacatatcagacagaagccataaatagcgtcaatatgaccgcaaaaagaataattcatttaattgataaagatattagaattcagaaggcggctgaattaggtgagcgagggaaaaactatatagccaaccttgaacgcaccaaggaaataatgaataaataccccgaagatgagaagtttcgtatgcgtattcatggctttagcgaaacgatgattagagttcactacatctccagcagccctaactataactccggccgctctgtgccttaccatgtcccactatgcggtgtattcatttgtgatgaaaccttgcgagatggcctaactattggtccagctgtggagaaagaaaaatttagcctatatgacgcacttgagcctattacttgcgaccgctggccgcatgcaaaaatatacagattaaaagatattgaagaagttaaaatccaacacgcaatagaaagagaggagaaaaaagcaaaatcctccgcttcggcaacgcgatccaggaaaactaaaacggttgaaccattaaatgaaaacccggatagcgctaaataa

SEQ ID NO: 98759 - DNA, 1485 bp, Enterobacter aerogenes
atggcccgcagctgcgtaacggatccgcgctggcgcgagctggtggcgctgtatcgctatgactggataagtgccgccgacgtgctgtttggcaaaactccgacgtggcagcaggacgagatcatagagtctgttcaggagacgggcagcaaaacgtctgtatcgtctggtcacggtacgggtaaatcggatatgacctccatcatgatcatgctcttcatcatcatgttccccggcgcccgtacaatcatcgtcgcgaacaagatccagcaggtcatgaccggtatctttaagtacatcaaaatcaactggaccacggccaccagccgcttcccgtggttggctgattactttgtactgacggaaaccgccttttatgagatcaccgctaaaggcgtctggaccgtcgttccgaaaggcttccgcctggggaatgaagaagcgctcgccggcgaacacgccgatcacctcctgtacatcattgatgaggcctccggcgtcagcgataaagctttcggcatcatgactggtgcgcttaccggcctggacaaccgtatcctgctgctgtcacagccaacgcgccccagcggttatttctacgatacacaccacaagctggccaagcggccgggcaacccgaacggcatctatacggcgatcaccctgaacagcgaagagtcaccattggtgacagctcaatttatccgaatgaagctggcggagtacggtggccgagataatccgatgtacctgattaaggtgcgcggactattcccgaaaacgcaggacggcttcctgctggggcgtgacgaggttgaacgtgctacacgtcgcaaggtgaagattgctaaaggatgggggtggatcgcttgcgtagacgttgctggtggtacaggccgcgataaatcggttatcaatattatgatggtgtctggagaacgtaataagcgccgtatcattggctatcgcatcctggaatataccgacgtcaccgagacgcagctggccgcaaaaatcttcgctgagtgcagcccggaccgcttccccaacatctcgatagcgatcgatggcgacggcctgggtaaatcaacggctgacctgctgtacgacaactacggcatcacagcacagcgcatccgctggggtaagaagatgcacagtcgcgaggaccggagcctgtactttgatcagcgcgcctacgccaacgttatggcggctgaggccgtcaaatcgggacgcatgcggcttgataagggagatggaacggttgatgaggcatccaagatcccggtggggattaacgctgccggtcagtggaaagttatgaccaaagaggacatgaagaagaaactcaacctgcactctcctgaccattgggacacctactgtttcggtatgctggcaaactatgtgccgcagaacgaggtgctaagtgtcgaagatgagcagcaggttgacgatgcgctggcatggcttaatgaatag

SEQ ID NO: 98760 - DNA, 1191 bp, Enterobacter aerogenes
gtgacctgggaagaacacaaaaagaattttgcccgcctggctcgcgacggtggttacacaatcgcgcagtacgccgccgagtttaatctgaaccccaataccgcccgccggtatctgcgcgcatttaaagattcagggacaggtccggacggcgtaacgccgagtaaaccggtgcgatcacctgatcggaaggtgaaaaatgatcaaaagcgtgatcaaaagaaacgtgatcaggcttttggtaaaagcgctaaaaaacagaaagataacagcattgtcagcggcgcgctggcgcaagcgaccgctcaaaaaggccaattggatgatcgaatgagtgatcatgaagtgatcacgcgcgccaagcgatcactcaagacgcggctgatgcgtgatcgcctcgatgatgatggcgagcgctttgagtttgagcccgccgactaccagattgataaccatgaggcccgccgggaagcgcgtgctatgttgcgccgttcgggagccgatgagctggagaccgcattactcgaaaaaactctctctcaccttcttatgttagaaagcgctcgtgacgtttgtatccagctggtgcaggagctacgcaccgacaaagaggatgacgacgacacgccggttgagtaccgcatcgccagcatgctgaatagttgcaccgcacaaatcagcagcctggttaacaccatattcagtatccgcaacaactaccgtaaagagtgcagggaggctgagaagcacgcgcagacgatggggcagaccggcattgtgcagctggcatatcagcgccggcgcgagctgggatggaatgcacaggaaacagctgaatttattgaagctcagggcggaaaggttcccgcgctgctgctggaaaccatacgcgccgagctgcgccaccccaaaccggataaagcgagcgaagcagagcagacagcagctggtgcgccgtcactggaagatttagacagagaggcacgagaacgggccgccagcaggcgcgttgactctgcactatggattgagcagcgccgtgacgaaatcgctgagattgtcgatacaggcggttatggcgataccgacacggaaggcgcttctaatgttccgtggctggagcaggacctggacgaagacgaagaagaggatgaagaagttacccgcaagctgtatggggaggatgactaa

SEQ ID NO: 98761 - DNA, 420 bp, Enterobacter aerogenes
atgagccgaaataaaacgaatcgtattacctcgtatgaaatcgcggaatacatgatccgcaccaaagcccttctttccgctaaagagcttgctgccattctggccaatgaatatccccatcttgatgttgatacccgcgacgtttatctgcgcctaaggtccatttcctgttcccgcttttcttcggtggtggtggatgacagctgccgcccgcgccggttccgcatcaactctcttaacccggagtttttccgccgcagccgcgcaccacgccgctatggtgaagagatcaccgtcgagctgcgcatgacctatgacgagaaagagcagcgcgaacaccaaccctgggtgatggcccgccagctgttcaacagcatttctcgccagcaccgccggaatcaactctccttctcactctaa

SEQ ID NO: 98762 - DNA, 1044 bp, Enterobacter aerogenes
atgaaagctgttatcactccctttgtacagaaagagctgggactcgcttcgttcaaagtagatcatgaagttgcaaggctgattaaccccggctgcaagttcatcatggagccgataccacgtgagttggtggaccatatggaagacggggtaattcgttccgagcaatctatggctaccaacgaagcattacgcatgttcttttcctgtgaggcggtatttatcaagtgtggaggcctgaaatcattagtcagttatctacagcagcatattggccagtgtcagtctcctgaccgcagtttgtgtgataacaagctgacgtatgccgaacgaagcggtagcgccgtagtgctctgctggcatcatgataatcactatagagtgcatagtgccgcagccattaaggatgttctttaccgcaataaagtggactggatactggatgctatccggttagatctgggcctgccagagagccgtgatttaagcgtacaggaactatgctggtgggctttcatgaataacctggtaaacgagcttccggaggaggcctgccgcatcgccattaacaagcagaaagcgcctgcgaaggagcccggcccgacgaaagaggccgatatcaagccatacgacgaccgtgcgatcgcctacgttcgatttatggaaaaaaaagccgcgccggcgcgtgccaaagtgtgtccggtagaggtggacccggatccgggcatggcatacttcaaaaagccaaagctacagccgctgaagctaccggattacttggtgttcgtcgcctcccgtccgtgctgtggttgtggtgccgccggtagtgctgcgcgcatctccccgtacctggtgcttaatcgccgtctgtgcgctcacgacacctacgcggtgccactttgccatcaatgtcagatggaaatagcgcgcgaccgtgacgcttgggaaaatgaacacggtaaactggctatccaccagcgtttatttttcgattacgcgcaaggtattggcgctatcacaagtcacacgtcaaattctggatga

SEQ ID NO: 98763 - DNA, 297 bp, Enterobacter aerogenes
atggctgaagcattcaagcgcctcacgcaggcgcagaaaaacaagctccgccgcaaggccgtagaagcgcttaaggatgagctttacggagatgaccctgacggtttccatgaactcgccactgcgcaggctgtgattgctctgctggatgagctggcactgaaaacagaacagcgcgccaactggtgtgatatggcgaagaaattaggtgaggatttggcggccgccgagaagcggatcgctgagttggaagcgataaagataaatgtctccccggcgcagctggagactaagtag

SEQ ID NO: 98764 - DNA, 372 bp, Enterobacter aerogenes
atggacaagactaaccagttggcccgcatcattaacctgcttaatgaacacggctacgaaatttacgatcgggaaatcgatgagacgaacgcctatgaggccgtggagcttgtgctggctcagctcgttgatgctcaatccgcgctggacgcagcagctgaagccgctaaacccaaagaagtggtgatccacggcctgggccggaagcccggtaacggtaaatccgtgccatttcacatgccagagaacacagacaccaaaccgatcaccattaagctaccgcttgcagtcagcgctggcgggcaaggttttcgtgagcaggttgtaaacatccttactgccaacggactcaaggtagaggatgctgattaa

SEQ ID NO: 98765 - DNA, 231 bp, Enterobacter aerogenes
gtgaaaaccaattacaagaattatgccacccgtactgaagcaatccggcagatggaggtaggcgaaacaatattgattgttccttattcagaaggggaatatgcccgcgaacaagccagtctgaaatcgtgcgcagttcgtatgggtagaaaggtagaactaaagcaggtaatgatggttattgaagatgaaattccccagtatttcatccgtgtaactcggacccaataa

SEQ ID NO: 98766 - DNA, 651 bp, Enterobacter aerogenes
atgcttgctgcgatcgagcgtcgtaaagcgctcggcttgcttgatagcgacgtcattatcgaacaaacgagcggcggtatcggctatcaacgggcgcaactcggagcttatttgcgaaatcttacacagggctctaaccgcaccaaacagaagttaaagctcactgaggcacagatcttcacccttcgccggatgattaccggcacaaaatatcaattacggggtgatggtaagaaagccatcgagaaccgaccttcaatagaaactaagcgcggcgtatggtttcatacaattgatccgataaatgcacccagcgtgccggtgctttatcgtctggggctggtggacttcaccattaatcatggtcaagagcccactaaatattacaatgtgcgtttaactgacaaagggcagaaagccttaatgccggagaacgccatgactaaagcgccagaacaacgcgatccacgtagccttaacgccatgaaagaggcagttcctgccacatctcaaatacagatgcgcgttacgcctgaccgcaaaaagcgttacgtgaaccaggctagggccgaagggatgaaactctcggactggatacagaagcacatggatcgcgtatgtgatgaagctggccagcccgataatatttag

SEQ ID NO: 98767 - DNA, 924 bp, Enterobacter aerogenes
atgaaacccatgctgaaaaaagatttcgtcactgctatcaattccctactggctaacggctttaaacctaccttctccaccgaacagaatgacgcaattggcctgataacctttatcgacaaaaatggtgatcagcaggttgaacgcgtttactgccagcacactccatctcgcgacctgatcgcacggcgctttactaaatggttcaatgaaatcatcgccgcttatcatgcagaagcagctgaagagatggctgaagggcagacggttctcgaccgcgacaaccttcacgccagtgaccgcgggcgcgccgaggcttttcaactaactttccgattgtccgatgaagtgacccagcgccgcactgttgaagctgcgcacaccgaggcgctggaagaaaacgacatgtttgacggcattctccgtgacggcctgacgccggagcagcgcgcaattcagaccggccgcgagggcatggatatctacggagagcgtttcaaagcaatgctagaggccgaccatgccgaagctctgaaaatggatgaagagatcactttcgttcgtgaattcgagtctctaacggcggaacaggcgatggcgtacgctcagcaatgggcgtatagcaatgcagacgctgctacaaagcaaaagatgtttgatcgtgaccatgacgaggccttcagattagacgctgccgtggcgaataccgatgttacatcaccgctacggattatctccgattacatgctgcggttcatgcgcaacaacaaagacgcaaagctatttgaagctaaagaacgactcgaaaagaagattaccctgtttattgctgatgggtacgacgagcagcgtctacgcggggcgctatccgatgcaaccagcagccatacgcgtgaagcgttcctgtctgcaattcagctctaa

SEQ ID NO: 98768 - DNA, 336 bp, Enterobacter aerogenes
atggggtttccgtctccagctaccgactatgcagagtcatccttaaccatcgacaagctctgtcagattgacggcaacagcattgtgatagagacgaccaaaggctatgccgtgatggatcgctcccgtaagccgaaaaatggcgatgtagtgctgatcacgctatttgatcaacttcattttgccaagatagtagcaaatggcctggttacagatgacgggcagaagcttaccggggatgagctagatggcatcggagtggatggtgtcgtgacgttcacaatcctgcgagcatttgacccagaggcctcaggaggcaaagggaaaacggcatag

SEQ ID NO: 98769 - DNA, 255 bp, Enterobacter aerogenes
atgggcaaagacggtaaatacgacatcatttatcgcggggaacatagagactacatcgcgccgggcagatgggttttcattcagcgcgctaaagaggttggtggtggttactggctgggtagggcatggcctgatttttttgaatttggccttgagcaacctacatcgctatcaatcggtatggacttcatcatctcttccgagaaaatcgccggcttaccggattgggatgacgaatttaatctggagggttga

SEQ ID NO: 98770 - DNA, 276 bp, Enterobacter aerogenes
gtggctgatctacagctggccgtgaagggcgaatactttgacgcgatgaagcgcggcgagaaaaccgaagagtatcgcctggtaaacgcgtattgggggcgtaggcttcgtgggcgggactatgaccgactgatcatcacgcgaggctacccccgcaaagatgacgactcccgccgtctggttatgctgtatgacggctacgagataaaaactatcacccataagcacttcggaccggatccagtgaaggtctacgctataaaaatcaacacatga

SEQ ID NO: 98771 - DNA, 612 bp, Enterobacter aerogenes
gtggaaattatcttatcggctatgaccccggaacttgccgctgcttttgatacggcatttgccgatcttgataactggcaggtagttcgcggcccattcgaaagcgtgcaaacttttgattgtatggttagcgcagctaattcttttggtctgatggacggaggtgtggacgcagcaattactgccttctatggcatccagttacaaactcgtgtgcagcagcacatcattgatgaataccttggtgagcagccagtgggcactgcatttgtgattggcacaaaccatgagaaacatccttggcttgtccatgcccccacaatgaggactcctgaggtaatatctggaacagacgcagtataccgcgccacttgggctgcgctggtggctattcatcagcacaataagaagggcgatggaatcaagaaagtgatatttccggcaatgggggctggttgtggggaagtgccggcaataaatgtcgctgagcaaatggcattagcatggagaaactttcatgcggcgccgactgtcatcaactggttatatgcagataaaagagcgcgatctgttgatcattgtttgaggcgtcaggaggttgctggtggctga

SEQ ID NO: 98772 - DNA, 813 bp, Enterobacter aerogenes
atgacactattcatccaatcagaggcttatgtcattggtattgaaaaggcacaagacgattcagagcgcaccgttgggaacatcatcgagccgcagaaggacggcactctacatgttgtggcaacgttcaatgaagcagtagcagccgtcattgaggaactgaccgacaaggcccgcgctgccgagaaacgcgtgaaagagctggaggccaaacagcagcggatcagtctgaaaccgcacgtttatcgcgagctggtgaaccagctgcgtgacacggccgtgaaatatgccggatgccagcagctgcgcgaacagctcagcaagacgttacagtatgcgctggtggctgataatacctcgcctattcctgatgtttccgccgtcgcccgcgccgcgatccaatacatcgacgcgctgccgagcgaagtagtcgcaacgctgccggcgatgcccggcttcgatcgtgattgggctgatgaggtgctggcgctggccaccagcccgaatccgaaggcgctgaccctggcgaacgagacgatggacgttgagcgcctgcgtgaaatcgccgaagaggacaaaggaagcgacgttaagtttgaatcctcagtaatggcccgcatgctgctttctgtggccctaaacagcgatccggtggcctataccgatgctgaggagctggagagtctggaaggggttgacgggaactcttacgcgcacctctggccaaacgcctacggtttcggcaaagatattccgctgtacaccgttccgcagataatgctgccgccggtaggacaggaaccattagaatga

SEQ ID NO: 98773 - DNA, 261 bp, Enterobacter aerogenes
gtgaatagcgtcaaagacaaaatcatgcaggtgatgaaagaaggagcagctcagcaggatgcgacgctgggtagcggattccccttccggcttgccacctggaacatccgcagcgcgatggagcgtaaattccccggagtggaatggaaaagtgccgacctgcgtaaagagcttgtcgaattggcgaaaaagggattggtatccaaggatgaataccatagtcgtattggtcaggctgtgtggcgtctggaggtaaaatga

SEQ ID NO: 98774 - DNA, 585 bp, Enterobacter aerogenes
atgaccactaaccagttagcagaaaacagcgtaaatcagcttttgaacagtatcagactggcgcgtgataacgcagagcgcgccgacaatcgcgtagaccactcgttttactacgcgctgacgattgctctggaagaactacaggagcgccgcaaggctgactgtgagccggtagtgccggatgatgtttctggcccgctggctcatgcctacaaagagcttacgcctacattcatgcgcaaccatatcgctgtattcgaacgttacgggattgcaccaaacgatagctctaccgtcattcaggcgcttcgaattgctttagatggtatcgaacgtcgcgccgccatgctccagccgcagcacaccatcaagaccgcgtcagctctggggtcgttgccaaaaacaggcgaagtgctgcacaccaactctccggtaattccggatggttacgtaatggtgcctaaggagccaacagaatcaatgataaacgcttggttatcagaggtcgcgaactggcgcggtcacgttgctggttataaagccatgctagcagcggccccgcaggaggaggtgaagggtgaatag

SEQ ID NO: 98775 - DNA, 141 bp, Enterobacter aerogenes
atgcaattcaccaaagagcagttaattgcaaaggcgcgagagcagattgcattttgccgcaacacgcagataacaggcgaaggccgcgtccacgtaaaccaatgttcggcgctgtttgaaatcgcgctgttgcggttatga

SEQ ID NO: 98776 - DNA, 273 bp, Enterobacter aerogenes
atggcgaaattaaccgattatcagctcaacactcttcgtgctattagcgaaggtcaagtgatgctccgtggtcgattcgatcgctactggtgggaatccaccgacacattatgctcggctgtcgcgaggagtttgaagtcaaaggggctcattaagacggtttaccttaattcggtccgggataaagtcgaattgaccgaagtcggacggcaggcactatcgaaaatagaaatcactgtagcagatgctcagcgcttcgagagagggttttaa

SEQ ID NO: 98777 - DNA, 717 bp, Enterobacter aerogenes
atgacgatgaatgaacagaattttagccttcctgagctgacacaaaataaacagcctctacacatcccgcagcggagacgtcacgactggagccagtctgtgatgcgcacatgtattcactgtgaccagtgggcgctgacccttcatcatgaggggtttggcgggttcatgtgtgcaagctgtttcgatgctgaatacacagcggacctgaaggctatgctcgttactgcacttgaacgactggaaaccgcagagaagcgcaatgctgagctggtagaggcgctggagaaggcgcaagacagcgggaaagttttccagcagtcatttttccgtcagtccctgatgtatgacgtcgttgccgaagcatacgaagaggccaaagagcagattgctaaagacgttgagataaaagccaggctatgccgtgaaagtaacagcctgtttgacaggttgcgcgtagcagagaagcgcattgcagagcttgaagcgcagaataccgtagccagtttgcccggcggcttcagcatagaagaatcccgcagccttcaagccgatttagtacgcagccatattagcaaagctttaagtggcgaaaaaatgaagtcagcagataaaaacgccgatttgcaatggattcatagcgtcattgtcagggcagcatggttcgtcaaggcatcggtagaagcaactgctggcatcaaggtggaggcagagtga

SEQ ID NO: 98778 - DNA, 264 bp, Enterobacter aerogenes
atgtccaaacgaacccaacttcaaaaggttagagatgttcgcaaaattattgattttgttaaatcgaacggacgtatcaccacggaacaagtagccgaaatgacagggtgttgtgtcaaaacggcccgtctcgatatgcaagtggccgtgaagacaggggaagtagtgcgtcatggccgatttggtctattccgcgatcaacgcgcgaccattgattttgacttagcgaaatacagctacagcagcaacaaaggggccgaataa

SEQ ID NO: 98779 - DNA, 387 bp, Enterobacter aerogenes
gtgagcgacgacgaaaacaaaattattaagctggttcgtcctgaaccgaacgaaaaagacctgcttaacatccagattgaaaacgaaaagacctaccagcaaaagcgctgcccacatccgcgcacctttgtggacgagtcccggcgcagcttttattgcgacgtctgcaaatcggagctggatccgttcgattacatactggagtgcgccaaaaaggcccggcacatcgttactgatatcaagcagctgcgccagcgcgctgatgagctgcgtacttctgttgccaatctggaacgcgaagagaaaaacgctaaagccaggctgcgcgccgctcgtacctcaattctttttgcagaaaatgacctgaaaaatatagagagatcctaa

SEQ ID NO: 98780 - DNA, 486 bp, Enterobacter aerogenes
atgaaaatcaccgataaagagatccttatcgccgtctggcacgcgacagttaaaaagctgccgtattccgcaacgcatcattatgtcggtcatctgcgtggtctggcaggcgctgatgattattggcaccgttccgcgacgcaaatctgctctgtttcccgtggctatgtgcttggcctgccgctttcagtgagccagtcactgcgccgtatcaactcgctggtggaccgtgagcgcctggtcatttccgaccggcgtcccggcgaagccttttattttaagctgcccgatcacctgacccgtcctgcgttcgatatcgctcgccttgtactgcgcggaaaaggaatgaccgaaacggattttttgccggagcagggctacaccgagatcgcgaaggatgtttgtgccgcgattgagcatgaagtcggtccgctcgttaaaaaatatgtgcgcgtttgcgcgcttcctgaagaggtgactctgtga

SEQ ID NO: 98781 - DNA, 315 bp, Enterobacter aerogenes
atgatccagaatctctcttctcgccagctcattcatgaagcgctggaaaaacatggtccgctggcccgccgtgaaattgccaatctaaccggcctgaccacggcgcaaattggccgtgctatccactacagcttgattaaaggtcacgtacagattgtggatgggctcgtagtgctcagtgacgggttgtttggggcgtgcgtagacgccgctgagcgcggtcctggcaacatgatctttgaactctgtaagcgcaactggcgcggctaccaggtcaaccagctgcttaatgcatgccggagagcttcagcatga

SEQ ID NO: 98782 - DNA, 162 bp, Enterobacter aerogenes
atgcaagttttaataaaattggccgttacagcattttttgtctggcttttctctgttgctgtaaccagcttcaaaccgggcgccaacatgcgagcgtcactacacccggagaatctctctaccagctatgactgcgatcagcagggggaatccgccctatga

SEQ ID NO: 98783 - DNA, 1263 bp, Enterobacter aerogenes
atggccgtaactgcacaaaaccaatcacccgtcattgccactatccctgaagtccttgaagcaggtatcccggcagtgatccagaatatccgcgccgcacagcgccgagtgacatgcgatgatctggccgctcgcttcttcgataacgctgtacagtcagcagaaatgctgatggcgcaggcgatagacgtccataacgatgaggttgataattacaactcgctgctagagcggtacgaaaatacgcaactcaaactaggtctgaaagagaaagagattgaagatcttcagacccttatggagcaacgcgagcgtcagaaacaggacgatattgacgaagcgacccacgaggccatccagcgcgccgataaagcggagttgatgtgtctcgaattggagaccaagcttaacgaaactactaccatgctggagctgcgtaaccagcaggtcaacaccctgaataaatcctataaagagatgttgaaactggatccgttcaatctcgaaaaacgctatgcgaaggcgaagcgtgagcgacaggatctgcgcaaacaggtagccgacctgaaccagcaaattaaaaaacacgttaaagaactcagtgatgcgcgtgtggcctatgccaaacagaagaccgaaacggtccgcctggcggaggaaaccaccaaatatggcaatctccaaaaagagatgtacggcatcacacagcgccgcttcacctcgaagaaagaacacccgaccctggggctgattaccttctacccccgactactggcctatggcgtatcagcgccgaaacagtttaatgcagagcgcccgtatattgtctctaagctggattttgcctatcagttctgctgtgacatggggtatgccctggacattcgcataaacgagtggctgatgccgaacttccagcctatttccatctttgaggagtatcagccggaaggctggattgagtttttccacgagctgatctgcgaggaaatggaaagccgccgtccggagctggtgcgccgcgtagaatgggctcaggagctgatgctggtagaagcagatttgccgctgagcgatgagctgattgatgagctcgccagcaaaggcctgcacaccttatttgacgtcgtaacgcgccgccacgcccagctggtggccaactatgacattacgcctgaagacgctaaaacgctgcttgacgtctgctatgcgcgatctgacgcgtgggagaaagacaacggcggcgctatttacgtgcgttaa

SEQ ID NO: 98784 - DNA, 219 bp, Enterobacter aerogenes
atgcgcttgttcaagaagaagtttcactactggctgatagcatttgccgtcccttcgggaggcataaagcacgtcatcacgcgctatcgaaacaaacgccttacgccggcgcgcattttacaggccgcgctgggggaggggctggatacggattgcgtcgttctggccgcctcatatcttggaaaaatgactgaaactgaagccaatacggagctttaa

SEQ ID NO: 98785 - DNA, 708 bp, Enterobacter aerogenes
gtgaaaattgctctggtactgcgctcaggtggcgattacagcgcctctgacgttcaatggctggttaaccagctgcctcaaaattatgaaattatctgctttaccgacattaaattcatgactatcccgcgagtgacgcgtattcccttgatcaaacgttggggacactgccggggctggtgggccaaaatagagctgttccggccagacattgaagatgattttttctatctggatctggataccgtcattaccggcgatatcacaccgatcttggataacccgccgctgaagttcaccatgctgcgcgatttctaccaccctcaatacttgggaagcggtgcgatgtggatcccgaacgaggtgaaagcgcgtatatggtccgcgttctggcaggatccgaaaggctggatgggccgttgcgtaacaacggattgctggggtgatcagggctttctgcggcaggtgatgggcgatgagacgcagaccttccacgatctgtatccaggctggttcaaaagctataaggcggatgtagtgacgcccggcagtcgatacgccagctcacgcttttctcgtggcaacggccaactaccagaggactgccggattgtctttttccacggtcttccacgcccacgccaggtatcagagccgtggatccccggctctaaggcgcagttggccggaaagaacaaaaaaacctaa

SEQ ID NO: 98786 - DNA, 660 bp, Enterobacter aerogenes
atgacacctttctaccaccgtatagacggcagtcgtttccgtaatatttgggcagtaggagatctccacggttgccacggcaatttgatgcgccgcctcgatgaggtgggcttttctcctgcttacgacctacttatttcagtcggggaccttatcgatcgcggtacagaaaacgttgagtgtctggaactactccagatgccttggttccgggcagtacgcggtaatcacgaacagatgatgctcgatgcactctcgccaaacggcaacgtgaatcactggatggccaacggcggtgactggtttttccgccttgactacgacaaagagcggctggcaaaagcgcttgtagagttggtgcgacagctgcctttagtcattgagctctgcacccccggacagataaccgttatcgctcatgctgattatcctgctgaaagctatcaatttgggaaggacatccctttacatgatgttatctggaggcgcacccgcattattgatgcacaagacaacatcggcggccctattgcaggtgccgatcgttttgtgtttggccacacgccagcacgcgcgccgctcaccttctggaaccaacattatatagacacaggagccgtcttcagcggcaacctgacgttaatgaaattacagggttaa

SEQ ID NO: 98787 - DNA, 627 bp, Enterobacter aerogenes
atgttttccaaaaattcagctggaggcagtgaccgcgctattatcgtcggtagtggccccagcgccctgaatttcgtagcaccgcgcggcgttcctatcattgcgataaacggcgctatcgactggataaatcgcgcctcttattttttcaccttagatccgtcaccagacaaccttcgtcgtattgcccacggccgccgtcggcgaaacgtgcgttattgtatggcactgccggacgtcgagcaggtggaaaaacgcgacgggatttggtgtttccgccgcgttgccgagcgcggcatagaacctacacaaaagaacacccctgaatggtggcgctggcgatggtcagcaaaattgggactctgcacagaccaaaaccagatctcaaccggtaatagtgcctatggcgcccttaatctggcttaccacctcggctttaaacacgttgcgctagttggcgtggatgccaatcagaaaccacgcgtgcataccggcggcgtcccaaaaaacctgagccatttgccgctgctgttccagtcagcgcgtgagcagatcgatgtggtttgctgcggtgaaatgggcgggatccctcagatgaccctcaaagaatggttgaagaacacatga

SEQ ID NO: 98788 - DNA, 174 bp, Enterobacter aerogenes
atggccgcaattaaaccgaacgacccgttaaacctgcctcaagctgtacagggcatcatgcctaccaatcaggtagagatcgacaaccatgttgacgggcttattgatgaaatgcatcgccgcctggagaaagagtttgctgaagaaaatgccgcagcaaaaaccggtaactga

SEQ ID NO: 98789 - DNA, 582 bp, Enterobacter aerogenes
atgcttcggtttactgaagacgagtttaaagcgttcacctcctcgcgcgctgccgggaaaaagcggacgaaaaaggccgatcccttcctcgcattggcctccgtaaaagagccttcgccgcacgctgttgcgctggcggcgctggccaaaaatcccgatcttcgtaaagggaatcaggaacacttcgaacaggtcatcatctttgactatttcgagcgcaaacaccctgagatttacgagctgctgcacgccacgccgaacggcggcaaacgcaccaaagccaccgccggaaagatgaaagccgagggccagaagaagggatacccggatatgtcgctggacatgccgcgcggcatctatcacggcttgcggcttgagctgaaggaacccggcggcaaaagtccatctcccgaacagatcgaatggatgcaccggctacgcggccagggctactacgtggtcctcgcctacggcgccgagcaggctataacggccatccttgaatacaccaacctcaagccacgcgaatctatcgagcacgtattgaacgaacagaagtggttttcgcccaataaaaaataa

SEQ ID NO: 98790 - DNA, 246 bp, Enterobacter aerogenes
atgtcgaattttgcagacgatgttgatctgagcgccaacattgaagagaccataaaagagcgtgcgattgacggtattcgcgagcaggcccgcgccgcgcgccatagtttcacaggcaaatgccattactgccaggaaccgattaacaccggcatttactgtgatgctgattgctccgaatggcatcgccaggagcaggaagctatgaagcgtaaatatgggcaccagggaccggggagcctgtaa

SEQ ID NO: 98791 - DNA, 267 bp, Enterobacter aerogenes
atgggaaacgatttggtgaaaaaacgcaactatacggtgaaatatggcaccttgcgcacattgcaggaatatgccgacccttacggtttggaagtgcgccgcgagggattgaatcgcggctttaagctttaccgcccggatggggaatggcaaatggtcacagattttgtcaacaacagtatacccctggccatccgtgagcgttcccacgaagagtgggctcagatcatcaaagacaacgcgttactattgctggccgagaagtaa

SEQ ID NO: 98792 - DNA, 438 bp, Enterobacter aerogenes
atggcaacgctatctgatacaatcaaaccgaataaaacatatcttgaagggctgctgcgtaccgcactgctaggtaaaactgaagatgaatatgtcgatttttacctgaaagggctacgtgggcgcctgatgaaaaacccgcgcctgtaccggagttttggcccgtactggcctgaaataaagaacctccttcttgagcggggatatgggaattttggacgacttatcgaccgtgatgttcgtaaaatctaccgctttgaccgccccgcattgacgctgattgcggcgacgttgtatagccaggagcggtttgataacgggcaaatttattctgcctggcacctgctgccggtaccgtcggaggttgacgatcaggaatattcctttgagtccacggatactgaagttgaagcgctggtttacgggcgcgggggataa

SEQ ID NO: 98793 - DNA, 6765 bp, Enterobacter aerogenes
atggcggaagtatctggcggggtttttacctgcaaaagtgttggcgaaattgttcgttttattagagcaattaccactcgccgcaaccaggtgtcttatggcgtggaaaaagtcgaggggaaaagttacgaccgtctgcgccgcgaggcgaacgaaagagccgtaaatctgcttaacagcctggcggatggcgctgaactaacaatagaacagcgccagattctggcggggtacaccggggaaggcgggattggcggatccgtctccgaatactacacaccgaaaccagtcgccgagggtgtgtgggagatgatgaagctttacggtgctgatgttgggaataccctggagccatcggcgggcaccggcgtattcaacgagacgaagccgaccggcacggtgatgaccgcaacggaaatcagccctgtttctggccgcattaaccagctgcttcaccctgaagacagcgtgcagatcagccccttcgaacagctggcatccaccaccccaaacgacaccttcgatcacgtcgttggcaacgtgccgtttggcggccgcgacaacacgcgcaacctggataagccttacgccgaagaaacggacatgggttcttacttcatgctgcgcatgctggacaagattaaacccggcggctttatgtgcgtgatcgtgccgccgtccatcgtctccggcaccaatatgaaacgtctgcgcctgcgcctgtcccgtaaagcggagtttttaggggcgcaccggctaccgaccggcacctttgacgccaacggcaccagcaccgttgttgacgtcgtactgatgcgtaagcacccgaaagagatggccgagaaagtcacgcaggcggaggaaagcacgctggaagcggcaaacgtcctctggcctaccttcattaccggcaaatggtttgagcgcgacgggcgccggtttgtccacggcacgcaggaaaaaggtttccagggccgcattgaagtgcgcgccgatggccagatcgataaccaggcgctgaaggcgaagctgatccatcgctttgatagccgtattgactggtcactgctggatatcgacgagccagcgccgaccgccgatgtggtggatgatggtgagctgcgcctgattaacggcgtctggcactccttcgttggcggccgctggattgaggctgacgccgggaaagagctggtaatcgacaatgccgcatatggtgcggacagctgggaaagcctccagcgcaacctgaccactgccgaaggccgtatggccatgacgtttaaccagatggccaacgttcgccagcagtacaccagctcgctgagcgaagacatggtgcagctggtggactggatcaacagccagccggagaaataccgggatcgcctgtaccgtggcgcgatgattggccgcatgctgatcgaatatcaggacatgaaggccgccgggcatagcgaacacgacattgagcagcgccgcttgtcgctggtggcaaaaattcaggctgaaattgaccgctacgggaatccgggccgtggcccgatcgccaagttatccggcaccggcgcgcgtgcgtggttcgccttccgtggcgcgattaagctggatggcacgatctccgatgagctgaccggtaaattggtgacgcatgacgccagcgccagttacgactccaccagctatcaggacacgctgcgccatctctacagcgacctcacgcgcgacccaatccagctggaagacttccgccaggcctttaccggcgatctgccttcgagcgatgacgaactgcttgccctgctggccaatacgccgggtatcgccgtttcaccgttcggcggcatcgtgccgttcgcccgcgccaccagcggcgacattaacgaaatcattgcgccgaaacaggcctttctcgcgcagctgccggacggggccgttaaaaataacgtcctcaaccagctggcggccatcgaagagaaacgcaccaaaaccccggctgaaagcatccgctttaagctcaacagccgctggtttgaccgctccgttatcctggaatttttgcaggaaaacggctatccggatctgcgctacgtccagtcagtgcagctggaaggcgacgaaatggtttccgaaacctaccacggcggcgacggcctgtttgttggccaccgttacggcgtcgtgcagcgcaaggacaaggaaagcggcgagatccgctatgagtgggataaaaaatccggcgacaacgctaccgggttcccggcacagctggagaagtacctcaacggcgcgcgcatcagcggcaaagataccgcttctgcaaacggttatcgcgagcaggctgcgctgctggaggaccagtttaataagtggattaaaacccatgatcgttacgacgagctggttgccaaatataacgacgttttcaacagcaacatcccatacgagcattccggcgattccctgggcctgaacggtatcagcggaaaacgccagccgttcgattaccagaatagcgaagtgcgccgtctctcagaggacgggcgcgggatcctgggcttcggaaccgggctgggtaaaaccacgaccgcgctggcgctggaggcgttcaactttgaaaacgaccgctccacccgtaccgcgtatgtggtgccgaaatctgtgctggaaaactggtattacgaggcgaaagagttcctgagcgagcaggccttcggtaactacctgtttgtgggcctggatgtgctgatggacggcgacaatattcgccaggtgccggtactcgatgagaacggcaagcaggtgctgaatgatgacggcacgccggtaatgcgcgatggcctgaagctggccgacgaggcgacaattacggcacgcatgaacgcgatccctcactccaactaccgcgccgtggttttcaccaaagagcagtatgcccgtatcccgctgcgtaacgaaaccgtagacgaacacgccgaagacatgctctatgacttcgtggctgccgggcgcgtggccagcgcgatggagtcggactcccaccgcaaagaagcggcgcgccggcgcgtgctttccgagtattcggataccggcaccgagaaggccgagaagtacccgtacttcgaagatatgggctttgacagcgtgatcgccgacgaggggcacaactatcgcaacagctataaaaatggccgcgaggcctcccagctggcgtacctgccgaccagcgccgttgcgcagtctgcgcgcgacatggcgattaagaacgcctacctgatgaaaaagaacggcggccgtgggccggtactgctgaccgccacaccggtagtgaacaccccgatcgacgcctacaacatgctttctcacgttctgcctaaagagttctggcagaaaatgggcatcttcgggccagacgacttcgttaaattcttcggcaaaacccgtctggaaacggtccagaaaatcagtggcgaagttgaagagaagatggcgctggtgggctttgaaaacctcgatgcactgcgcggcattttccaccgctggacgacgctgaaaacagcggaagacgtcaaagacaccgtagagattccggaactggatgagcgccagcaggacgcgccgctgaccactgagcagttggatgcctatgaggagctgcgaaagcaggccgaggccgccgccaacgctaataacggtatggctaccatcgtgcaggaagatggcaccgtaatcgaggaaaaagctcgtccgatcttctccatcattcgcgacatggaccgtgtttgtacggatatggacctgtaccaccgccggatcacctatcgctttctgccggaatacgccgatgcggtgcagcagctggcggacaacctgccgaaacaagccaccagcgctgaggacgatagcgatgaagcggtaacgcagcaggcacagtattcgctgatcgacaaaggcgactttatccagctccaggtgccggaggcttttgagccggaagtgaataagcgcctggccaagtttggcataaacgagcgcaccgtgacgcaccccgtaacgccgaaatacgcgaagctgatcgccaccctgaaggagtttttcccggaaggtaagcaaatcatcttcaccgatgagaaaacgcagcaccagaagctgaagcgcatcatctgcaacgcgctgaatatcgacccatcgcaggtggggatcctcaacgcgcagaccgtcgccgaggctggcaaatccggcaaaaagctgaaagccgttaagccgcccaaagacctcccggacgaaccgactgaggcgcagctggcgaaatataacgagcagatggcactctatgacgcgtatatcgcgcagcaaaacgagatgtcgctgggcgggctggagaaaatcgctgctgacttccaggagggccgcaccccgatcattatctgtaacaaaaaggcggaagtggggatcaacctgcatcgcggcacgaccgatattcaccacctcacattgccgtggaccccggcatctatcgcacagcgtaacgggcgtggtgcccgcgtgggctccaaccgcgccagcgtgcgtgttcactactactgtggcaaaggctcgtttgatgagtaccgcctgaagacgctgaagcgaaaagcgggctggatctccgatattctccgttctgacaaatcagagatggagaacgccgacgctaacgacattatcgaaatgcagatgtacaccgccaaagacgacggtgaacgtctggcgatgatgcaagcccaaatggacaaggcgaaggccgcgcagctggcgcgccagaaagagcaggctggcgttgacctgcaaaactacgtcaaagcgcagcacgccgccggcgaggatgtggaggcactgaccgctcagctggaaaccagcaaaaccgagctggaagaggcgatctcagaggtggcccgctatcgtcagctggtgctggccaaagcggcagaaaacgaagagtggaaaacgcgctggggcagcgtttacagcagcgatcgactccagctctcccaataccgcaactctcttaaggccgcgattcgccggaaagccgatctgaccagcgcgatcagtcagcgcgagaagctgctggcgcgtagcaaaaaggcagtgacggatatcaaacgtctgcgcccgctggtggaagatgcgatgagcaaagggctgcttagcgtcgatccggatctcattaaccacgccaaagattttctggtgattaatgaccagtcctggcgcgtggggcaatattacgagaataacggcgatattgttcgcattaaggcgctggattttgacagccagcgcgccgatgtcgaggtaattttctccagcaaaggcactcgttcaagctcctggccggtgaggttgttgcaacagcaggtagacgttaccccggatgaagcggcggtgatgggtaaaataagcggcggcgtgtccattgcgggcattaacgatctcatcaaccgcgatgacttctaccgtttccaacagcgcggcatgcttaaaatcaccgactcctacgcgatgcagaacactgagcagggctactcgatggagtttgttagcagctccgatatcgtgcataacgctgtttatccggaccgcaccgatggtgctctgaagtcggcgatcgcgaagtgggcactcggataccttgccgctggtcaggggtacaaaatcagcagcgccgaggcgtttttaaccgagctgtttggaagtaattaccgtgacgtgatctccacctatggtgatgcgctttcccctgaagatattcaggagcgcattgcggccgagatcgccaaacttcccgcgaaatcaccggatggctcaacgcgtaatggtgattctgaggttgaggtggccaacgccatctttaatagccacccgttccgcgcctcttcttacgagctgggaacttcagagttcggcgcgatcagcgtgtacagcaacaagtcagatattaaggccgcgatagatgccgcaaatgcgcgaattgctgctgagcggcaggccaatctggatcatgcagtagaggcgttggcgcaatcatgggtaacggcaatcaaaggttcggtagcaactggtaaaattacccctacaattgctgaggtagttaacggtggtgctaaattcatggacgcttacagcaatggctccatgccgatgccgaccgcatacgggcagaccagctatcacgcaacgtataatctggtatcaatgttctcggatctggtaattctggggctggtggacctgagagaggtaacgtccacgctgctaagcgcccgtaaaaactatctcgatgtgctgattcgtgtggccgacaggttgcgggaacgcaccgaccaggagaaagccgcagacgctgaccgcatcaatctggcgctgggcaacataacggaagaggagatcgcggcgcgtaacgcacagcaggatgagattgcttcagtgcagggggatgccaccagcactgcccaggcgttggggctcaactaccgtgtgtctacctctgacctgaagatgatgtacgcgcctaagtttgcagctggtgaggtgtttggccttcaggaggcctctggacagaaaggagtgctgttccgtgctaaagatgagctgaaagagaaatttggtgcacgctggctaccatctaaagcgaagaatagcgacttccctggtaactggtggatcgttgaaactaaacacaacgcggcggacgtgctggccgttatccaacaatacgcataa

SEQ ID NO: 98794 - DNA, 1716 bp, Enterobacter aerogenes
ttggctgacaaaaaaattaccctgtcgtctgtcagaaaggctctgacggacgcgttcaaagaagcgcgtggggaaaacgacaacattctgttatcggcgctggcggtccagggcggtggcggtgggtatttcttttcccgctcgtctgcgccggcggcgttggccggattcctcaataacaattccggcaaggacgatagccattcctcatgtgtcgtggacggcagccgctacatattcgatgaggcggttcttccggatgaccgtttacagcggtatccaatcctggaggagatgtccgtttacagcacgatcgctaccgctctgaacatccacatcacacacgcgctgtcgtacgacaaaaagaccggtcagaccttctctatctccccggttaacaatggcaatgaggccgattacaaagctgcgcaggttctctgtgaagagctgatgaacgacattggcaagaccatcaacaaagaggtggcgggctgggcttacattatggccgtattcggtgtcgcatatatccggccacatgccgtagaaggcgtgggcattaagtctttcgagagttcttactactccctcccgtatttcgtgaaagagttcgaggtggctggcaatctggctggattcagtggtgactacctcaaagacgcaaccggcaacctggtgttcgctgacccctggtcgctcattccgatgaagatcccttactggcgtccgaaggggaaccagatgccggtgtattacggcacccgcccgtacagcctcctcgatgacccggaaacccgaatcccggtagaaacgcagaactacggtaccagcttgctggaatacgcgttcgagccctacaccaacctacgctcggcgatccgctcattgaaggccagccgctttaacgcttccaaaatcgaccgcctgattggcctggccatgaacagcctggacccggtgaaagcggcggactactcccgcacgatctcgcagaccctgaagcgtgctgctgaccttatggagaagcgcgcaaaaggggccaataacatcccaaccgttaccaacaccctgctcccaatcatgggtgacggcaaaggccagatgcaaatcgacacgcagatcttgcaggctgacattaacggtattgaggacgtactgacctacatgcgccagctagctgccgcgcttgggctggattacacgctgcttgggtgggctgatcagatgtccggtgggctgggtgaaggtggcttcctccgtaccgccattcaggcggctatgcgcgcttcatggatacagcagggcgtggaagagtttatccagcgagccattgatatccacctggcgtataagcacggcaaggtctatccggaaggcgagcgcccttacaaaattgagttccactccgtcaatacggcgttgcagcaggaacacaacgataaccgcgacgcgcaggccaactacgcaactgtcatcacgcagatcctggacgccatcagcaataacccggtactggccaactccgaagcgtttaaacgctacttgtgctgcgacattctggagatcgacgaaagcacctccgatgcgctagtggctgagctgaaagccaaaggagacggcgacgattctatgttggactccatccttaaaacatcgccagaggacctggcgctaatccttgaatcagtctttaaagagggacaacaccatgactga

SEQ ID NO: 98795 - DNA, 1023 bp, Enterobacter aerogenes
atgactgacgttctgaagacggtaactgaccgtttttgtctgtataaaaacgcgcgcaccggccgccagaacggccgcaagtacgtgcttggtgcagtaaaggccatgctggagagcaaagagacgcaggaaggtctgcgtctcggcgagctttacggctactatggccacgggcgccgggaaatgacaggtaaactggaactgccggaaaccagcgtgatcatggtagagggccgaccggtcgtcatcgacaacgtgccagcctgccgcaccgtatccatctcagtggatgacaacggtgttgtaacccatacgcaggaaattcttaatactgagccaggcaaaatcgttgcagcgatgattgaaagccgtgctggtggctggagctgggcaacaggcggccgacagtcgggaagtatagccgtgaccaccagcttccacggcgtggactatgtaacaaacccgaactatgtaagcctcgatcacccggcgagcgcgggcatgttcgaaagcgcagacgctcaatcacttctcgccgaatcgctttcggcacatggttactcagatgaatcggtccaggcggtaatcagccactacggcaagctggttgagctggaactgatgatggaagctaccgagcgcaacgcagagctggaaacggcgttgctggaaagccaggggcgctacctggaagcgcagatgcgccagaaagaggccgaggaccggatcgctcttttggaaagcgtggcgggcgtgcgtgatgatgtgctggtggccattcagaacgaactcgacaagctgccgattttcgtcaccgcaagccagaaagaggcgttcaagctgaagcagcctgacgatgcgaaggttgttgcgtcgctgttcgagtccctgatcaaggtaggctctcgccaccttccccttacgccgccgcaggttgagctgtctaagccgcagcataaaaccccgcatgcacctgccagcgtgatcacgttcgataagcccggaaaccccttcgcgaagtag

SEQ ID NO: 98796 - DNA, 975 bp, Enterobacter aerogenes
atgtcacaatctcccgcaaaaaacaaaagcttttcttttaaaaataacggatctttcaatcaatttggtctgaaaagcgtgattcaggacatctcaccaaaattccttcggcctggagaaaaatacatcctgatgcgggcaagtgaacacgctaccgccggcgatcagctatgtattttcaaatctctccaaaccatcgctgaagattgcggagtcagcagagatactgttcgccgatgtctgacccgctgcgtggaaatgggcattttgaccaaagaattcgtcatcgacaaagaaactggcaaacagaagccttgcctgtacacctataccaaacggtttgtatggctcgcaaaggcatttcgacgggttgctgacaccctgaaaagccgccgccagaaagatttcaaagaggcactttcacggtttaacgcggccctccagcgcatggtatttctggccaaagcccgtttctcaatccttaaggaaaaactgtttgcgaaaggttatccgcctaaatttgccgtgcaacaggggttgcagaatgctacccagaggggtagcaaaatagagcccaataaagtaattcctgatcaagtaaataaatcctctgctggtgccatcgaaaaaaacgacgctataaaaaatgctaaaaatggcatagtccgctcacttcaggacattcaggaaaaatttgccgcattcgctttactgaaccaccagaagaaacataaaaataaccaaattgataaattagaacaaaataaagcacactgccgccgtaaagatcctgcgcagcccccccagccgaagaccagcttccagcacacacgataccgtgaagccgatcgacaggcagaggacaactggaacgaacgtcaacgcatctcacgtgagatgacgcctgagaagaaagctcaaaaccttgccaaaatccgggcgttgcttaacagcgcccttgcacagaaggcctga

SEQ ID NO: 98797 - DNA, 531 bp, Enterobacter aerogenes
atggaaatgaaagtgaaaacgcgtaaaaaagttctcgtacccggcgaaagcggtattgtgcggccgcgtacgaaaacgccacccgccagaaggcaggtttcaaaggtgaaagagctggatctaaaggatgtccgacgcccacagcgcaagctcatcgagtattggccagcgctgtatcgtaacggccgtatcctacctgttgcagtggggatccgtgaagcgatgctggcagacctggcagcacgcggtatcaccatcaatccgaagcggctggagcgcgagctgttcaacgctctgaacaccgaaaactaccagcgccgcatccttttcatgaagcatcgccacagcctggacggtaagccagtggcgcagatcaccgagggcgagcgcgaatacgcttaccagaagttgaccgccaaaatgaccgaacgcgggcgcacgccgccgcgccctggcttctggaaaacaaaaaaggccttccccaaaaagcagaaaggcccaaaaccagttaactcagcttcctcctcttaa

SEQ ID NO: 98798 - DNA, 255 bp, Enterobacter aerogenes
atgaataaacggcgccagctttgccgcctttcctcgatgaaactatcactggtcgctatcgtctgcgactccgtttttatggccttttcggtctggaatgagacatggccgttggatccgctgctttatgccggggcgcggctctgtctgacgttcctgagcatggcggcgcgcctgatgcaacatgggggcaccacatcggattgcccccgccgtgcggcaaggaaatattttaagaggaggaagctgagttaa

SEQ ID NO: 98799 - DNA, 558 bp, Enterobacter aerogenes
atgaaaaaaaatgctgctgtaggggggagtgccatttgcgctatcggaatgatgatcagcatcatcctggggcatggcactgtccgcactaatcaggcaggtctggagctgattggcaacgccgaacagtgccggcgtgatccttatatttgccccgccgggaagtggaccgatggcgttggtaatacccacaacgttaaacccggcgttcggaagactgaccagcagatcgcggccgattgggaaaagaatatcctgatcgcggagcgctgcatcaaccagcacttccggggaaaagacatgcctgataatacgtttagcgctatgaccagcgcagcgttcaatatgggctgtggaagcctcctaacctattacagcaaagtgcaggagcgccgcgttgagacgtctatccataaatgggcgcaggcagggaattgggtgaacatgtgcaaccacctgcctgattttgttaatggtgggggagtacctttaccaggcttgaaaatccgcagggagagggagcgtcagctgtgcctgaaagggttaggcaatgaataa

SEQ ID NO: 98800 - DNA, 540 bp, Enterobacter aerogenes
gtggcacagcgcggcgtaaacaaagtcattttggtgggtatgcttgggcaggatccggaggtgcgttacacccagagcagtaaggcagtgacaactcttagcctggcaacgaatgagagttggcgcgataagcagaccggcgaaatgaaagagaacaccgaatggcaccgcgttgtactgttcggcaagttagcagaggtggcgggcgaatacctgaaaaaaggcgcccaggtttacatcgagggccagctccgtacgcgcaaatggacggatcaggccggggttgagaagtacacaactgaggtagttgtcggccagaatggtacaatgcaaatgctcggcggccgccagggaagcggggctggtgcgggtggccagcagcaaagtggttgggggcagccacagcagccgcagggcggacaacaatttagcggcggcggcccggctcaacacagcgaaccgcctatggacttcgacgacgatattccgttcgcaccggtcggcctgcccttccccaatcataccatttactgtatttaa

SEQ ID NO: 98801 - DNA, 843 bp, Enterobacter aerogenes
atgatacatttatctctgccagcatttgatgaccttgagatatttgaaaagtgcgcaactgcacatgaagatatcacgttggatgactacgctactgtagtacctgtaataaaggctttatatgatgagtatcatgctattcttcaaaatggagatattgtaaaactcaaaagatcaaatgatttgggaaaattcagcaatgtattaatgaagtcgttatacactgagcatttagtagggaaaaatgctatttgtagagattattacgataaactactagcgtctgcgccacttaaaaaatgtcctatgtgttcagaaagtatagttaacgcaattgaccatcacgccccaaagcaaacttattttgctttttctgtttttacaaaaaatcttgttccaatttgtactaggtgtaatgaagcaaaacaaaatacgatgcctaatgctctggataagcaatttatacatccatattatgatgacttttctaaagtaacatggtttgaaatgaaatttataaataaaaatccaatagatgtggagttcacttgcctaccaaataatcaatacgagctaaaagtacagcaaaaacttcaaagccattttaaaaaactaaaacttaatgagctatactcttccaacgctttggtaaagttgggagatttaaaaaatacattcaccacttacttcgtgaataaagattggtcttctgttgaagaagacattgaatatatgtttgcaactgttagtcgacggccagattcatgggaatatgcactatacaaaacactcttgtcagagcagtggtatatcgaaggtggtttcgataatatttatacgtga

SEQ ID NO: 98802 - DNA, 1551 bp, Enterobacter aerogenes
atgttatctcctattggagagaaatgtgttgtctacttgatgagtgacggttgggatgattggtatcattggaaaacccaatacaccatgatgtatagtgatcataatggcaattaccaaatgattggaaaggtaaagattggtcagagtcggatgaagacgagattagcttgtcttgatgataatgaaaaagcaatatgcggtaagccattgatcgaaaatgtatttaataggctcggtgatgatttcttttctcttggacaaagtgagaactattatgaaactttaagtttacttcctgataaaataaagaaagatatattaattggtatgcgggatgttgcatataatttgaggatttactataaatacagtcatcaccctgcaatgactgaatctcttcttcgagaaataagtgaacgacatttatattctagtttatataaactcgcaagaggaatagatagtagtagtggtttcatgttttcttatttgtttccatctttggatcatgaagaacgagaggttcgtttaagctttaatgtgaaccctgactcaatgccgccaagtaatatacatgcaataattggacgaaatggagttggtaagacaacgctattttcaggttttatcaaaggtgttataaataataaagaactaaatgataagtatgttggactgcttcaagcgctagatggggatggcaaatgggagagtatgcctgattattttacttctcttacacttctttcctatagcccatttgataaatttggccctgtttctcatgaagatatacctagcggattaaagtacgaatatattggcttgatggagcgtgttaacgataagcttctaccaaaatccttcgataccttgcataaagatttttgtgacagcatgcgtgagtgccgcataggggcgagaagccaaagatggaaggattgccttaaaattttagaaaatgaccctctttttatggaaaaaggaatatctaatcttgcagatcttataattgatgacacggctccggattggtgcgataaagttcgtaattttttggataagtttagctctgggcatttagtaaccctaattagtattacaaagttagttgaagtcacagaagaccgatcattaacactcattgatgagcccgaagctcacttacatcctccactgatatctgcttatattcgcgctatttcgcatttgatgagtgaaagaaatggtgtagcaattgtagcgacacattcccctgttgtgcttcaagaggttcgttcagactgtgcctggattttaaaccgtacgggtaaatatgtaagcgcaaatagacctcagattgaaacttttggagagaacgtaggcaccttaacaagggaggtgtttagccacgaagtagtaaatacaggtttttataagatgattgctgatgcatcagaggattatactgacttcgatgcgttgaatactcattttgatgaaaaattgggcggagaagcaagagctctggctcgctcacttattcgtattaaaaagagtgagagttaa

SEQ ID NO: 98803 - DNA, 297 bp, Enterobacter aerogenes
atggaaaccattaagatcatctctcctgacggccgggagggcacagtggagctggaggaagggccgatcattcgcatcgccggcgatgtatcgctgggagacatcgcagatgatatacgccaccttcggcaaaactcagcaacgggtacggtgaacaatgtggaggccaatggctacttcgtcctgcgcagcgccgagttggtaggatgggtagttgagtggccctccgttgagggaacagacgaaggcgatgatgattttggttatgagttaagcgacgattttatcgcccactaa

SEQ ID NO: 98804 - DNA, 2997 bp, Enterobacter aerogenes
atgagcatacgcgaacaggtggctatggccaccagtataactacgctgattgcactactgaagaacctgcccgaatacgggcgggtttcctatgtggtgacggcgaaaggcgatgaggtaaaaacggcttttgatattgttgatgccgccgcgctcctcgtttccaacacgctggacgggaaaataaatccagcgtacccccaagagttacaaccgcgggatcgtacccgcgcatccagcctcttacaggttaaccagatctccaaagacctccgcccggcgcagctaaccgattcaggcttgtcgagccacggcgcgccgattatcggtgaggacaacgctgtagagtcggggaatggccgcacaatgggcatcatcaaggcctaccaggacggaatcgccgataaatatcgcgactacctgatcgaacatgccgctgattatggcctgagcccggaaaaagtttcctcgatggtagcaccggtattagtgcgccggcggctgacgaaagtagaccgggtacagtttgcgaaagactccaatatctctgatctccaggagatggcagccagtgaaaaggccttcgtagacgcagatagcatcacccctggcatgatgtcgctatttaacccgtccgagagtggtgatctgcttagtcgaagcaatgacgcctttatccgtggcttcatgacgcaagtcggcgcaacgcaggcggcgggactggttacggaagacgggcggccaacccggcaactggttgaccgcgtgcagaacgctatttttgcgaaggcgtataaagatgcgcgcttggtgcgcatggtggccgaagagccggatcctgatatgcgtaacgtgctgacggccctgaacgctgccgcgagtgacttcgtgcaaatgcaggccatctccggggaggcacataagcaggctgtaaatacccttgttgatggtattgagactgtcgattctctggataaaagggcactttcggcgctcaaagatgcggtagacctggtgcggcaggcgaaagagtctggccagcatatcagcgacgtgatcgcacagggcgatatgttcaatgagacagcgccggaggtaaaagcgctggcgctgtttatcgtggcaaacaaccgcagcgcgaaacgtatggccaccgcgtttaagttgatggcgcagcgcatcaatgaagaattacagcaccagggtcaggcgctgggggatatgttcggcggcggtgaggtatcgcttcaggatattctccgccaggtgtctgaccaactggaaagcgaagggatgcagggaatgactggcggcttatttgaggctgtcggtgctggtggccaatactcaaatgtgggggcgtacatcggcatgctgctgcgcaacgcgaatggcattgacgacctgatcagtctggttaagctcgtttcaaaacctgagcctgacgataataatgccgtggcggcgctggggttttacctcaacctgatgccaagtgaagtgttgaactgggtccaggagctgggtatcagcaagaacgcacttccgacactgcaacgcatggccacttacagcaccccggcgtttgaagcaatcaaagcagcgatacgaaatcgtgagttgccgccggcgctggagtgggataaggcggtgccttatcgcgtcaaagagtttttggcagcaactggaactacagcgccgcttagcatggtgatcagccgtctggattggcttttcggcgatcacacctcattccatgatctaacgcttagcgaattgaaagctgcgtcgctttcgtgggctcatgagcgttcaggcatcgcaccaaattacttggcgaaattcgataaggcactggcgcgtgctgacaacccgttgaaggtcatgaaggcatttcaggccatgagtaaggccattaccgacgacgctcgcgatattacaggcgtcatggctaccggtaaggatattgcagcggtagcaggcctgaacaggccgatcgccataaaagagagggcggagggctggcaggcagattttgagtatgtgctggatctggatgtggtggataatgacactcgctacctgctggatttttacatctccgagatcaacaaagtaatcgacgacgaagaaaagctggggcggtatctctatgacgccataagcgaaaaaaacacatccctgtataactcgctgcgtgttctacagcgtaacgtagcgaaaaaatatggcgacaatgatagcagggcgctgcgcctgatggatattgtagcctcgttcagaaacgggctttcaccgagcctggtagacaaaatccacggtaaggtgcaggcagcttttgacgcagtgatccaacaatcaacggtcgatgaagagcaggcggaaacgtgggtatccggtgtgaagctggatgaccagctggtggaaaaattcagtgggctgcatgagtggcgggcgcccattgatattaagcatgagctggcgagtatctaccggctgaccggcgggaagctcggcactctgaagagcatcgagcatgaagatcgcgtgcgcgcgtatgctaatccaaaaggagatattgtgctggatggctcaaatgatgatgtgcatgtgctttggcatgaagtggggcaccacctggagttttctaatccgaatttgctggaaaaggcccgctcgtttctgaaattgaagagtctctcatcctccgtaacctatgggaatttgggcaaccgcagtaaacctgaatactttgtccggacgtcactgagccgtaagtacgtctcaaaaatttacatgcaaaacaaggttaatccctcaggaagagtttcttccgagaaaccaagcctgatgaggtgcagcagcacagaggttttctctatggcgcttcagctttaccgcgataaagatatggcagcacggtccataatcaataatgatggtttacttgaactggcgttgggttgcgtgaaggagttacacgatggaaaccattaa

SEQ ID NO: 98805 - DNA, 360 bp, Enterobacter aerogenes
atgaaactcaccgcgctggaactgatggacctgagcgacaagctcgatgagctgatgtccagagcggcggcggccacagggctggagctgctggatatcagcgacgagattgatcaggtaatgcagcagatgggatacggcgccgccaccggcgctaatccggaagaactgccgccgaccgacaacgtgccgcagctggttgccgattttttggcggataaatttctaaagcaaaactctgaagcgtttatcagcacgctccaggacctgagccagtacgttggcacttatatcgatctggaccaggttaaacaacacacggcgtcatggattgacgccaacgtgcaagaggcagcataa

SEQ ID NO: 98806 - DNA, 1971 bp, Enterobacter aerogenes
atggatatttttaaccttcacaaggcggtgacaattaaaccgggtttagacgtgctgccgccaccagtcacggatgaagagtatcgcgccctgatggcgggcgaaagccgctatctgatgactgaagcgaccagtatggaagagctggaagcgacgttcttctacgatgcccctatccactggtatacgggcgaactgctggaagctattacctcaactcggcttcaactgagtcgcacaatgcgtgcttttgtccgaacgttgaaccagaagctgaagggaaccggcatcagcgccggcagtgataaaaccggtgatgtggcgcagagtggcacgcgggagatcggcggagctgaagttggtcgggcacgtaatgttaatggcctgccggtgttgcctgcgattatccctctgagcgacggtcagacgataagtatcctatttcacagcccgacagctgacaaaaggatcaccaacaatgacacgctggttgccttccagtttctgctgaacaaaaaagacgttacgcatactgtagcgccgatgagtggccgtgatatgacgttggcgcaggtcacgatgaaactggcaaacctggcggaaaaaaattccgctaaattccaacgcgcgcagaagaagaaaaaagccctggccgacgaaattaatcaactccaggctgacagtgaccagaaagaagatgcgttgagtgagttggccgatcatgcttctgctgcacaaagccaaagcgcggacctggagcagcgggtgaaggccatcgctggccaggctgaccagttggatgcagagaacgagcggttgcaagcgcaaatcgacgagcttaatcgcaccggtggccgtggcgatgttccgccggtggcgatcactggcggtcaagcgcgcgcgttaacggaccgcctcgccagcattaaaaatcggatgcacatggacggccgcgtaacactgagcaatggcgcagaaatgcggcagggcattgttgatggcgagggctatatccagctgacggatccagacggcagccgctatcagatacaggctgagtctattcagggcgtacaccttgaggcggcgatcggcaaactctttaaggcttacaaaacgggtaaggccgagcaataccttgtccccaatgagccagaacctgcacctgccccaacgcccgcaccggagccgactccggagccagctccagcccctgaaccgaagccagctcctgaaggtggcaagtatcgttacgcacttcaaatgcgccctgccggagttggcgcggtgccgccggacaatgctggtattctgccacgcccaggtaaggatgatccgtattatgcctatgcccgccacggcatcatcacctacgacgaaccactgtctgacgagcagatgagcaactttgagctgaagctactgccaggtgaacagtcttttgacttcctcgctaaaacgctggccaacggtccgtttagcaaatatgcgcaacagtatctggagatggccaccagcgcgccgaaagacttccgcgcgacactgaagatgaatttccagaagactttcccgaacatcgcttatccgctgggtgatggcaccgaaaaaatggtgcaaagcatgatcgccgcgcttgagcaggaggtcgcagataacaatccagagcccgcaccagacccggaaccggcgccagcaccggaacccgtgccagaaccaactcctgagccggagcagaaacttagcgaggcggacaaggccgcgaatcaggcgatcgattacctgaacaacatcactagcatgcagagcaacgatatgctggaaatccgtaacgcgcgtggcagcgtgcgcgaggcgatcgctgcgcttcaggccgctgggcgctttgacgaaaacgaggagttggtaaacgccgcagcgcgtcatctggctgatctgctggtagccattcagaaacagggggccgcagcatga

SEQ ID NO: 98807 - DNA, 603 bp, Enterobacter aerogenes
atggcggggaataaatacgcaacggtcgattttgaccaggtaaacgaaaagggtcttaagggccttgtcgctgcgatcaataaaacaggcgccacggtgcttgaggtcgattccagcaaccgcgcaacgacaaaagacgggattaaggttaaaactgcaaaactgatcttgcaggacggtcaggtgttggcgattcaggttaacgataccggcgatatttcatccgtgaaattgaacgggcgcgtcataccgaatgcgcaatctgctgacattaaatcgctgggtggggtaatgggccgcgccgcgcaaaataacgcgttgaagtttcgcaaatcgcttgcggcgaaagcgaagcgcgtggcgaacccggtcgaaaaaaagcccgccgtgaaatcgagcttccagcagcttcaggaagctaaagatcgtaacgcgcaggtcacagcaaattaccgctctatccagaatcaggtggaagtcagccagcaaaccattactgacttgcgggcgagaatggataaagaaacagctcgcctgaataacgcaaaggccaagaacacagagctgaaaacgcggctcaaacagctgaacgcggggaaataa

SEQ ID NO: 98808 - DNA, 444 bp, Enterobacter aerogenes
atgatcagtcttattgtcggcgctgtcgtcatggctatcgcggaccgctgccttctaaaacggagcgacgtggctgatatcgagttaggtgaagtcgaatatctggatggatttatccgcgtaccgatcgcttacaccagcaaattcccgtttttacggggagctactgtcaactattggatgcaggatgcacggaaaccgacaacggtgatagaaggggaaccacgacatctggcgcacgccgagaaagggcaaaacagcgaatggctgtttatcccgacagcgtgtatggataaaaagagcggcaagtggattttgacggctactgtcacgcatggcgactcgtttatcaatcctctatatcgcatcttccctatcgtgcagcgcgcccaacgctcataccatttaactttttcacaggacgtgaacaatggcggggaataa

SEQ ID NO: 98809 - DNA, 618 bp, Enterobacter aerogenes
atgagcaaatacaatactgaattacctttagcaaaactgaataaaaacggcattgccaccgctgccggctggctcacggtgtacagcgtggagcctcatcaacgcgagtttcagacggtaacaatggaatatttagccgccggtgtgggcttgcccgcgttcggttatgccgataaaccagatttaccgggggagggctttgcactggtacgcagcgcagatgaaaaacaatgggaaaccattgctgattatcgcggccagacggcttacagcactgaaaccgggcaaccggaaattatcgcctttctcggtgagttgccggatacactgacgttactggcacctgtcacagcgtatgataaatgggacggtagccagtgggtgaccgatacggaggcgcaacatgctgatgagattgccgttgcagaacagcaaaagcaggctctgctttctgaggcgcagcagcaaatcacaggttggcaaacggagttacagctcggcatcatcagcgatgatgataaggccagcctgattatctggatgaattacatcaaagccgtgcaagcggtggatacttctacagcaccggatatccagtggccagacaagcctgagtaa

SEQ ID NO: 98810 - DNA, 303 bp, Enterobacter aerogenes
atgaaaaaactcttactaattctcccactgattgcattaccagctgcagctctcgccgatgaacaaactgacgctcaggcgtgtctatcatgggggatcagcaaaatggcgcctaaccagcaattaagccatgtagatatcactgatattaatagcgaacgctatgatgagaaggtaggttcccagcatattgcgacgcaactaaccgcaacgctggcaaaaaaaggcgacaccgttggaaacatgctctgtttgctggaaaacgagcggccgctgtacgtttacttcagcgatatgcagtaa

SEQ ID NO: 98811 - DNA, 564 bp, Enterobacter aerogenes
atgagtaaagttaaaaaaataacttcggtattaacttgcgcccttgttttattgcccggcagcttttttatcgcgccttgcgcgctggcatatgatgagtcgagtacgcttaatattaacgtcacgggaagtatcgaggagccctcctgcgaggtggcggttaaaccgtcaactaccatcgacttaggcacggtgtcctatcaaactctgacggggaaagcaggttcccatgggcaaagtacgccggttaaattagagtttactaactgtgctgcgggtttaacgtcggttacgctatcattcagtggttcatcttatgatgatacttatccttcaatctacaaaagtaatcaaacaggcagtaacggcgccagcggcgtcggaatgcaattgcttagccaaaccgaccaacataccttaggccccaacgaacgctatctctatacctttgataacactgatacgcatacttttaatatgcttgctcgaatgtattcaccctatggaaaaataagcgctggcgtagtgggttttacggccacgtttgatgtggcctataaatga

SEQ ID NO: 98812 - DNA, 1008 bp, Enterobacter aerogenes
atgggcaacagaatgtggatgatccgcggtgacggcggcaagctctatgacgattttcgcgataagcaaattgtaggcatcggttggtctcagctggctccattagtcaaacccggcctgtcccgagcccagttactcgccttataccaggaggcagatcccttaacaaagctgggaacagcccgttctggtgcatcgcaggtctggcgttttgtgaatgagatccaaaagggtgattgggttattacctattcgccagccaaccgtacttatttgctaggcaaagtcacatccgacttccaatatcatcctgaatgggtggaagaggggatggggatcgctcggcaggttaaatggaatactcaagaaatcgaccgcgatagactgtctgtcgctaccaaaaacacattgggttctacgctgacagttttccagcttccagaatatgcgctagaagagcttttgcaggataagaaacccactgcagatgtaattactcagaatccaattgcgatggatgaagatgaggttgtttctgatccgcttcgcgatatggaaatgctggcgtttgaggggatcaaagatcgtatcaactctcttgactgggatgagatgcaaaatcttgttgccggagttttacgcagtatgggctataaaacgcaggtttcacctgcgggtgccgatcggggtaaagacatcattgcttcacccgatggattcggttttgaaaatccacgaattatcgttgaggtaaagcatcgtagggagcaaatggggagtcagcagattcgcagctttatcggcggtcgccataaagacgatcgcgggctttatgtcagtacggggggctttacgaaagatgctcgctatgaagccgaccgctcgacgatacctctgacgctctggacgcttgatgatctcgtccgtgcgcttattgagaactacgagcaagtcgatatcgagaccaagctattggtgcctctgaagaaaacgttcctacctgcctga

SEQ ID NO: 98813 - DNA, 342 bp, Enterobacter aerogenes
atgaaaactctacctgcaacaactccgcaggcggcgacgctatgtctgtcgcccgtggctgtctggcaaatgctgcttgcacgcctgctggaacaacattatggactgacacttaacgacacaccattcagtgatgaaacggtaattcaggaacatatcgatgccggtatatctttggccgatgccgtgaattttctggtggaaaagtacgaactggttcgtattgatcgcaggggattcgactggcaagaacagtccccatatctgcgggcagtcgatattctgcgggcgcggcaggcaactggtttattgaaaagaaatcgtattagcgcggcacagtga

SEQ ID NO: 98814 - DNA, 318 bp, Enterobacter aerogenes
atgagcaacatcacttggggcctgcaatgcgatatcacgccgcgcctgggaacacgtctggtgcaggagggcaaccaactgcactacctggctgaccgggccagcatcaccggtaagttcagtgataccgaatgttttaggctggatgtggcatttccgcattttatcagccagatggaatcgatgctgaccactggtgaaatgaatcctcgccatgcccactgcgtcaccctgtaccacaacggtttcacctgcgaagccgatacccttggcagttgcggctacgtatacatcgccgtttaccccactcaacgttaa

SEQ ID NO: 98815 - DNA, 222 bp, Enterobacter aerogenes
atgaaaattatcagtaaacaccgggcaatgacgatataccgccagcatcctgagtcccgaatctttcgttactgcgccggaaaatatcagtggcacggtagcgtctgtcattacaccggcagggatgttccggatatcacaggagtcctagctgtgtacgccgaacgccgccaggaccgcaacgggccttatgcctgcctgatgagtatcacgctgaactga

SEQ ID NO: 98816 - DNA, 477 bp, Enterobacter aerogenes
atgaaacagctttcctttttacccggcgaaatgacgtcacaggaccggcgtctcattcagagggcacttagggctctggagcagcacctgcttgagcctggggtagccttcacctccactcatgccgtccgggattggttgcgactgcatatggccgcgcttgagcgggaagagtttcgggtgctgtatctggacaaccagaatcagcttattgcccatgagacgctcttcaccagcacgattaaccgtaccgaggtgcatccccgggaggtggtcaagcgcgccctgtatttcaacgcggcggcggtaatactggcgcataaccatccttccggcgagacgacgcccagccaggctgacaaagctctcacgcagcgactggttcaggtacttcaactagtggatattcgtgtccctgaccatctgattgttggtggcaggcaaatctattcattcgctgaacacggtctgctgtga

SEQ ID NO: 98817 - DNA, 459 bp, Enterobacter aerogenes
atgacgacacaaactcaatgcgaattgatatccgctaatgaacctcaatttgcccttactgcaacaccagtacctgacgaacagcgtctcgatttctggccgcagcactttggcttcgtcccgcagtggataacgctggaaccccgtattttcgcctggatggaccgcttctgtgatgagtacagcggcggtatctggtctttttacacgctcagtaatggcggcgcgtttatggcacctgatgctgacagtgacgataaatggcatctgttcaacggcatgagcggcaatagtgcgcaaatgagcgcggaagccgccggtatcgcggtctgcctgattgaatacagccatcacgcctgccgtacagagtgtgacgcaatgaccgcgcactattaccgcctgcgggactatgccctgcagcatcctgaagctcaggccattctgcgcatcatcgactga

SEQ ID NO: 98818 - DNA, 237 bp, Enterobacter aerogenes
atgtctgaatctcatatgctgccgccgggacctttcacccgacagcaggccgaagcggttacccgccggtatcacaacatcagcattgaagatgaccagggtagccactttcgcctggtggttcgtgactctgaaggtcgaatggtctggcgggcgtggtgctttgaacctgatgccggtgaagggcttaatcgttatatccgcaagtcaggcatcctcagagtatcctcctcctga

SEQ ID NO: 98819 - DNA, 411 bp, Enterobacter aerogenes
atgctgaaaatgatgacctctgctgtacccgccctcattctgtcacttgctgcattcagtgccggtgccgctcaacttccggcaagcctgatggataaagacaatcccggacaggagtactggtgccagggaaacgacatcaacacctccatgtgctcactgaccggtgtcagcgacgaccataaatttgctctgattcaggatttgcccggtccagcctgtgaagatttaagtttcgggattattgacctggtatttaacaccggacttaacatcccttatgacggtggtgactgcaagggagatgtaaaggccgggtttgttcgtggcacaaaagataatgccctgtatgtgaagattgtccggggcagcaaaactttacgcctgtataaggtgcagacgggtttctga

SEQ ID NO: 98820 - DNA, 438 bp, Enterobacter aerogenes
atgaaaacactgattaaaatactgggcattaccggcagccttctgctctgtataggagttcaggcccagccttataaccggacgctacctgcggtagttaatgacaacaacgggaatattttctggtgtgatgcgcatcgtcaggttaccggaaaatgtgaagccatgtctgttgaccgcctgggtgggatggtcacggtgcgttcagcaccctttaaagactgcgaaggcggtctgtgggggtggataaccatcatgcacaacgatgtgtcgaagggattcaccattactccggacaagaaatttgggctcaccgtaaaagacctgtgccgtccgggcacggtagtgacctttaagcccaaccagaagaagccggaatatgacgacctggtggcgttgtaccagggcaaagagctgtttcgctaccggcgtttctga

SEQ ID NO: 98821 - DNA, 537 bp, Enterobacter aerogenes
atgacctggcattacgagaaaaatggcatacgtcacgacaatgtgaccgaagacgacatcactggcctgattatgcgcggtgaactgacggcaaccacgctggtatggcgacagggtatgacggattggcaaccggtctccaccaccccgctggcttcggcgctgctccacagcaccacaccaccagcgctgccggggcaccgcattccaggcggagtggtatggacactggcatttgcgccttttattggctatgcgctggagttgtggacggcaggattgagcgggatgtcatttgacgaggcatatgaggccgtctcgggcggacggtactggtttatcacactgctgctcaatatcgctctgggatatctcgatgaacgacgtctgcgtaaggccggagtggataccaccacgttcggcaaactggcctggctggtgcctttctatttgtggcggcgggcgaaaactctcggtcagaaaccggcttacttctgggtatggctggtgatgctgggcctgaccgtctgggcctga

SEQ ID NO: 98822 - DNA, 711 bp, Enterobacter aerogenes
atgacacaggcagagcgccgtcatgaccggctggctgtcaggctgtcactgataatcagccgcctggttgcaggtgaaacgctgaacatggtccgattagcggcagagtttggtgtgtcagtccgcaccctgcgacgggattttcgcgaacggctgatgtacctcgaccttgagtatcgacgggggctgtgccgcctgcgcagtaccggtggaggcgtacagggcgagctggatgcactgacctttgctcaccgggctggactggccgatatttttccggggctggaccggcgtctggcgggcatgctgctcactgcaggggggatgccctgcctggtgtggcaacccccacagtcagtgtcaccggccagctcgctggtgttttaccgcctcgtcagtgccattaccgcatgccagcgggtactgctgctggccgagggagaacgctgtgacgggctggccccgtaccgactgatttcattcgacggctgctggtacctcaccggtgaacttaacgggcatatcaccgtgcaccctctggcgaccatccatgcggtgacagtcctgaacaccacttttaccccgcgaaaacgtctcagccagttaaccacacaggcgggctttatccgggctcttccgcacttcagctgtattcgcgaagtcctgtctcctgggccctctgaggaggagcagggtaacacactgatttaa

SEQ ID NO: 98823 - DNA, 825 bp, Enterobacter aerogenes
atgagccgtctggcttcgcgctttggcgcagcaaaccttattcgtcgtgaccgtccgttaacccgtgaagagctgtttagcgtggtgcccagtgtcttcagcgaggacaagcacgcgtcacgcagcgcacgatatacctggataccaaccattaccattcttgaaaacctgcagcgcgaaggctttcagcccttctttgcctgccagaccagagtgcgtgacccagggcgtcgtgagcatacaaagcacatgctgcgcctgcgtcgggaggggcaaattaccggcaaacaggtcccggaaattattctgctcaactcccacgatggctccagttcgtatcagatgctgccgggattattccgtgcggtatgccagaacgggctcgtctgcggtgagtcgtttggcgaggtgcgggtgccgcacaaaggagatgtcgtaagtcaggtgattgagggagcgtatgaagtgctggggattttcgaccgtgtggaagagaagcgggatgccatgcagtcgctgatgctgccgccacctgcacaacaggctctggcacaggctgcactgacgtaccgtttcggtgaggaccaccagccggtgacagcacctcagatactctccccacgccgctggcaggatgagagcaatgatctgtggaccacctaccagcgtattcaggagaacctgattaaaggcgggctcactggtcgaagtacaaaaggtgggcgaacacatacccgcgccgtgcgtggtatcgacggcgatgtgaagcttaaccgggcactgtgggtgatggcggaagcgatgctgagtgggtttcagtcctga

SEQ ID NO: 98824 - DNA, 864 bp, Enterobacter aerogenes
atgaagatacatgaaggtttgcaagatatcacgcagtctgtggctgttcttccggatgttattagaaaacaaatactttcgaatattagcaggcttgcggattatgagccagtgatcggtattatgggtaagaccggagccggaaaatccagcctgtgtaatgcgctttttgccgggaacgtttcgccggtcagtgatgttgcagcctgtacccgtaaaccgctacgcttccgttttcaggtgggtgagcactttatgaccatcgtggatctgcccggtgtcggtgaaagtgaaaggcacgatgaagaatatgctgcgctttacagcgaacagcttccccggctggacctggtactctggctgattaaggccgatgaccgggcgctggcagtggatgaacatttttaccgggaggtgattggtgaggcataccggcataaggtgttgtttgttatcagtcagtcggataaggccgaacccaccagcggtggtgaaaagctgtctacagagcagaaacaaaatatcagccgcaaaatctgcctgctacatgagttgttccagccggtaaaccctgtctgcgcagtgtcggtacgtttgcaatgggggctgcgggtgatggcggagcgaatgattcgttgcctgccacgtgaggccagcagtcctgtagcggtacagctcagtgcgccgcttcgtactgacactgttaataaaaaagcccgtgacgattttggtgaaacggttggctcggtactggacacggtaagcagcatgcccttgataccggccccggttcggacagtcatccagtctgtacgcgacatcgtggtatcggtcgctcgtacagtctggaatttcttcttctga

SEQ ID NO: 98825 - DNA, 930 bp, Enterobacter aerogenes
atgaaaggacgatttagctcagattcagattacgatagtcgcttatgcggctacatcagtcaggcgttgaaaagccagtccattacatttacgagccatttgatgaaatcaggagtggacaattggataaggtttctacataaagaaatacccgaaattaataccgacattgatgttgaacaaacaaaattattactggataacatagttagttccgcattagaaaatgtatataaattcagtgatttctcttggattgaggacagtgaccgggcttgttactggatgtggtgtaacatttacacaatgcctgcgctctttttttcatcacctattaagaagcccgacgtaataccttatatttatttgggctgtgatcccctccctggaaatagcagggcacgattctttaatattgttaatttttttgatcgatggattaaccctcaagacaaacgtagatttttaaatgaaatgagaaattcttacagacagatcacttgcaaaaaaaacgcactatcatttctatcgcccaagaaaaaagatgattgtctgtgggcatggcattatcttaatgaacgaaatatggttggtgaatacattacaccaataatggataacccacatgaggtttatctggcagtcaatgcagcatttgatatatggtgtacttccaatgctttgcttgatgaaactattattaactttagtaaaaagataaaaaatgcatatgcgcagaggaatttcaaagcatccaggaaaaacacaaaagacaagtctaaaaaaacagtgattgccactttgacgccagaactacagaaaaaactgtctgatttatcacaagccagtgagatgacccggcaggaaatgttagagttgtgtattaactccgcatatttaaagcttccgaagaatgccagaagcatttaa

SEQ ID NO: 98826 - DNA, 588 bp, Enterobacter aerogenes
atgcaaagacattacccacatttaaagaaaatcatccctaacgacttcctgctgaatttgattaatcaccatcttaatcagatcctggcatgtcattccaagatactggcttttcgaatggattttgactatcagcgaggcactaaccgatttattcgtaactcttccatcgaaatacaggatgaccttagagaactgacgcaggcaatgattactcttccaggcgttatcggtagtttctgggtactggaatggacatcagaaggggcagttcatgctcatgccattttttatcttaatggtcaggaacatcagaaatcattcccatttattttacaggcaggagaactatggcaccagattactcatggagaggggaaataccagcgatgcaaacccaaaaaatatcatcatgacaacattaacaatgttgtccgataccaaaacaacgatgccgtaagcagcttgagacgcatagtgagttatctgacaaaagaagaccagaaatatggcttcctgatctggggatgcaatgaggtgccaccaccagcacgacagggaagacccagaaaatatatacccggttaa

SEQ ID NO: 98827 - DNA, 207 bp, Enterobacter aerogenes
atgactattcaaatttccctgctcgaagaccaattcatcgatatggcattcattacgcaactcacccagttgaccgacaaatggttttacaaactgattaaagacggtaaatttccaaaaccgaccaagtttggccgcagttcccgttggcgtaaaagtgaagtcgaagcctggctgcaggctcgaatcgacgaatcacgcagctag

SEQ ID NO: 98828 - DNA, 576 bp, Enterobacter aerogenes
atgaaagagacaaagacgcgatataacagtttgctagtcagctatcaacgttggctaaacgggttcacaaaactggccatcataaatggcatgtgtcatcccaatattcaggccagccaccatctgatggtgggcagtctgtactttcccggcgcggggcagatgacggcagtggtacctcaatgcctttaccaactgatttacggaagtcagcatccagagccagtgtcggtagtgactgatatgcaaatcagccttgagacaaagcaaaaaactttactgcaccacccaatgcttgaagggatattgctaagtgaatgtatccgcctgaaacaacgcccgctagcaaacaggctgattagcctgttacaacaattcagttcaccggagcatcgccacaaactggtctggctatgttggtacgatctgatgatgggggcgacgctggaagactggctggataatctgaaacgtaaggcacctgaagatctaggcttgtggctggttggacggcaggaggaaaacatatccctcacgcaaatgatggatgaatatctgctatttaccggccactaa

SEQ ID NO: 98829 - DNA, 1776 bp, Enterobacter aerogenes
atgagtatcatcgtaggtgaggtcattgcagtgagtggagtgcgtatctcccttcgaatttttgaagactccaatcatgagacaatttactacggaggagttaagtacagaggtatctcacttcgggagcacgtatctattcagcgaggctttatagatattgtctgtcttgttgaaggtgaatttttggatgagaaaaggctagagacagatgctgagaagatccaatacgtacgaaaagtggatgttcgccccattggttatatagtggatgataagttttttgaaggtgtgaagtacatgccgatgatcagagacaaggcatctctactcagcgaatttatggtagggaaaatctatggagcggacggaaaaacaggcttctctattggctctatgcttaaggagaatgtacccatcaacctcccatggatgcgattattcaacagccatttgggcatatttggtaatactgggagtggtaaatctaatacgctagctaaactttatactacactttttaatgagcggctccaagcattacaaaacaagagccagtttgttattatagattttaatggtgaatacacggaagatcagctactaccagccaagaataagcaaatcacagtgctggactctaaaaaatcaaagcacaaattcaagattgaaggcgcacatttttgggatgttgaaaccctaagtctcctatttcaggcaactacgaatacacaacaaccatttctgcgtcgcgttctatctggtaaggaaaaatttaaaactacaccactcaaaaggtatgtagaaaaggtttttgaaaaagtttttagtacaggtgaagcgaaatcagatgctttggacctgagccgtgagattgcacgcatgattgactgcgaattgcttcaagagcatttaaaaggaattatttattacaataaagataagtattttaagcatgccagcggcacgtactataattcaaatggcaatggatttgacgcgaacatcaaacctattcttgatgagtgtgttaatttagatggaattgatcaattcgacgaactaatcttgaggtgctatctccaactctgttcagatgttgtatttggctatgcccaatacgaacatattcaaccggtgctagccagggccaaatcatctatatcggctctgcgtaatgttcttgaaatcgttgatgtgccacaaccaccgcatctcttacatgtcatctctttaaagaaatgcaagaatgagataaaaaagattttgccactgcttgtagccaaaaatttctacacaaaccataaggatgcagagactcttaagagccctccaagccggactcttcatcttatcattgatgaggcacacaatattttgtcagagcagtccacccgtgagcatgaaatctggaaagactatcggcttgaactctttgaagaaataattaaggagggacgcaagtatggcgtatacctcacactatctagtcagcggcctgcggacatttcacctactattgtttcccagattcacaatttcttcatacaccgattggttaacgaccgcgaccttatgctgctagataatactattagcacgttagattccagttctaaggctctcataccgactctagccaagggttgctgcgtagtcactggtaccgcttttgatcttccaatgatattgaaaattgacccgctcttgaaacagcatcgacccagcagcgacgatgtgaaccttgaagaactttgggcgctacctctagcttaa

SEQ ID NO: 98830 - DNA, 1149 bp, Enterobacter aerogenes
atgtttgaggcaatccagccactggatatatacaataagaacatcaacatactgattggctcaggcgcttcagcagacttgttcccgacgctgtccctagccatcaagaatgcagatggacgacgagaaacgatcgagacgctcgccacacagtttgaaaactcgccagagaagcgaaccgctttattcatgcactactacaacacatgtatttttccagtgcaaacattcaatccaagttccgttacatcggataaaggaaaagaaaatctcaagaattatgaggtttttttaacaacccttttggggttgttggatagaaggaaagatctcaaccgcaaaatcaatatttttaccaccaactatgatggatgtctgtcccatacagctgacagccttctcatgaagggctcacatgattttgtggtgaatgatggtacctccggttttcatacgaagcatcttcattccaaaaacttcagtacgtttcaatgtcaaactggagtatttgaacgaagcaactatggtatcccacagctaaatattatccaccttcacggttcggtttactggtcaaaaagcggtgataagattgaagtcaattaccgcaatgattttagtaaccttttgacagaagagacactcggaaatttgaatggatattccgaatttctaggtaccgatggcaacagaaccgaaggcattccatccttggcattcagtcaagatcagatagatattttctggggggagtacaataagctacctattgtcaaccccactaagtggaagttttacgaaactgtcttcgaagaacactactaccaaatgctcaggctattaagctatgagcttgagaaaccaaattctatcctcatcacatttggcttttcgtttgctgatgaacacattctcaggcttatccaacgctccctctccaacccacaacttcatacttttatttgctgctatagcaacaatagtgcaaatagcatgcgggaagagttcaaatcttggaaaaacgtccaagtaattggacccgctgaagatatgaatatggacttcaccaatttcaataaatatgttttctcactcaagccagacaattatgaacctcaattaaaagctgaagaggaggatctgatatga

SEQ ID NO: 98831 - DNA, 1194 bp, Enterobacter aerogenes
atgaagctgacagctcgtcaggttgaaactgcaaaacccaaagagaagccctacaaactggctgatggtggtggtctttacctactggttaatccgaacggtaaaagatactggcgtctcaaatatcgctcgttaggtaaagagaaactcctcgctataggtgtttaccccgatgtttctttagctgaagccagaagtaagcgtgaggatgctaaaaggacattagccgcaggtaacgatccttctcttgaacgaaaaattgagaaacttagtcgtcaacaagacgcagaaaactcatttgaggctatcacgcgggagtggtatcagcgtcgctatgaccgctggtctgtctcctaccgcgaagaaatgctgagaacctttgaaaaggatgtatttccttatatcggtcaccggccaatcaaagatatcaagccgatggagttgcttgcagttctttcaaagatagaagcacgaggggcaacagagaaagtccgtaaggttcgccagcgttgtggagaggtctggaagtatgctgttgtgactggtagggccgagtacaatccagcacctgatctagccagcgccgtaactcctcatgagaaagagcactatgcttttttaacccaggatgaattgccagagtttcttcggattctgaacacctatgccggtagtgtgattgttaagattgcgatgcaattacttattttgactggagtaaggcctggggaattgaggcaagcggagtggcaggagtttgattttgagcggaaggtttggaacgtaccagcagagcgaatgaaaatgcgcctccctcatctggttccgttatcaagccaggcaattgacctgcttaatcagcttaaacccatgacgggagcaggagcgttgctgttcccaggacgtaataatcctaagaaaccgatgagtgatatggcattgactgtattggtaaggcgtatcggctatgcaggacgcgtcacagggcacggattccgccacacgatgagtacaattttgcacgagcatggatttaactcagcttggatcgagctacaactggctcacgtcgataaaaactcaattcgtggaacgtataaccatgctcaatatctggaggggaggcgggaaatgatgcagtggtatggtgattttactagtaatttagtcaaagaagggattattacaagctga

SEQ ID NO: 98832 - DNA, 516 bp, Enterobacter aerogenes
atgtctatcaagggccaatcttatctttatccaactgcggaaggagtctggatgtttcagatcttcatcccgtcgtacatgcgccacatcttcggggggaaacgtctctaccggaaatcaacgggaaccaaagaccttaacgccgctaagcacttccgtaatcacatgctgatcgagtggaagacactcaaggaacagtattccccgaatacggaggaacggcgcatacaaaacgccatagccggattgcataaacaaaccatgctacgcgccccactccagacagtgccaacgttaaccgctatccgcgatcaatacgctgacagatacagagataagcgctcattctcgacgctggctaaatctgctcgtgccgtagaagtatttcttacttctcttaatcgtgtgtgtatttgcatttacttgatcccccattcgcaatttagttggacacttgttcgcaaattacttgatcacctacagcacaactattcagtatggtttcccattgcatag

SEQ ID NO: 98833 - DNA, 1497 bp, Enterobacter aerogenes
atgtttgccgtcagcagtgtggatgcagccaaagcctactatgaagcgttcaggatcatacagcagtcggctgttgaacaggataagaactacaagcctctgaaggtggcgaccatcttctcctttgccgccaatgaagagcaggacgcggtcggtgatatcaatgatgaagggtttgatgtcacggcgatgaacagcagtgcgcgggagtttctggaatcggctatcggtgactacaatgccatgtttaaggttaaccatagtactgatggcaacaacttccagaactactatcgtgacctctctgagcgcgtcaaaaagcaggaagtagacctgctgattgtggtcgggatgttcctgaccggatttgatgccccgacactcaataccctgtttgtggacaagaacctgcgctaccacggcctgatgcaggcattctcccgcactaaccggatttataacgccaccaaaaccttcgggaatattgtcaccttccgtgatttagaacaggccacagtggatgccattaccctgttcgggaagagcaatacccgaagcgtggtgatggaaaaaagttatgacgagtacatggaaggcttcacggacacgcttaccggagaggcgcgacgtggcttcacagatatcgtgagcgagctggagacgcgtttcccgaaacccgcagacattgagtccgaaaaagagaaaaaagccttcgttaagctgttcggggaatatcttcgggtagagaacatactgcaaaactacgatgagtttaccacgctgaaagcgctgcaaactgttgacctcagtgacccggtagccgtggaggcgtttaaagccgggcactatctggatgatgaggctttcgctgtgctccagactgtacgcttacccgctgagcgtaaaattcaggactatcgctccagctacaacgatatccgtgagtggcagcgccgtgagcgtgatgcaaacaccaaagacaaaaacaccgttgactgggatgatgtggtctttgaggtggatttgctgaagtctcaggagattaacctcgattacattctggggctgatttacgagcatcatcaaaagagtacggataaagagaccctgaaagaggaagttaaacgcttaatccgcgccagtctggggaaccgtgcgaaagaggggctgatggttgattttatcgagcagaccagtctcgatgacataccgggtaaagagggcgtcattgaagctttctatacctttgcacaacaggctcagcagcgcgaagccgaggctctcatcaaagaggagaacctgaatgaggaggctgcccggcgctatatcagaaactctctcaagcgcgaatacgccacggagaacggcacagcactgaatgaaacgttgccaaaactcagtccgctaaacccgcaatacaaaaccaagaaaaaaaccgtttttcagaaggtgtccgcctttatcgataagttcaaaggtgtcggcggaagcgtctga

SEQ ID NO: 98834 - DNA, 537 bp, Enterobacter aerogenes
atgcctctgcgcaatagaactcgtagaagaaccataccaactgataaaaacagaccaataatcacaccaactaaaacgactaatattttatttggtttaactgcttttggatcaataacagcattatcaataatacgaacgtttccaatagcacttgatttggctatattaagttcctgctgtcgattgagcagttgcatatataccgctcttcctgactccacatccctactcaaccgtaacacttcttgttgggttgaaggcatagcgtttacacgtttattaagtttatctttctcttgttggagagttttcctcttttccataagagctttatatgtagggtgttccttggtatatagttgcgatatctcagcttctttaaaggtcaatccattaagttggttatcgacattaacaatctggtcaagtactgactttgcctccattgtaagatcgacagagtctttttgttttcgatatgcgtttaatttatcttctgcactatccaattcagcacgtactttgggtaactga

SEQ ID NO: 98835 - DNA, 1182 bp, Enterobacter aerogenes
atgattgttaataaaaacagagtgatagcgttcgtttgcacactgttggttagtgtggatgttatacaagtttctggtttaaggcttacacttttgccattactggcctatggtatctatttattattaaggtcaatgaaaattgacaaatggtttttttatgttctaatattcgccttagcatgcctaccttcggtatttttttccaccaatgaagggaaatctttaggctatttaatctggattatctttaattatatatccatatctatcgtatataagcacctcattactaataataaagataatgctttagtcggtattagagatgcttatagatttcaaataataattggagcattgcttacattttccggcattcaatatagagcacaggttctatattacgagccgtcgtattttgcactatcattaacaccttacgttgtaatgattgtaagttcaattactgctattggtaaaaacaaaagctttataaattacactggtaaaatagattggcttttaattgccattgctttatacacaactaaaagtgcaaacttgatttttgttttcttaatttctatcattatcctctcgatgattggtaaaggcaagtttaagaaaacccttctaatgtccttggttgtattatttatatttagtattttttatttttactcgcaaggtaaggatgatttactttcaacgacctttcaaaacttcataaactcatcaaataaatttactgcagcaatggatagaacgggtaaccgttggccaagagcacaattaacctatgatatcgcgatgagtacattctggggcattgggattggtgcttttgaagaatacacattgagtcatttcctgccgatgtattctggtttaacagactatttatctccaataggatatccagcaataaatatttactttgaaatcgcagctacatgcggctggcttgctttggttgtttggcttttctggcactataaaatgctaagagaggccagtataaataaatctgacagccctgtgataatttgttcacttattgttgcaatgcttgcattgttcattgagtctaacttcatgcgtccttattattggatgttaattggacttgtcatgggtcaaatatcgcttaataagcgtaaatccagtaataaaatttaa

SEQ ID NO: 98836 - DNA, 1491 bp, Enterobacter aerogenes
atgatttcacgtcgaaccttaattggaacaatcgctccggcgatgatgattactggagtttcgcgcgccagcgaaaaaaatacttcagatgcattccgcaactttgaaagtgtcgatgttctcaaagataaccctggtaaggatgacgaaattgcttaccttcactcctatcataaagccaaaaatacaggtggaggttttattcgatttgtttcgcagccggaaacagaagcaaatatgattacatcatacccatccattggcggagtctgggaaagagtattagattcaaaaagtgaaatacattgcgcatattccggcatgttagctggaaataactttgacaatactatctatcataacacactcatgaaatgggctgatgataataatgcaaatatagtttacgacacaggggaatattttcactccggtaatgttgaaaaaaaacagtcattctcatgccctaatctcataggttctggaagtaaaggtaaaaacaaaggaacaatattaaaatttgcaaatgacgccttcttaaaaataaaaggcggctccggtgtcttgtgtggttcaaatattgtcggaatcaccttttcaggctctggggataataatggtttattaataatcgcagatcagtgcggtatatctctggacagatgttcttttgaaaattgtaagtctggtgttcggatggttaatgagtccaatggaggttttacagagttcaatgttcttgataagtgtatttttttatcctcatgcgagactggaatgacttatgaacgccaaaatgggaacgaatcattccatggtactggccttcgagagtgcgtattccaacagcagacattgaatgcaaacgctccacatatccatattggaccaagatgtttggtttataatgcaccaatgacgattcatgttttccgggatattacagactcaccagtcattaatcatgatggtttcgaacgttcaaatgtgtatggtattattacagttgaaaagaaaccaaaaaacattgtagatcttgtattaggtaaaccgctttatatcattggtagcgtcgtctgtctaagtgagaacttgtcaacaaacaacgctattttttgtagccgtttccaggccaactctgatggttcggtaaacttcataaggaatccagcttctctttcaggaaaattcatcaacggttcccaagaacccgttttacatttgagtgctggagaaagcgcctttcttgacctctcattgataacaaatggtagggtgaatcgagggttaatttttattgccgtagatgaaaatggaaatggaaaaataactaacacagaactatcgccgattagtgttaacttcaaacatgaaaattacattttatttgaaaaatcaacgatatacgtaaaatcaaacggtgatagcaacgccagatggattgctgatattgcattcgttgcgagtagatttcaatatactctgcaataa

SEQ ID NO: 98837 - DNA, 351 bp, Enterobacter aerogenes
atgagtaatattcataaaaaatataaaccacgaaatattataaatgcaccacatatcaaatccgccattatttcccgcagccaacagcgtggtgataatgataatattcaaagctggttgactaatcatttttatagatggacgattggtgatttctcgcctgtttatccggtacgttccgctgaggattacaccatctatttcggcactcatagcgaaatacccacctggctgattccaaaactggatagcgaagaacgcttttattaccttaacccccagcatccacaactgctaggaatggaaagagacattctggagtttctttcccggcaaaaggcacacgcttag

SEQ ID NO: 98838 - DNA, 807 bp, Enterobacter aerogenes
atgcgcgatgcggaacacctgaaaatgcagcatctgcgtgaacagggctggtatccttccaacagtgaggcgctaaagctagtgctatcagtccaaaacggcaggtttgtcgaacttgatgcgacccacgccgacctgcgcagtgaaatggcgtatgaatcctggcatatgcagcattgcgttgggcaattcgatgataaaggaacgctttccgggggatatggcgaatattatgccaggcaaattgagcaaggcatgctgcgcctgtttagcctgcgcgacaaccacaatattcctcatgtcacaataagcctgattgtgaataatgacggactaagcattgagcagattaaaggtaaacagaattgttatcctattaagaaatatgtcgcagatgttttatctcttatcagtcttatcaatcctcatcatgaacgccacaaagattgcgaaggtatgggaattgtgtatgaaaatacgccggaatattctggttggaaattcattaccgatattcatgatttcaactttttgcttaacgtcctgcatgataattttcatttaatgaaacactttcctgctccaccggtagctttgcagtggttgctgttacacagcgcaccggatgcgctgcgttatcttcagatgattgatcccaacgtggcgaccgcggcggaaatgctgtttccacagcacgaatggcaccctacgcttgccggcaaaaacaccagcaatatccccttcgtaattgaaagtctgacactgcaaaccacgcgttacctttctttctgtggagataaacactaa

SEQ ID NO: 98839 - DNA, 717 bp, Enterobacter aerogenes
atgttctggatcgttctcattatttccacaatattttttggctggctgaattacataaaaaataagccgcagattgccgcccgcctcgacgaggagaaaaaacaggatcgcctgaaagatctccggcatgatacccgacggcgacaatgggcgttatctctggccgatattcttgcccaacgaaatggccttccttcgaaaggcgtaacgctgaagtttacccttgatgatgaccaacgccagcatttggctcagcaggtcagaaaagaactcaatctgcacgaaaacctcaacgatatagcgctgcgccagcaggttgcggatattttgcgccgctggccctcgggcataggcaattcaccacgcacgttctaccaccatcttgcgattctgggccaggttcgcgacgcattggcgtttgactgtatgcgcacagcctttctcacccgctgtatcgcggggctcggctggtgtgacgaaaatcaggcatggttggtgctgctacttaacgcccagcgtgcacaggactgttttcattcctgggaagattataccaccgcctacgttcgtgcccgtcaggtatggctaaagctgaatgatataccaacgtcaatggttggacgtgatttacaggaagccactcattttctgaaagaccctttcagccgctggcgacaactaccatggaatgaattcaaaattttcgacccaatgtaa

SEQ ID NO: 98840 - DNA, 2112 bp, Enterobacter aerogenes
atggaaaaggacgaccgtttggccaaggccatgcttgagatgtgtaattatacgatgccgcttaataacggacaacgcgaatggtccatcgcagatatttccggcttgctacgcgatgcgcgatatgacgaacttgatacgctttatatgcaggcgctggcggatagttttaccagccgtgaagcggaaaagcgttatttccttgcctggacgcagatgtgtaaccatttttatgatatggacgcgctggtcgaggccgggccggaagggttagcactgatcaaaaactggcagcgcgcccgccctcgctccacgcatgcctggcttgcagaagcgcaatactggaaccaccgtgcctggctctaccgcagctacggctgggcgaaagaaaccacccaggcaatgtggatctgcgccgccgcctgtaacgaacggatggtaattgccgccctcaatgcaatcgactgcgaaccacgccaatggatggctgccgcgttgaccagcaccaactccaaggtcttcggccagccggactggctggttgaatttctgagaggagcagaggtttcaggacagccattgatggtagaacttgtcgaatatcatcgccagtcacctcaggagatggacgcgttgatggcgcattccgggctgtcgtttgcggacgcaatttgcccccctctaccgcgtccgtttttactgactgaacgcgatgacgctgatgcacaaaccatttggctcgcgacttgcctgactattttcccaaccgctttctacgtgctggatgaatatataccgtttcgcatgccacgctggggcggctcacatgaagagatccgccactttttggcattacctgagtgcgatcatctttccgccgcggaacgcgagcatctggagctattgatctggtgggatattcaccgcgacctggagatcaaagaggtcgactctccatcagaacgagaacgcattatcgccaaagccgaggacattgcccagcgagcgcatctgccggagtctcgtcataacgcgctagaatggctgcaggtttgctatagcgatctggaagataatgacgcactctggcgaatccttcagcgttcgatcgcggaaaaagttaagctcaacaattacttcaccgcctatgcaataaagtttgcgctacgtgatttcccggacagcaggtggatttataatttcctctgccagaatacgcagcaatcagagcactgtgcaccgaaaatctatcgtggctactttcagtatgtgggattattcgggtatgaaaaagatgaaacacaaggcgcagcctggctggatagtgttgccgatatcgaatacaaccataactggcaggacgtaattaaagatttccattggctagggcttccgcagcatttcgtgccgctggcggaactgggagctcaaagaaatatacccgccgcactgaatctgctgggtcttgagtacatcgataaagccgaagatagtctgctaccttacgatcctgttaccgccctgaattactttcagcacgcggcggagatactgcaggaacagattgagctgcgcgatagacacccgcacagcctaatcgtgaatgggggatataccgagtttgaagacgatctgcaaaatatccatttcaacattgccatctgctatcagagactgagcaaacaagaattcgaagcagaaaaacgttccgtttatgaaaaagcgctgctcgatcatctctggctcgcgcatcagtttggccataaagcggcccggggattatttctgctaaatatttttgaagtgaaggatattacgctggcgcatgagcatttagagctggtgcgggaagaggccaataaaggcacgctggaagcgatggtcaccctgtcgcgcctgtacggtaataagcttgataagtcattattcaacatgaagcttagtgcgcgctggacacattttgctgtcacgttatacccacatagtgaaatcattgaggattgcctttaccatctgcatttttctagtttaagcaaacgtcttcgctttgcctggtacaccttccgcattccggacaccgagctaccgggacaagtcaacaccatggtgtaa

SEQ ID NO: 98841 - DNA, 1062 bp, Enterobacter aerogenes
atgatttatgttaatggtcgttttcttactcaaaaacttaccggtgtgcagcgatttgcttatgaaatgagtcttaggttatcaaaattgagacatgatgttgtggtattggtgcctgatatgtcagccattgataaaagctataacatttcaagttttagtattaaagaaatcaggggggggagaggtcatttttgggaacaatttacattaccgctttttctaaaaaaacaaaaagattgtgtgctagtcaatttatgcaatagtggccctttgtttttcaaaaggcagattgtaacgcaacatgatattacttatatacgttatcctgaaagtttttcattcggtttcaggttgttatactcattgttcactcctgttttactaaagaattcaaaattaatagtgactgtcagtgatttttcgaaaagtgagctattaaattattataattgtgatgcgagtaaaattcacattatcccgaatgctgtaagtaatgttttttttaaaccagatgatagtatggttagggtcaatgaaatatgtgaaagtgattactttttgaccgtatcttcggttaatcatcataaaaatattcatggtcttattgaaactgtactatctgcagatttaaatataaatttgaagataataggtgacaggaacacggtatttaattgtgtaaatatcaaaactgatgacccaagaatagattttttggggcgtgtacctgatgaagaattaattgctttatatagaggcgcaaaggcttttatttttccatcatattatgaaggattcggtatacctccactcgaagcccagtcatgctcttgtccggttatttcctcaaatagagcgtctcttaaagagactttgggggatagtgtgttgtactttgacccagactcaaaatatgagcttatcaaagcgatcattaaattaaataataacgctgacgaacgcaacctgttgattgataagggtaagtctaatgtagagaggtattcatgggaacgttctgctgaaaagctgaatatacttattgctaaaattaactaa

SEQ ID NO: 98842 - DNA, 579 bp, Enterobacter aerogenes
atgccaaaagacggctatacggtaatcgttgataagatattagatcacaaaaatattactgtggctttaaacacccagtatgatgagaccactcgtggcgaatatgatcatgtattttatagtggcgcgctggatggtttttataaatacgatatggggcgcctgggctatcgtaccctggatttcgatgctttccgaaccgaaggtgattatcagggatgtgcggtaatgaattatggtgagcaaaaagtgccttacacccgtattactgagcataaatactttgctccatgggagagtcacgagaaatcaatctgctaccgcgaatttagtcgagcatgtgagcctgaggatattccatactacccaattcgacaggtaggtgagatggccatgctgcaaaattatctcgatcgcgctgaaaaagaagcaaatattacctttgttggtcgtctggggacataccgctatcttgatatggacgtaactattgctgaagctctggaaacggggagaacttatcttaagtcattagaacagaattcagtgatgcctgtatttacggttaaagtcagatga

SEQ ID NO: 98843 - DNA, 213 bp, Enterobacter aerogenes
atgatcatcaaaatgttcttcgctaccccgctggatataaccataacccgtttcgggaccagtaggaacaatcccaaatgttacaagctttccttgatttgcataaactacagcactgttgattgcagcttgaaaagcttcattattctcaataacgtggtctgcagccaaaacaaggagcaatgggtcatcatcatgtgcaactgcgtgtaa

SEQ ID NO: 98844 - DNA, 219 bp, Enterobacter aerogenes
ttgtccattgaccgtcgtcttcacccggttcacatacggcatcatttccgtgtattggttgatgtactcccaaacttcagcattgtcagtatggaaaatatgagggccataagtatgaaccataacattggtttcactatcccgctcactatagcagttaccagcaacatgcggccggctgtcaataatcgtcacctgatgaccagcttcagccaataa

SEQ ID NO: 98845 - DNA, 153 bp, Enterobacter aerogenes
atgatatgtgatattgagaatgattatcaagatcattctcatttaaaattattggcaagagtgatggtttcacctggcaaacagctgtccgttgccgtgttgtgggtagaatctgtgaagacgatcaagattttaaacagcgataatatttaa

SEQ ID NO: 98846 - DNA, 582 bp, Enterobacter aerogenes
atgcgcataatgaggcgacggatattcctccagcgcagtagatactgttatcagtttgcaacggttttggtcgggaaaaatatgtgctttgtgttaattccgagcacattgcgctcccgatatttcttctgcgttatgtctctcatggctcagggagcgcacagggggcggccagtcgccgccgccccctgtacccccgggctccggccgccaaaatcgccacttcgtggtaccttcgacttatccctgcaggcttcgggtcgggccgaggcagcgtccttgcaaaacacggccctcagcccgcatccatgcgggctgccccggccttccgggaacgtctcagcgattttgaggccaccaacaccggcagtgtcagccagcatggtgaataaattaaaggcaggccgcacgaacggtaggccgggtaaggcgttagccgccacccggcgcaaaatcagctcagcttccgccgcctgtgttaaggtttgtgcggtttcaaaatccccggtggcgctaccgcttaccggggctacagcacagtacggtttggtagccccgcaagcagggggaatcggaccttag

SEQ ID NO: 98847 - DNA, 216 bp, Enterobacter aerogenes; identical to SEQ ID NO: 98585

SEQ ID NO: 98848 - DNA, 2238 bp, Enterobacter aerogenes
atggttgcggtaagaagtgcacatcttaataaagctggtgagtttgacccgaagaaatggatcgcgagtctggggatttccagccagcagtcgtgtgagcgcttagccgagacctgggattattgtcgcgtaacaacgcagggacacccgcaggcagatctcctgttatggcgtggcgtggagatggtagaaattctctccatgctcaatatggatatcgataccttgcgggccgctttactgtttccgctggcggacggcaatgttgtcagcgaagaggtcctgcaagagagcgtcggcaaatccgtcgttaccctgattcacggcgtgcgtgatatggcggcgattcgccagctcaaagccacccacaccgataccgtctcctcagaacaggtcgacaatattcgccgcatgctgctggcgatggtcgatgatttccgctgcgtggtcatcaagcttgcggaacgtatcgctcacctgcgcgaggtaaaagatgaacccgaagatgagcgcgtactggccgcaaaagagtgtaccaatatctatgcgccgctggcgaaccgcttaggaataggtcaactgaagtgggagttggaagactactgcttccgttatctgcatccagccgaatacaagcgcattgctaagttgctgcacgaacgccgtatcgaccgcgaacattacatcgatgagtttgtcggccatctgcgttcagaaatgaaaaccgaaggcgtaaaagctgaggtgtatgggcgtccgaagcatatctatagcatctggcgcaaaatgcagaagaagcatctcgcttttgatgagctgtttgacgtgcgcgcggttcgtatcgtcgccgaacgtttacaggattgctacgcggcgctggggatcgtgcatactcactatcgtcatctgcctgacgaatttgatgattacgtcgccaacccgaagccgaacggctaccagtctattcataccgtggtgctcgggccaggcgggaaaacggtcgagatccaaattcgcaccaaacagatgcatgaagacgccgagctcggcgtggcggcgcactggaagtataaagagggcgccagcgccggggcgagcggcggtcgcggccatgaagaccgtatcgcctggctgcgtaagctgatcgcctggcaggaagagatggccgactccggcgaaatgctcgacgaagtgcgcagccaggtctttgacgaccgggtctatgtgtttacgccgaagggtgacgtggttgacctgccggcgggctcaactccgctcgactttgcctaccatatccatagcgatgtcgggcaccgctgcatcggcgccaaaatcggcggacgcattgtgccgttcacctatcagctgcagatgggcgatcagattgagataatcacccagaagcaaccgaacccaagccgcgactggctgaacccgaacctcggctatgtaaccaccagccgcgggcgctcaaaaattcacgcctggttccgtaaacaggatcgcgacaagaacattctcgccgggcggcagatccttgacgatgagctcgagcatctgggcatcagcctgaaggatgccgagaaacatctgctgccgcgctacaactttaatgaactggatgaactgctggcggctatcggcggcggggacattcgccttaatcagatggtcaacttcctgcaggcgcagttcaacaaaccgagcgccgccgagcaggatgcggccgcgctgaagcagctgcagcagaaaacctatactccgcagaaccgcagcaaagacaatggccgggtggtggttgagggcgttggcaatctgatgcatcacatcgcccgctgctgccagccgattcccggtgacgaaatcgtcggcttcatcacccaggggcgcgggatctcggtgcaccgcgccgactgcgatcagctggctgagctgcagtctcacgcgccggaacgtatcgttgatgcggtatggggcgagagctattcggcgggatattcgctggtggtgcgcgtggtcgccaacgaccgcagcggcctgctgcgcgacattaccactattcttgccaacgagaaggtgaacgtgctgggcgtggccagccgcagcgataccaaacagcagctggcgaccatcgatatgaccattgaaatctacaacctgcaggtgttgggccgggtgctcggcaagctgaaccaggtgccggatgtcatcgacgcgcgtcgtctgcacggcggttaa

SEQ ID NO: 98849 - DNA, 417 bp, Enterobacter aerogenes
atgttatataattgttatttatttatatgtgattgtattcacattttttttcgtaacactggttttcgcgatttacgtcagtacatgagcagtgaaaaagtgaattatggcgaagtgggtataacaacggggttttatatggctttgaatgaaggtgagcgtgtggatatggcacgatcttccccgcaggaggtgcggatcggtagccccggtaagcgcagcgccaccggggagatagacgcacacacagcaaaaaaccccgcacctttcggtacggggttcttcttatttgatgcctggcagtttatggcgggcgtcctgcccgccaccctccgggccgttgctgcgcaacgttcaaatccgctcccggcggatttgtcctactccggagagcgctcaccgacaaacaacaaataa

SEQ ID NO: 98850 - DNA, 807 bp, Enterobacter aerogenes; identical to SEQ ID NO: 98838

SEQ ID NO: 98851 - DNA, 1755 bp, Enterobacter aerogenes
atgaataatagtatttcgttacagtcatcagtattccctgatatacaccaccgtgaaattagcgctctgtattttttatctgataatgtatctacatgtgttaatgatgcagggtacgttagggtatttaaaaatcaagaagtttgttttgatactttttataattcatttgatctccaaaaatggtctaaatacacaacggttaatcagcttggttttaaaattgatgttgttggtagaggtattgccactattttcttcaaaaaccatgatgtattaaagaaagtctttcagcgcgaagttgaaggggcagtcacaatagataatctagaattaagtgaatgtcttgacggtaggctttatttttactggtcgtcaattgatgatagtgaaatcagatgtttttcttttactacatatggggcagtagaggattttggtaagttagcgattgtcatcactacttataatcgacaggcagcattattatcgacattgtcgagatttgaggagaacttatttgccgatagtgtcggtcagtcaaaatttcatgtatatgttatagataatgggtgcaatttagatttagagccaggacctaatgttacctatataaaaaataaaaacatggggggggccggtggtttcacccgcggtttatttgaggtgaaaaagaacaataaagaaacttattgtatctttatggatgatgacgcatcctgtgaaattgaaagtatcaaaagagcatattggttcatgtgtttttcaaaaaacgatgaacagatgattgcaggcagtatgctatatgaggataaacctcagacagtatatgaggccggcgctatttatccttacaagcagatacgaatgcggcccttaaaaaacggtgttgatgtttcaacaccaggcgggcttgatgtgtttaatcaagaggacggacaggccaattatgccgcatggtggttctgcgcttttaaagtatcagcggcaaaacactatgcttttccgttctttgtccgtggcgatgacattttattcggggtaatgcacgcctacccgatcgtaactctcaatggcattgcatcgtggcagatgaattttaatcaaaaatatagtgcattagttgaatatttaagcgtcagagggttgctggtcccggcgtttgtatacccgtcgccaaagaaaagaagacagatagctttttggatattagcaaaagtgcttttactatgcttttcctaccgatattcttcggccgaggctatcatcgaagcttatttagatgtgatgaaaggtggtgatttttggattgacgatcctgatgctgaaaaagctcgtagacggattagtgagttgtcgaaagatgaacgccctggagaagtagcggatggcaaggccgtgaaaaaaacgcaccgtaatggacctgagcctaaatgggctaagatactcaggctgtttcttctcaatggtcatttggttcctaagtttatcacgtctggaaatagtgtacgaataccgaacacggaaattcatccgacaaaacaggtttttttgaatactgaagtttactatgaaactactgacggtagttttatcgtactgaaacaaaataaattacgctgtgctagattgataattaaaacactatgggtcattagcaaagggtactttaattataatgctgttgcagaagagtatggaaataagatttcatactttacatctgagactttttggaaaaaatactttatttaa

SEQ ID NO: 98852 - DNA, 1167 bp, Enterobacter aerogenes
atgaaaattactatttccggtacaggctatgttggtttatcgaatggtgttctgattgcccagaaccatgaagtggtcgctttggatatcattcaggccaaagtagatttgcttaaccagaaaatttcacctatagcagataatgagatccaacaatatttaacggaaaaaaagcttaattttcgtgcaacaacagacaaactcgatgcgtatcatgacgctgattacgttattatagctacgccgacagattatgatcccaagacaaattacttcaatacgtcttctgttgaggctgtcatccgtgatgtgactgctatcaatccgaaagctgttatggttataaaatcaacggtcccagttggtttcactcgcggcataaaagagcgccttggaattgaaaatatcattttctcgccggagtttctccgcgagggacgggctttgtacgataatttatatccatcgcgaattgtcattggtgagcgttctgctcgtgctgagcgattcgcagacctattgaaagaaggtgcgattaagaaagacattccgaccctttttactgattcaactgaagctgaagctattaagctctttgctaatacttacttagcactacgtgttgcctattttaatgagttagacagctacgctgaaagccaggggctaaacagtaaacaaattattgagggtgtatgtctggatccgcgaattggtaatcattacaacaatccctcttttggctatggtgggtactgcttaccgaaagataccaaacagttgctggcgaattatgagtcggtacccaataatattatttcggcaattgttgatgcaaatcgcacgcggaaagattttattgcagactccatcctggcgaaaaatccgaaggttgttggtgtgtatcggttaattatgaagagcggctctgataatttccgtgcttcctctattcaaggtataatgaaaagaataaaagcgaaaggtatacctgtaattatttacgagccagtgatgaaggaagatgaattttttaactcgcgtgttattcgcgaccttgatgtttttaagcaggagtcggatgtaattatctctaaccgcatggcagaagaattggcggatgtgaaagataaagtgtatacgcgagacctatttggtaacgattaa

SEQ ID NO: 98853 - DNA, 924 bp, Enterobacter aerogenes
atgccaatagcaattgagcaacttgatgtatcaaagcacgatgtcattctttcaagcagccatgctgttgctaaaggggttttaactggtcctgatcaactccatattagttatgttcattcccctataagatatgcttgggatcttcagcatcagtatcttcgagaagcaggtttagatcatggcttaaagggaatgattgcaaaattgattctgcataaaatgcgtatgtgggattatcgaactgcaaatggcgttgatcatttcattgctaactctcaattcatcgcgcgccggattaaaaaagtttatgggcgtgaagctgatgtcatttatccgcctgttgacgtcaatcgcttccttctgaatgaagataaagaagattatttctttacagcatcacggcttgtcccttataagcgtattgatctgattgttgaggctttcagtcacatgccagatcgtaaactcgtcgtcgttggtgatggcccggagatgcaaaagataaagtctaaagccacggctaacattgaaattctgggttatcaatcaaatgaggtcatgcaagagcatatgaggaatgctaaagcatttgtttttgctgcagaagaagattttggaattactccagttgaagcacagtcttgtgggacgcctgtaattgcgtttggaaaaggtggttcacttgaaacagtaagaccatttggtgtagataatccaacaggtatcctttttgacaaacaggatgtagcttctgtcattgatgctgtgcaaaagtttgaaacgatgcaagatcaaattcttccaaatgattgccgcgcacatgcgttaaaattttctaccgagcgctttaaccaggaaattgctgaatacgttaattctaaatattcggagtttattgaaactaaaaaaatcaattattaa

SEQ ID NO: 98854 - DNA, 237 bp, Enterobacter aerogenes
atggggactccagttatttttgtaaatggtggctttaaaaataaagttgataactgccgtttcgatggattgtttgacttctttaatagaattgacgtcgatatgaacgccaatgcgactgctaattttgaatttgatggtaagaaaattggaatgaataccattattaaaaataaaactttgcatgagcaatatgctaatgaattagctgataaatgcaaaagttttgttgtttaa

SEQ ID NO: 98855 - DNA, 201 bp, Enterobacter aerogenes
gtggattctatactcacggcgcgaagtcattttaagatgttcaactacgcgtttaacgtcctgcacttgggatttatcaataacgagcacagcatctttggtactaactactaccagattattaaccccaaccgcagctacaagttgttcttcgctatttatataacaattagaagaatcatggacaaaaacatcccctga

SEQ ID NO: 98856 - DNA, 573 bp, Enterobacter aerogenes
atgtacgattttgactggagttcaattgttccttccatgccctacctgctggcagggttggtcattacgctgaaaatcaccgtcacggcaattattatcggtatcgtctggggcaccattctggcggtgatgcgcctgtcaagcttcctgccgttggcgtggtttgccaaaacctatgttaacgttttccgctcgattccgctggtgatggtgctgctgtggttctatctgatcgttcccggattcctgcaaaacgtgctggggctgtcgccgaaaaccgatattcgtctgatttcggcgatggtggcattttcgatgtttgaagcggcctactattcggaaattattcgcgccgggatccagagtatttcccgtggtcagtcgagcgccgcgctggcgctggggatgacccactggcaatcgatgaagttggtgattctgccgcaggccttccgcgcgatggtcccgctgctgttaacccagggtatcgtcctgttccaggatacctcgctggtggtacgtcctgagcctggccgatttcttccgtaccgcctccaccattggcgaacgtga

SEQ ID NO: 98857 - DNA, 159 bp, Enterobacter aerogenes
atgctccaggcgcaggccatcgccgcccagggcgttaccgatctcgataactacctgcaaaaaggcgaaaagccggcgaagcagcgcgtgatgttccgcggcattctgattacccaggataacgcagataaagttcaggacttcaatatcaagtcctga

SEQ ID NO: 98858 - DNA, 1128 bp, Enterobacter aerogenes
atgttgttacgcgagtccattgaactcaacataagggagtatatggggttagctgaaacattagttagtattccgcagtctgaaagaggcggtgagattgctcaacgtgggtttgactatcaaacttgctgggctttatctcaaatgctggaatatgaactagatgaaaagaactatgtgtttatcttcgaatatcatgatgatgttcttattcttgatgacgaagtttctccaacacaactcacatttgctcaagtaaaaacaagagagaaacactggactgcatccactcttagtaatagcaccaagaagaacccaatatctatcatcggtaagttatttattcatcaaaagaatttcgccgaatattcacccaagctcctttttgttactaatgcttctttcaatctatgtgaggaaaacggtggtaagtcttgttttggtgcaaatgaagtcaaagtggagtatcagacgagctttaagaaagcaatcaaagatcaagtaaagcttgatgactccagtatcgatctttctgttatgcgtttcgttcaatcctcattaagcctagatgaccacattacacatctaaaaggtaaactatgcgatttccttagcaagaagtttggcgatagcattagcctgagtgttaatgcattagcttctttgcttgaacaggcgtgtcgagaaaaatccaaggtaaaatccgcagatattattaattttcctgaacttatctcacgaaagggtttctcatcagaagcattgaatggtgtgcttgattccttgaatgcaagtaatagtttaaagcctgattgggacaaagctagtcccctattcaatgatcttggcaaaacatcgcttcagctcattatcctgcaagccatgttctcacaagtttgcatcgaccttaaccaaaacaaaaaaaatccttcgactgtatatctagaatatgcaattagcctttacgatgaggcgagtgctcactcggatttgaaattatatctaactgaaaccatgtacaaaattgatgcactttgtccagattatgcattgactttaaagtcagggaagaaagaatgcatagttatttactcaataatccagaagctcttagagggaggtgaataa

SEQ ID NO: 98859 - DNA, 1653 bp, Enterobacter aerogenes
atgaaaagcatatactttaaaagtgctcatatattatcccttcgcgataagaaaggattctccttcaagttctcacctgatattaatatcattacaggtgagaacgacacaggtaagtctagctttattaagagcttatatcatacattaggtgctgatgttcgactggataaaaagtggaaagaagataactttgtttcaaaagttgttatttgtgttaataatcgtgactatgcgtttcttcgccacgaaaaacgtatttccattttcgatataacagcaggacaagagcatcacttagtgacctctagctctcgtgcagagattgcattagctgtgcgtgatgtctttgatttcaatttggagcttgtgactaaaactaatttggttcagggacaagcacaaccagcaagtctttatctcccttactatattgatcaagataacggttgggggaaagttttagattcatttagcagtttggctatgtatgaggactggcaaaaaaatatcttgaattttcatactggtgtaaaaccaaaggagtactatactttacaaggaaagattaatttaattgatatcgatcttgttgaaatccgaacgacgttaaaagctctaaagagagctaaaaagcgattcgaagagtcatttggaagagtacttttcgatgtggatgtaaaatattatgaagagctgctggaacgtttccttcgtaagtgccaagacttacatcaagaagaaacagaatacagaattaagctcataaaaatattatctctacgagatgaattagtaacagaaatagaggaatcaaaaagacagctcgatgaaaatgatatagattctttgctaccatcggcaggcttagaagcaagatatgtagtacttgagaataaagaaaagctattgcaaatcataccaaagttgtatgaggaaaaatctgtatatgatgatcaactctctaaaattaaagaagatttgaaacaggctataagcttaagctcagaactcaaaaacatgcttctggaagtcaaagagcaactgactcttcaagacgttattaagtctcaagcaagtaagcaggttgaggtaactttcgatgagcaaattaacgaattactgctaaaaataggcgaattggatgttgctagaactcagctttcaaaagaaatagcaaagttcgaagataaaaagcgagcaaaagaaatcaatgataagtttaaagagtcactgaagtttgcgcaaactgagttaggtatcaaagatcctaaagttggaactattcttcaatatggtccgatttctaagagcgaaacaggcagccgtgctccaagatcaatattggcttatcactatgctcttctaaaaacaatagaagataaatcgacaagtcctatgcttccagtagtaattgactcgcctaaacaacaagatccagatccgcgtacaacaaaaaagttattcgatttatgtattaatggtttatcaactaatagccagctaattatcggctcagtttcatttgaaagagaaacgaatcagtttaaaacacttattatgactgaaaaatacagtctgctaaaatcagagctttacaatcaggtttatcaagagattatgcctctttatgaacgagctgcgttatcataa

SEQ ID NO: 98860 - DNA, 858 bp, Enterobacter aerogenes
atgttaaaacttaaacaacctgcttatacatatgccgatatgctgactagctgccgcgaaggcataactggtaatccgggcttgttgctgaaagtgaatgaagcaataactgatttgcaaacattggcagcttcatacaatgcatcggcattaactggtgaactttatacaatacaaccactgcaaataaaaaatgaggaagaccctattgttgtaggtcggttaaagaaatctgactttgttaagctttatggaaattatgttgttgggaagaaaaagcctgctcgaactatttatgatgccctgatgactgctgctaatgaaaaatgcccattttgtggtgggattgggcgacctcgaaatttagatcattatttgcctaaagctcactatcctcagttttctatattgcctgttaatcttgtgccagcttgtcgagattgtaatatggatggtaaaggggaagcttttgcaagaaatgaagcagaacagataatacatccctatttagacgatagccgttattatgatgaacagtggatatcggctagatacttggttggcaaaaatgatgagcctggagttattgagtattttgtttcgccacctgctgattgggataatgcacataaacaaagagtggaaaaacattttaacgattttgatttatctttaagatactctaaagaagctggtgcgaggttagttgtgcttttagctctatataactcagtactaccaatctccgtagataaaaatgctgctaaagaccttatatttcaaacaataatcaataattcgccttttgtgaatcactgggaacggattatgtgtttggctctaatgtcagacttgtag

SEQ ID NO: 98861 - DNA, 1518 bp, Enterobacter aerogenes
atggaaatcattattgtaccccgagagcaacgtattcctgccgcaggtattagtacggcttacctgcatgtggatcgttggaatgacttttcattcattacaatgttttacatgtatctgtttgatcagaaaggtgaacggcatgatattgggaatgtcaagattggctttcaaggacaaactactgaaaaatcaacttactccacgttaggaagcaggtttagaattctcccagaaggatatttttccgttggtcaggatgtcgactattatcagaaaatttcgaatttaccagaatccgtcaaagtttcattacttgaggcgctcaaagatattgcttatgcgccagaacttatagatcttgttaaggatgaggaggtctttaaaacgtctttgcttcggtatgttagtttgtctgttattaaagggcagtttgcgcgagtacttgagggaaagaatccactgactaattttgagttcaagttcattcgccctgcacaagacaagatttccgatatcgaattatcatttaaggtgaaagtaggagaaaaaccaagcaccaatattcacgcgatcataggtcgtaatggtgtggggaaaacgacaattctaaacggaatgattgaagctgttaccagtaaaggtacgtcgaatgcaaaattttatgatctggaggggtggagtgatgatccgattgataatgattactttagtagtttagtctctgtgtcatttagcgcattcgatccattcgagccaccaagtgaacagcctgatccatcaaagggaacttgctacttctatataggtttgaaaaaaaaaggagagtcgctgaaaggactaaatgatattcatgaagactttctacaagctttgacgctatgctttagccagattcctaagcgtgaaagatggctgcaggctattgatactttggagtctgatgaaaattttgcaagcatggagctgaaaaatctagcaggatataatggtgagatgctcgttagtaatgcacggaaacgtataaaaagaatgagctccggtcatgcggtagtgttattaacacttacacgtttagttgcaacggtggaagaaaaaacgttagtgctaattgatgaaccagagagccatcttcatccaccgttgctgtctgcttttattcgtgcactgtctgatttgctacttgatagaaatggtgtttctattattgcaactcactcacctgtggtacttcaagaggtccctaaacgatgtgtttggaaaatcaatcgttcaagattgtctaccgaatctcgcaggccagacattgaaacatttggtgagaatgtaggaatcttaacaagagaggtatttggtcttgaagtagttaaatccggttttcacgatttattagtccaatctgttaagtcaggtggaacatatgaggatatagtcgatgagtatcgtaaccagcttggtgttgaagcccgagctctattaaaagcgcttgtcacacacagagatcggagtgttaagtga

SEQ ID NO: 98862 - DNA, 258 bp, Enterobacter aerogenes
atgaggacgataaatgctgcaccttcaactgtcggagagattttatacgaagaattcttgaaaccattggatatgcctcccgcaagacttgctgaactgatggatacatcatatgaaaaaattttggaaataataaaaaatgagcgaaatataactcttgaggaagcttttcaactcgcgataattttcaatacagatgcatatttttgggtgaaactgcaagagctacatgaggcatggtttaataaaaaaaagtaa

SEQ ID NO: 98863 - DNA, 174 bp, Enterobacter aerogenes
atgaaagataaacttttggtcatttttattctaataatttcattaattctatgctcttgcgataaaaaagatgaaggttgtttatcgacgccagagaataaattgaacgaacataactacgataaatgtgccctgcgtggcaataacaatcctagccctaagcgagaatggtaa

SEQ ID NO: 98864 - DNA, 1395 bp, Enterobacter aerogenes
atgagaatagtaagcaagctcacttttttaggaatgttttttttgttttctgtaaatgcttatgctggtcaattagatagtagcggattacttgatacgttattagataagtttcagcaagtagccagcacatggtcattagtaattggtgattatgcaaattggctcttctgggggctggtattaataagtatggtttggacatttggtatgttggcgatgcaaggggaaggtttaatcagtgcacttgcagaaatagttcgtttttttgccgtgattggttttttttattatcttttaatcaacggcccagccatatcacaatctataattaactcaatgagacaacttgcagcaaatgctttaggaacaagtactggtatttcaccctccagcatagtggatatggcatttgtgatattaacaaaggtcagttcagcagcatcaatttggtctccaatgatttcgaccattatgataaccgtcgcgataatagtattagtagtaatggcgcttatcgcgataaatatgctaataatgttagtttctgcatgggtgttgtgttatgcaggagttattttgcttgggtttggtggctcgaaatggacttctgatatagcaataaattacttacgcacagtattatcgattggtattcagttatttacgatgacattaatcattgggattgggcaatcatttatagatcagtatttttctattattaaaaatgatattcctgatcttaatagtcttattgttttacttctggcgtcaattattcttttagtattgacgaataaattaccgttgttgttatcaggcgttgttggaggagcgtccttacaagggatcggtggttttggagcaggtatgattactggcgctgctactactgcaatcagtggcgctggggcaatggcaatgagtgctacagctcaagtcagtggtggtgcttccgctctaaaagcagcatttgaatctgcacaagcggcgatggcagaagaatctggttctggtgataaaggtggttcaggtggaggatttggcggaggggaagataccggttccgtagatacttctggaggacaaccatcaggcggttccggtggttcttctgcagggagtaatacaggtagcgtcagcggaggaagccaggggtttgcttcatcattctcacgagctggccgcatggcttctcacatggcgagcgggctgtctaacggagcttcggagtatcagatgatgaagggaagtactaattctatccgaagacaacagaccgttggtggggaaatagcgaatcaaatacgtaaacacacagccgatcgtcagactaaccacgaacaggatgagtttgagggtgatagtttaactggcagtaaaaaatcttga

SEQ ID NO: 98865 - DNA, 213 bp, Enterobacter aerogenes
atggctgattataatagctttgttttggaaggaataaaaattatttttgccgataacaacaaggagtttattaaagagatttgtgaaccattgataaatattctatgcatcgaagagtattattctgctacgggaatttataattatgatgatgctgatgagcaaacggagttattgaaaaaagcaatttttagttataggaataatcattga

SEQ ID NO: 98866 - DNA, 201 bp, Enterobacter aerogenes
atgaaaatggatgagaccacgaagagaaaaaggattgaggcatttaggaaagcagaggctagcttatatttatcaggtaaagatcctcgcgggtcagaattttaccagaaaataaaggatgaagttataagaggtaagctaacttatgaagaggcaaaagcagagattttaaatcaccatttagagaaatcgaaaaaataa

SEQ ID NO: 98867 - DNA, 948 bp, Enterobacter aerogenes
atgcgttacattagaaaacacattgcaaattttgatttcaatattgtatccattatatatttgctgattgcttgcattgtaatcatgaagttcccattattacttcaagataaaaccttcttagtttgtggattattcctctcggtagcattcattttttgtgcctataacaacaaaaaaacaatcgtcaataaaatgattgagcacagcatcattaaatggattggaacagtattgattttttcaatttgtatgtggtatgcaaaacataaaattaattttgattacgatattcaaccggaatacttaatatactcatcttatggttatgctttcgcaatggccattcctctatctctatccatttatggccttagcattttcatatacttatactttggaagaattactgcttatcaatgcttttacgcggcaattttgaccctccctttttctgcaatgctaagagagacgattaaaaaaaaccaagaggttgatttcaaagttattatgttgttagttttcgggttagctttcggtatcgtaaccatgttcaaagcaatgcaaaaaacaaataaaaaatcaacttcatccaataaaaagaatctattatacattgcaaaaacaatggcacaagatattaatagagcaaaactaattttaatgatatggtttaaaaaaatacttatatgttcgaatagctacttaagagttgcagatctattatcgacagcaattgcattattattcattggtgttttttcaataaagataataccagagcatcagaagtcttttcttttacttgatgctttttctaagacagattgcaatacaaaaaaagattcattttcatacatcaggaaatcgaaaaacgaatgctacagaattaattctaaaggaatagaagttatcgaaatgatatcatttacctcatcagctgactaa

SEQ ID NO: 98868 - DNA, 1074 bp, Enterobacter aerogenes
atggcgactatacgcaaacgtggtaactaccaatgggaagctcaaatccgtaaacgtggttttccctctcaaaccaaaacctttaacaccaaagtagaagcagatgcttgggccaaaatgatcgagtcagaaatggcgagaggagtttggcttagccgcagcgaagcggaatctacgacattgtatgaagccctaacgcgctatgaaaaagagattgttcccgacaaaaaaggagcagtgcaagatcgatcattggtgcggatactaaaaggcactcagctggcaaaaaactatatggccagcatcaggagtgccgatgtcgccaagctaagagatgaatggttgaaaatttatgctcctgcaaccgttttaaggcgtttggccttactttctcatgtattcaatgtttcgcggaaagaatggggcatggagagcctgctgaaccccgtagaggccattcgcaaaccccaacccaagaactcaaggaccagacgcctggaagcgctgcctttagtttctgagcaaaccggtgttacgtcaggaaaggaattagccaacgagatcgaacatatcattgccgcaacacattcattagtattgccagcaatcattcttctggcgttagagacagccatgcgccgtagcgaaattgcagaacttcgatggcgctttatcgatcttgataggcgagttgcacatctgccggatactaagaatggtaatgctcgcgatgtccccttatccacaaaggctgttatggtactatccaatctaaaggagcgttctaaacaagctgatgacaaggtttttggaatgcgtgccgatgcgatcacccgcgcttttgatcgagctgtaaagcgcgccagagaaagatatgaacaagctaaacctcaatgtgatgacaccttcctcaaagatttaagatttcacgatctccggcatgaagcgacctctcgcttggctgagattttccccatgcacgagctgacaaaaatcacggggcataaagacccgagaatgctaatgcggtattatcatccaaaagctgaggatttagcgttaaagttgaaataa

SEQ ID NO: 98869 - DNA, 1353 bp, Enterobacter aerogenes
atgaaagtgtggccggcgtcattgcagtcgcgcttaatgataatgatttttctcgctctgctgctcgctaatgccctgacgctatcgcttctgctctatgagcgcatgagcagtgcccgtagcgtcatgctgggcaaccttgaatacgatgtcgccaccagcgtggctatccttgatcgtcttcctgcgcaagaacggccgcattggttggcgcgtctggcgcgcggtaactaccgctatcagctttcagccggacaaactggcgattatcccaccagctggcgtacccgcgatgcggtacgctcgttacaggaagccctgagcggtcgctatcctgtgagtattatcgccgtccctggaccgcgcgaacatattcaggcccacgtgaccctgcgcgacggcgcgccgctaagcattgacctgtggccaaagctgccggccatcgcacgttggctaccgctggtgctggtcgcgcagtttctgttactgctattttgcgcctggtacgccgtccgccaggtggtcgcgccgatgacccgctttacccgcgccattgatacgctgcaaccggctactccggctgcagggccgctggccgagaagggaccacaagaggtgcagcgcgcggcgcgcgccttcaacgcgatgcaaaagcgaatacaggaccatttgcaggatcgcgcgcggatcctggcggcgatctcccacgatttgcagacgccgattacccgcatgaagctaagggtcgagatggccgatcaaccggcactccgcgataagctgttacaggatctcgatagcatgacccgactggttcgcgaaggcatcgcgctggcacgagcggccgaaccgctggcagaagcgccgcagcggatgagtcttaatgcgttactggatagcatcgcctgtgattatgccgatatcggtaaagcggtcagttttcgtgccggtaaaggggcggacgtcatgacgcttcagccgcaggcgctgcggcggatcatgagtaacttaatcgataatgggctgaaatacgccgaaaaggtggaaatcagcctgagttatccgccgaatggcgatgttatcattcacgttgttgatgacggccccggcatcccggaaggagagctcaccgccgtactgcagccgttctatcgcctcgagcagtcacgtaatcgcgataccggcggtaccggtttggggctggcaatcgccgcccagctcgccgggcagatgcagggaagtttgaccctgcacaatctgcaacagggcggtcttgaggcgcgcgtacgtctcaatgccgccgttttgtatccttctgtatccattccaactgcagataaatccatatactaa

SEQ ID NO: 98870 - DNA, 1002 bp, Enterobacter aerogenes
atgaataaaaaaggactattcgcgtttatcctctttgcgtttctgggatctattccggcggcgcaagcagactatttttataacataacggtgaacaccaaatcttatgatatgtcgtcaagttatataccacaaaccgtcggcgctactgggccgtggatgggaacatcagtaaattctgtcgattttcagattggcccggatcctcttaactctgtaggcagcgaaatcacgttaagggttgactccactttacagagtgacggcatcacctgggcgaccagcaaccctggcgtcggaattcaattccagctcaccacctcccccgttatctccgggctgatatcgtcttccaccgcggcaccgacttatccgttaactatgacgggttatcctaccggcggacgctcaataaccatatcaggcaaactaaatttagcctaccgcctcgtacgattgctcgaaaccgtgcccgcagggaaaattaccccgccctcagtgtatgtaaccttttataatacttacgatcatgcgatgtatagtggcacgatgtactccggggccgctaagcaaccgctttattatccctgtactatagatgcgccaacggaaattaaattacccacgttatatgtcgatgatttagttaacggtgctcagggagcatcatcaacatacagcataaaattaaccaattgtcctggcgcgcaaaataacattacttatatgtatgcccccttatatggagcttacggtgatggcacccaagggtatatgtacacagcgactggcgagggaagcgctaaatacgtctatctgcagttgcaaaatccagatggtacaggtcaggcagtaaataacaatataactttaaacaattataccggcagcggagactacactctgccggaatttaaagtggcttattacataaaagatgtaaataaagccacagaaggaaatgttacatcagccattgtaattggtattacttacaattaa

SEQ ID NO: 98871 - DNA, 183 bp, Enterobacter aerogenes
atgtttggtccggaaacgcgcggcctgccggccagcatcctcgatgccctgccggcggagcaaaaaatccgtattccgatgatgccggacagccgcagcatgaacctgtcaaacgcggtgtcggtggtggtgtatgaagcctggcgtcagttgggataccccggcgccgtgttgcgcagctaa

SEQ ID NO: 98872 - DNA, 1680 bp, Enterobacter aerogenes
atgaccaaagcaaaaactaccgctacgccgcttccgctatggcagtactggcgcggcctgtctggctggaacttctattttctggtgaagtttgccctgctgtgggcggggtacctgaacttccatccgatgcttaacctggtgttcctcgcctttctgctggtgccgatcccccgagaaaaactgcaccgggtacgccactggatagcgattccgctcggctttgccctgttctggcatgatacctggttaccgggtccggaaagcatcatgagccagggttcgcaaattgccggtttcagcgccgattacatctgggatctgatcacccgctttattaactggaatatggtcggcgccttctttgtgctgctggtgctgtggctattcatcagccagtggctacgcgttaccgtatttgtttcggctatcatggtctggctggttatcagcccgctgctgccctccttcaccttatggcctgccggtcagccgaccacggcagcggccacgccggcggcaacaaccggtggaaccacaacagccgcggcatccaccagcgctgccgccagcggcgatatcccaccgcagaccgaaccgccaacctcggctaacctcagcaactggctgaaaactttctatgcttctgaacagaaaagaaaaacgtcattccccgctcagcttcctgaggatgcgcagccgtttgatctgctggtgatcaacatctgttccctgtcatggtcggacatcgaggctgccgggctgatggatcacccgctgtggaaacatttcgatattgtcttcaaaaacttcaactccgcgacctcctacagcggcccggcagcggttcgcctgctgcgcgccagctgcggccagctatctcatagcaacctgtatcagccatcgggcagcgagtgctatctgttcgaaaatctggcgaaactgggctttacccaacagctgatgctggggcataacggcgtattcggcgacttcctcaaagaggttcgctcactcggcggcatgcaaagtccattgatggatcagagcggtttgccggttatcctgcaaggcttcgacggatcgccggtttacgacgaccaggcgacgctcgatcgctggctacagtccaccgagaagcttaacacgccgcgtaccgcgaccttctacaacacgctgccgctgcacgatggcaaccattatcccggccaaagcaaaacggcagactacaaagctcgcgcgcagaaattctttgatgagctggacgccttcttcaccgaactggaaaaatcggggcgtaaagtgatggtggtggtggtgccggaacacggcgccgcgctgaagggggataagatgcaggtttccgggctgcgcgatatcccaagcccatcgattaccaacgtccctgcggcggtgaaattcttcggcatgaaggcgccgcaccagggcgccgcggtggaaatcactcagccttccagctacctcgcggtttctgaactggtggtgcgcgccctggacggcaagatgtttaccgaggataacgtcaactggcagcagtacaccgctaacctgccgcagaccgcggcggtatcggaaaactccaacgctattgttattcagtatcagggcaaaccctacgtgcagctcaacggcggcagttgggtgccatatccgcagtaa

SEQ ID NO: 98873 - DNA, 351 bp, Enterobacter aerogenes
gtggatattgtatatacgttgggtatttcatcgttatgggacgaagtatgccatatgcccgttggcggggtgtggtggcttaatgtcgaccgctatgccgacgccgtcagcctgatgaatcaaacgctggaaagccaggcgcaggacagcaaagtcgccgccatagtgatgggaaaaaaccctaaagaagtcatgtcattaaaaaaagatcgcggccctaataaaatcgcattattcaccatgcccgatcgcccggaaggcctgaaggagttgcaccgcgacctactttgttcgatggaacctggcaattatttattctgctatgtacagaaaattcctggcaaaatataa

SEQ ID NO: 98874 - DNA, 336 bp, Enterobacter aerogenes
atgatcagcactgttgcgctgttttgggccctgtgtatcgtttgtgtggtgaatatggcacgttacttctcatcgttgcgtgcattattggttgtgctacgtggttgcgatcccttgctctatcaatatgttgatggcggaggttttttcacctctcatgggcagcccagtaaacaaatgcggctggtttggtatatctatgcccaacgatatcgcgatcatcatgatgaggagtttattcgccgctgtgagcgtgttcgccggcagttcatcctgaccagcgcgctgtgtggtctggtgctggtgagtatgattgcactgcttatctggcattga

SEQ ID NO: 98875 - DNA, 1158 bp, Enterobacter aerogenes
atgtattctcctgatgaactgcgtgaaaagcttgcccggcagtgggataacgcaaagctccgggccgagcgtttacttccacccggtaactggccgctttgtctgaccattggcaaaccttccgcgaaaatattcgcagagcagcctcagcgcgttttacaacatgtgcagttatggcggcaagtcgcggttgggcgtgtggactggggagaggtcagttatcgggcgagcgatggaccggtctcaatgccgctgcgctggatcctgaatggcccttctgactggatcagcgccgcggcggatcaggcggtgagccgggagtttcgcttgctggagggaattattgagcaggttgaccctatttttcatccgctgttggtcagtcatcgttcactctggcggcacaaaagcccacaggacatcatcagcgccgccaggctggcctgccgattagagcccggttgcgcaaaagggctgccgttaaggctgctttccgggcaaggggtggataccaaatttattgagaataatatttcattattaacccgactgctggacgtgcgtttttccggcgaagccagcgagcaggggttaactacctttcttgatgcttttgatgagtccagccactgggttttggttgtgccattatcgcccggattgctcccttttaaaaaatgccgggtgacaacggcggaactggcggaaacgacattgcccgcgtcgcgtgtgctggtgattgaaaatgaacagtgtctgcatcaacttccagcgttatctgacactatcgcgatcttagggtgtggccttgacgtgcaatggttatccagctctgttctggatgaaaaacgcgttgcctattggggggacatggatagctgggggctactgatgctggcgagagccaggcgctgttgcccgacgcttgatgttctgcttatgaaccgtgagttgtttgagcaatatgccagccatagcgccgttcctgaaccggtaaaagcgcagcaagcaatacctgatggcttgcttaatgaagaggccgatttttatcgttacttgacccgctcgccgcgtggtcgtctggagcaggaatttttgcctgcggggatagttgaagaggcattgctcagatgggcaaaatctgaggttcacatataa

SEQ ID NO: 98876 - DNA, 3288 bp, Enterobacter aerogenes
atgaatcaaatagtgcgtctggctggaaaggaatcttttattctcacccgtatcgagttgttcaactggggcggttttcatggattgcatcaggcagcaatccatcaggaaggtaccgccgttattggtccaaccggaagcggaaaaacgacgctggtcgatgccttaatgacgctactctgtgccaatccccgctataacctggcctcaaccggggggcatgaaagcgacagagatcttatctcctacgtgcgcggtgtatccgggcccggcgatggcggggaggggcaatcgcatattgccagaccaggtaaaaccgtgaccggcattgccgcaacgctggagcgtgaagggcagcaggtacgtctgggagctctgctgtggtttgattccaccagctccagcgtgacggatatgaaaaggctttggcttttcagcgataaccccgagcagacgctggagcactggttgaacgtttaccatgacggcggcacacgattgctgcggcaaatggaaaaagaagtgaccgggatctggacatacccgaataaaaaacagtatctggcgcgcctgcgggattttttcgaagtaggggaaaacgcgtttacattgctaaatcgggcggcagggttaaaacagctaaacagcattgatgagatttttcgtgagctggtgttggacgatcactccgccttcgatcgcgcgacggaagtggccgatagttttgatggtctgacagaaatccatcaggaactggaaacggcgcgcaaacagcagcagtcattgcaacctgttgccctgagttgggataagtaccagaagcaagagcgacaacttgctgaaaggaaagcgctggaatcgctattgcccatctggtttgcacaacaggcaagccagctctggagggaaaaggtcagccatcttgaaatcgagtttggtgaggcacagattcgcgaagaacagatccagtcgcagcttgagttgcaaaaaaaggttgtggctgactgcatgcagcactactaccaggctggcggcgccaatattgatgaactgaacgagcgcatcaatgactggcaaaaaacgctcggtagacgagaagcgctggcgcgccagtatcaacagctgatccataatctggggttgccgcctgacctgagtcagcaacagctagaggcgaatcagcatgaagccgaagcccgctgtgtgcagcttgctgatgatataaagctgaagcaggaagaggcttatcaaaaaggcgcgctaagccataacattactgtagaactgcgcgaacgggaaactgaacgcgccgagatcgcacgtcgtccggattctaacctgcccgcccattatcaggcatttcgcagcgaactggcgaaagcgttgaacgttggtgagtctgaactgcctttcgtcgctgaactgatacaggttaaaccggaagaggcgcaatggcgcggagcgattgagcgcgctgtcgggagtaacaggctgcgtattctggttgcgcctgaatctgcacaggaagcgctacgctgggtaaaccagcgcaacaatcgtctgcacgtgcgcctattggaggtcaagttaccgcactctcccgccaggttttttgatgatggttttacccgcaagctgttgtggaaagatcatccgtggcgagaggccgtcaaagcattactggccgaaagcgacaggcattgtgttgacagccctgaacagttgcgtaacacacctcacgctatgacggtgcaggggctaatgtctggtaaacagcgtttttatgacaaacaggatcagaaacgccttgatgaagactggctgacgggattcgataaccgcgatcgtctgaactttcttgccagagaagttgccgcgcttcaggagcagactaaaaccgcaaacgcggcatttgaggttgcgaaaggcgaggtggcgcttttgcaaaatcaggccatttcattccagaaaatacaacagattgattacgatagcattgatgttcccggcgcaaagagccaactggaagcgctcaaggagcggctggagaatctgatccatcctgattccgatgccagcgtggcgaaagcaaaacttgatgaggctcaaacggttgagtctgaatttgataagcagctcagggccgccaataaagtcactaacgggctggatacagagctcacctccgccaaggccgcagaacgtaaggcccagcaaaccgcgcaacaaggtatgcaggatgaagagcgagagttgtgtaccttacattttccggcggtgactctggagcaactgcctgacattcgcgatctggaacgtcaccatgagcggggaattcagcaagaaattgagggtgttaaaggtgaactgcatcggctgagtattgagttgaccaaacgtatgtctgaagccaaacgtgtggataccggggcgctcgttgaggcaggggctgatttggacgatatttctgtttatttacagcgtttgcaggagctgaccgaagaagccctgccggaaaagctcaaccgctttcttgactatctgaaccgttcatctgacgacggcgtaacgcaattgctcagtcatattgaacatgaggtgttagtcattgaagagcgtctcaatgaactcaatgaaaccatgtttcgggtagattttcagccggatcgttacctgcgtctggatacgaaaaaagttgtccatgaaagcctgcgtacgcttgaaaaagcacagcgtcagcttaataccgcccggtttgttgatgataacggtgagagccattataaggccttacaggtgctggtggcgcaactgcgggatgcctgtgaacgaaaccgcaccctgggggcgaaggcgttgctggatccccgttttcgtctggagttcgccgtatcggtgatggatcgtcagagcggaaatgtgattgagtcgcgtactggctcgcagggcggtagcggtggagaaaaagagattattgcgtcttacgtgctgaccgcatcactgagctacgcgctatgtcctgcagggagtcgttatccgcttttcggcaccattgtccttgatgaagctttctcccgcagctctcatgccgtggcgggcaggattattgccgcgcttagagaattcggcttacatgccgtatttatcacccccaataaggaaatgcgcctgctgcgtgaccatacccgttcggcgattgtcgtccaccggcgcggtcaggattcaaatatggcttcgctgagctgggaagagcttgaacaacacttccgacgacgggagaacgcgtaa

SEQ ID NO: 98877 - DNA, 750 bp, Enterobacter aerogenes
atggcgggcttttttgacagacagattaaccggagcgttaccgcaaatgcaggcagtgaaccagaaccatcggacgaagcggttgccgatgagtcggttgaggaaattgcaaccaatagcgaaatgcgaacgctgaaaaaaatacgcgaagcggctcaggaattgctcaaatacggcctgctggaagaggccagtaaacccaatctgtaccgcgttgtactggcccatccagaagaggttactcgcattctggaacctctcgatcttgatatcggcattgatgagatccgcggtttgctgtatgtcaaagtcaggcttgatgaaacgccagagcaggatgaatggtcccaccctctggtgagacggcaacggcttaacctggaacaatcattattagttgccatactgcgccagcattttgttgcctgggagcaggaaagtggaacaggcgccagccaggcgcagatcgctatcgacgatctcctccctcagctccagatttaccttggcgatccggggagtgaatcaaaagaacgcacccggttgcttaccctattggatcaattaaagggccatgggctggtcacgtcgccggatgcgcatgagcggatcgtgattcgcccgattattgctcatcttgccgatccgatgaatcttcaggcattactggcatggctacaggaccaagttgctcaacaaacctcccctgctgattcgtcagaaaaggagagtagtggggaggaagtatga

SEQ ID NO: 98878 - DNA, 1497 bp, Enterobacter aerogenes
atggaagaaaacacaaggcagcgtacggaaaattatatttcagcaaaaaaccagcatccagcctggatacttcttgctacccgtcgtgccccgttggtactgagttgcctgaaaacgctgtttgaaaaatcacatgatggcatcccccttgaggaagcgattcagtctcttaccggcattcttgtcgagcacgtgagtcaggaacagtatgacattaatcaggacaatccgtctcttcaggccagccgtgaactgcgggaatggattaaacgccgtttaattgtcgaacgggatggccgtgtctttgctaccgatgcgcttgaggtcgcgattacgtttgttgagtcgctggataatcgtttcatgacctctacggcttcccgtttgtccaccgtacagcgagaaattgaaaacctggaaacccggcttaatcctaatccggcaaaccgggttacaaccttacgtcgtcgtattgccgaactagaacgtgaattacaggaagccgaagctgggcatattgaggtgctggaaacgcatcaggcggttgaacatattcgagaggtcttcaacttagcttccagcctgagggctgactttcgtcgtgttgaagactcctggcgcgaggccgaccgtgcgcttcggcaatccattattggtgagcaatatcatcgcggcgatatcgtagaacgcctgctcaacgatcaggacgcgctgcttaatactcccgagggaagagttttcgacagttttcagcagcaactccgtcaatcctctgaacttaaggcgatgagtgaacggctacgtgtgatccttagccatccgtctgcttccgatgcgcttaaccgtctacagcgtcacgatttgcgctggctggttaaacgcctggtagatgaatcgcaaaccgtactccaggctcgcgcccgaagcgagcgcgatgtccgcggttttatgaaaaccggtcttgctgctgagcaccaccgcgttggtcacctgcttaacgaatttctaaaccaggcgttaaaactcgactggcagcgccagattgttcgcaaacaagaggttccgcttcctgctgttggtgtggcggtaacaggcgtccccgcgattgaacgtttacgttttaaagaggtggatgatgaagcggaacaaacgttggatctcagtaatcatgcggcggatttaacgcagattggcgatgatttctgggatgctttcaatggcctcgatcgtgaggcgctgattcagcagacgttgcaggttctggcaaatgaaaatcgccccgttagtctggctgaactggcggcgctgttgcccccggctcacgatcttgaaaccttcgccatatggattggcatggcgagagaagcgggcattgcggttattgattcacagcgcgaatttgctgagcttagtgatggggaaggtcgccgctggcgatttaatctgcccactaccggtctggaaagccaggcattaatggatatcgattgggagtaa

SEQ ID NO: 98879 - DNA, 330 bp, Enterobacter aerogenes
atgtctcaattcttttttaaccagcgcgccagcctcgttaacgacgtgatcgagggaaccattattgccagcccgtggaacaacctcgcccgcctggagagcgacccggcgatccgtgtagtggtacgccgcgatctgaataaaaacaacgtggcggtgatttccggcggcggctccggccatgaaccggcgcacgtcggctttattggtaaaggcatgctgaccgccgcggtctgcggcgatctgttcgcctcgccgagcgtcgatgcggtactcaccgcgattcaggcgggaaagcgcgccgtcttggctacaacgtggagatgctga

SEQ ID NO: 98880 - DNA, 162 bp, Enterobacter aerogenes
atgaaaatcggccccgctatggggccgatttcttcaggcggcgttatcttcatcctgcaaccgcgtttgcgcatcttccacgatggcttccaattcactcagcatctcttcatagccaaagccgattgggctcatagtttccacagcgactggctggtctaa

SEQ ID NO: 98881 - DNA, 609 bp, Enterobacter aerogenes
atgtctgaaggggagttaggccgatggatggatcaagtacgtgctggtatgtgggatgattcacatttagtactggaaagtatcgataggtttagccgtcaaaatccattccaggttgtcgggtacttggcagaactggatagacacaatattactattcatgatgtttcattgaatatgcttattaaccgtggcaatagtgctatgttgccaatagtcgctatgtctgctcagcgtgcgtatgaagagtcgaaaatcaagagtgaccgtatacgtgatggttggcggcggaagcgtgaacaagcattcaagcaaggtactatcgtcactaacaagcgtccacagtggatagatatagtagaagatagatatgaactgaatgataaagtagctatcgtgcgtgaaatttttcgtttgtatcaaacgggtattggcacacctactatagctaaaatgcttaatgaaagaggtagtgaatggttgtttgtttctggtcgcttgtggcgtggtgaatctattcataaactactacgcaataagagggtaactggttcaatttttattagtgaaattgtaaatagacccgctttagttccatacactttttga

SEQ ID NO: 98882 - DNA, 321 bp, Enterobacter aerogenes
atgcttcgcatggataatggtccggaatttatctcgctggcactggctgaatgggcagagaaacatacggtaaaactggaatttatccaaccgggtaaaccgacacagaacgctttcattgaacgctttaacagaacatatcgcacagaaatactcgatttttatctgttcagaacgctgaatgaagtgcgtgaaatcacggaacaatgggtggctgaatataactgtgaacgcccgcatgaatcactgaacaacctgacgccggaggaatatcgtcaacaacattaccagcccgggatctcaaaaagtgtatggaactaa

SEQ ID NO: 98883 - DNA, 963 bp, Enterobacter aerogenes
gtgagtacaatcaaactaataagtaatgttggaattgttgggtcacaaattatctccaaaagtaaacatggtgattcaacaaagtttgaaattactttgtctggtatttctcaagcacatagaatcccttctgtcattgtattttgtgaggataaagttgctgaagaattaattaccaacgctcttagttacaagggtatgaatatcggctcatttaaattcagacgctgtggctcatggtccaacataattatatccttagcagggtgtattctctactcagaggaattaataaaatctggcaactctaaagtattagaggcaataggggtaattgatggtgatataagtgaaaatgaaataaggcaagtaatctcagagacatacgaaggggatttcatccctgaacaattacaagacataattgattcaataagcagccgtataaccagctttaaaatacctactaatgttttatctaaaaaaaacattaaggggaaacctgagctaaatttaaaaaacatggtaaatgagatttccacagccatgataaaggcccctttcaataaaaagattgatgaattaaatgaatgggtagaaaaggcgaaagatgaaaattctaaaaaaagtctacaatttgaaattgatgatatcaccaaagaaatagatgaaacacaacaaatcattaaactatcgaaagaaattgatttcatagaaaatgaaggggtaaccaattatcatacatacttcaaaaagctaatgaaaaaaacagaaaacagatattaccataattatagcttcactcagaaccccatttatctggtatacagaataatttcaaagtttaataaaaaccgctgggaagaatatataaaaccagtcgttgattttttagattctgctaataaaagacaaacaaaaaactttagtcataatactttcaataacacaaaaatagattaa

SEQ ID NO: 98884 - DNA, 858 bp, Enterobacter aerogenes
atgatagaatttaaaccagaaattggaatgagaatttatattgatgaacagttagaacaatttggttttaagtttaataatggcttaacaacacttgaaaatttaaagactgtttttgcattacaaagaaggataccaagtgtcaaaagaagaatagtaatcgagctgccaggaattcaagtgcctaaggaaacagaaaaggcgtatgactcaatcagaaggaaacttacccttgggttatccataaagccacatctttctttaagcacttcgaagtacatatataatgatcttcttttaaactattggaatatccatcacttacatctttctgaagaaccatataagaaaggatactttaagcgaactggccccgttttattttgtatgttttttgataatgcagtagttcttatagacatcatgcctcatggaagtggacattcggatgtttgggttaatgaaaaactgataaaaaaactgcataaataccttccggaatctatagaacgttataaagtaaaaggtattagaggacataatttagattcaacacaacgcctggcgttgcaaaaaagtcattgtaattactcattgaaaatggaagatggaactgtatatcaacttatggggataatgtctaatggtgattgtttccatgatatacatagattaatgcatgttcaaagaaatattgattactttacaaaagtaatagagttaaatgaacaatcaataagtacttctttagaatccaacccttcagaaaaaatttcgttaactattagtttacatggtaaccaagtgaaattatacgcaatcgaaaagagggcaacacttgaattatccatgccataa

SEQ ID NO: 98885 - DNA, 837 bp, Enterobacter aerogenes
atgaactatcaggtaatcgcccttgatctggacggcactttattgacgccagaaaaaactattttaccagcctcactatctgccttacagaatgcccgtaaatccggggcaaaggttgtcatcgttaccggacggcactttgtagccatccatcctttttatcaggcattagctttgaatacaccagcaatatgttgcaatggtgctttattgtacgattacaccgcaaaaagagtgattgcttcagatccattacaaccagaacaagctacacaattagtaaacttacttgatagttacaatgtacatagcctgatgtatgccgataatgccatgttctaccaagaaccaacggggcatattatccgtacagaaaattgggctaaatcacttccagagtcacaacgtccaattttcaaacaagtaccctctcttagtgaagcatcgcaaaatgttgatgctatctggaaattcgcccttactgattctgatactgaaaaactacatagttttggtcaaatagtagagcgtgagcttggccttgcttgtgaatggtcttggcacgaccaagtagacatagcacaagccggaaacagtaagggtaaacgcttggcacagtgggtagaatcacaaggtttatctatgagccaggtaatagcctttggtgataatttcaacgatctaagtatgttgaagaatgctggcttaggtgttgctatgggtaacgctgttgatgaagtaaaagcctgtgctgatttagtaataggtaacaatactgagactggtatagcagatgtagtaaaccagtacttttctgaagaaaaaataacagcgtga

SEQ ID NO: 98886 - DNA, 225 bp, Enterobacter aerogenes
atgacctcacgcgtgatcgccctcgatttagacggcaccctactgacctcgaaaaaaacgattcttccggcgtcgctcgatgcgctggctcgcgcccgggaggctggatatcaggtgatcgtcgtaaccggccgacatcacgtcgctatccatcctttttatcaggcactggctctcgatacacctgcaatttgttgtaatggtacctatttgaataacggctaa

SEQ ID NO: 98887 - DNA, 1212 bp, Enterobacter aerogenes
atgctcaccaccatcatttatcgcagccatatctgcgacgatgtctcattcaaatcgctcgagtcgatggttgctgcggctaacgagagaaatggtcaggcggatgtcaccggtattttactttttaacggtacgcattttttccaactcattgagggaccggaagaaaacgtacagcaaatctatcgacatatttgcgccgacccgcgtcattacaatctggtggagcttctgtgcgattacgcgccggctcgccgctttggtaaggtcggcatggagctgtttgatttaagggaacacgatcgcgacgcggtactacagaacgtgctggataaggggacgacaaaatatcagctgacttacgacgaccgggcgctgcattttttccgtacctttgtcgaagcgacggaaaaagagaactattatgaaattccgtcagctgatagctgggattttactgctgatgagagctcgttttatccggccgtaccctgtatcgacggcgctgaatcatgctgttttgcttttcagccggtggttgacccctttgcctgcgaaataatctcctgggaagcgctgctgcgtaccgttgacggagaaccgcccgcagcctattttgccggtttgtcaggcgatgagatttacgtcgcggatctgcaaagtaaacgggttgcgctggccatcgccggtaagttaggcctgcgtgaacgtacgctgaccatcaatctactgccgatgacgctggtgaaagtggcggatgcggtgccattcctgctaacggaaattcagcgcaacgatttgattccggagcaaattattgttgaattcaccgagcgtgaagtgatttcgcgaatggatgagtttaccgatgccgtacgcaaattgaagggggcgggaatacgcgtcgctatcgatcactttggtgccggttttgccgggctatcgctgctggcgcaatatcaaccggatcgaattaaaattgaccaacagctgatccgcaacatccatcgtgacgggccgcgtcaggctatcgtgcaggcgattattaaatgctgccactcgctggaaattgccgtatcggtggttggcgttgagcaggcggaggagtggatgtggctggaggcggcgggtatttctcatttccagggaaatctgtttgccagcccgcgactgggtggtctgccggctatcgcctggccggggaaaatatga

SEQ ID NO: 98888 - DNA, 420 bp, Enterobacter aerogenes
atgtcgtttatttctttacgtcggccggtactcagccgcacggcttatttgactctctttgcctgttatatcggtatctttcttaacctggccttttatcgccaggttttcccgctactgccggtaaacaatctccataactggctggttttccttagcatgccgatcgtggcaattagcgtgatgaacatcatcaccaccctcgcctcgttcttaaagctcgaccgggtagtcatcagcctgtttattctgctgagcgcctcggcgcagtactttatctggaccttcggcgtggtgatcgatcgttcgatgatcgccaatatcttcgatacgacgcctgcggaaagttttgccctgctgtcgacgcaaatggtcatcgtgctgggtctctccgggctattgatggttctggtcgcctag

SEQ ID NO: 98889 - DNA, 816 bp, Enterobacter aerogenes
atggatctatactttaaccgtgttaaagaaattaattactaccttacaatggcgcagatagaagccaacgcattgtggaatgtggcgtcacaggtctcgagttttcatataggtgatgggctaacgcggatacgatttcttgatgaaattaaatcctttatagctacgcaattaaaatgtatcagactggcaaccagtggtgatttttgctttgagtgtattgcgaatttaaaaaccgaacgtgaaaatcttcgcattcaagatcgcatgttgaggactggcgaagcctacgtcgctgcagccgttaagatttatgaagaaaatggtaaaatcattggttatgtgattagtggtattggggtcattgctggcgttctccaggttgtcggtggcatatctatggcgatagggtcagcagggaccggtaacattattggcatagtggctggtgcaacattaatttttcatggtctaagtaattctttgcaaaatattgataaattaacgggagtgaaagatccaaaaaatattgctcaaaatgcctatatggggacggctgaatttctgggatttgagcgtaagactggaatgatagcttatcagggaatgaatctgataacttccgcctacggtatgtttaggccaatggttaaacctgaagcctggagattatatgattggttgcctgcagatttttatcgaaaaatctcaaccatgagtcgtacggcgctctcgattgaaattggcaaatcaacctatcagctttacaacatagggagaacgtatcgtactgatgaaaaagagtttactcgttaa

SEQ ID NO: 98890 - DNA, 504 bp, Enterobacter aerogenes
atgttaactcaaagtcttattaatatattcagcaaagaaatgatagggacggttatcgccgccttgcccatcataaaagccatcttaaattacttaaacaaacctttagatgatatcgatgatatatataaaaaagccaaattaagcacatggagaattcgctttttcatgatcaaaatatcgacaaaagagatacccagactgactcgcgcaaatgtaatattgttttccatcgtcttattatttcttttcggcagcttagcaatcagttcatattatagcgtaaagctattacaagtacgtccgggctggacatctttaattcttaaagaaacggatgagtggtttttaatctcgaaaacagaagcatcagaacacgcattcaatccctcatggcatctcacaggaaaaagctgtacctctggcgaggccacgcaactggtaaataaaaaaaataataacaccacaactggggagatttatttgcgaatccttcacgaatga

SEQ ID NO: 98891 - DNA, 984 bp, Enterobacter aerogenes
atgggtgagttcattgaagataatgaacaaaatgaaaaagacaatgaatcgttaaaagaaaattgtattaaaatgttggagaagtcagctaacattctatcagcagaacaatttgattatctattagaattaattaaatcggggcagttaggagaatttcgccgattatattgggagcatctatcacagcataaatcaaaaaaagaaatgtcggattcttttaaagagaataacagcatttcagaatatttaaacaacaaacctgaagataaattaatattaaagaaagagataaacgtccttagaaaaaaacttcacaacgctgaaaaaaacttagtaataaatgaggcacactcaagtaaccttgaattagccatgaaaaaaaaggattcccaactcgaatatttcagaacaaaagtcaatcaacttgagacatcaaacaatgagttattaagccgcgtacaacaagaacgaattgaccaaaagattcctggctatgttgaaaacgtcaaaaatgatttaggttatgatgacgagcactttatactcatgtctaaagtatgggctgctattggcggtgtatttggtgttcttgccgttgtattttcattcatatcgatgtatatcacgattgactttaatacatctaaaggatttgaattattctatctctttactagggggttaatcggaatttcattactttcatggttggcgtacatttgtttaagtaactctaaaaaatacacgcacgagtcaattcgtagaaaagaccgaaggcacgcactaatgtttggtcaggtttttcttcaaatttatggttcaacagccactaaggaagatgcggtactggtattcaaagattggaatatgtcaggggattcagcattttcagatcaaacagagcgtccaccgagtatccagactctttgggatgcagcaaaagaaaaacttaaagcaacttcggacaaatcctcaacttag

SEQ ID NO: 98892 - DNA, 993 bp, Enterobacter aerogenes
gtgacaaaaacttcacaaaacggagaatgggatctcaccttggttatatcaatcaaaaaaaacacaattcaccatgccgacgacaccctgaaaacttcaattatgaataatcgaggagggcagaaagtcatcgagcgtatactttctgcctatggatttacatcgcgacaggcattttgtaaccacctaggcatatcacaaagcacgatggctaatagatatgctcgtgatacttttccagcagactgggtgctgatctgcagcttagaaacaggtgcttcagtagaaaggttgttctctggaaaaagtgctaccaaaacggatagttctcctgttaaagaatcatcacctttactgcaaaaggatcttcaatgtagtgttgtctctttcgaccaaccaaaccaaaagttcccaattgagattaaaattagaactaacgaaggtggcaaggccgcaattgaaagattagttaatgcatacgggttccaaacgcgaaaaggattggcagatcatttgcgtatatctaaaagtacacttgcgaataggtaccttcgagacacattcccaagcgactggataattcgatgcgccctagaaacaggtgcctcacttctttggttaacaaacgggacaggacctaaactctctaatgctttccattcagtatcttttattaagaagcagcaattggctaaaggggtattgcaggatgaaggatacattgcaatcgataaaagtttattagccactggggtaaaagaatcaattgcaatttcattcgataatgcaatttacatagttgatactaattttaatgagatctcagacggtgactggttagtggaaatcgaaggtaagttccatataaaaaagctcacccgtaaacctgtaggaaaggtcatagtaagcggcttagactcaacatttaagtgtcagcttaatgaattaaagatttttgcaaaacgccattctgttttcatcaattataattag

SEQ ID NO: 98893 - DNA, 222 bp, Enterobacter aerogenes
atgacccctaacatttcaatcactctgaacacacctcgcgtcacaattgaacgctatagcgaactaacagggctgcctgtagacactattaactacatgctcgctgaaggtcgtctgcctcggcatcgtctgcgtaaggacaagacgtgcgagaaggtgatgattaacatcgtcgcgttgaccgttgatgcgcactgtgattgcaatgtcgttattaattag

SEQ ID NO: 98894 - DNA, 225 bp, Enterobacter aerogenes
atgtttgactatcaagtttcaaaaaatccgcatttccacgaaggcggccgggcttttgctctacgtcataatatggcgaagctggctaagggagcaggtatgaatgtccagactctgcgaaacaagctgaacccggaacaaccgcaccaactgactgcgccggaaatctggttgctcacaggtcttactgaagactcaacgcttgtcgatggcttccttgcatag

SEQ ID NO: 98895 - DNA, 126 bp, Enterobacter aerogenes
atgaaaaagaaactgatcggtgggttattctcggtgctgtatacggcgctgatgatttttagtctttttgtcccaaacagtattgttccggcactggttacagcgttgacctgggtatcagcctga

SEQ ID NO: 98896 - DNA, 261 bp, Enterobacter aerogenes
gtggctgagctgcaggaagttgacgcctggttagatgcgttgctggcgggactggagcctgtcgcacgtaagcgcattatgcgggagctggcgcagcagctgcgccgcagtcagcagaaaaatgtcaggatgcagcgcaaccccgacgggacggcttacgagctgcgtcgcgtgacggtcagaacgaaacagggccgcatccgtcggcagatgtttgaaaaactccgcaccacaaaatacctgaaagccgtcgccagctag

SEQ ID NO: 98897 - DNA, 1503 bp, Enterobacter aerogenes
atgggtactttatcagcaggggttgattcaaaatctacgttacaacttctacgacttggtcaatccgtagcggagtttgatgattccttagagaaatattttattgaaaatcaagcttatcactctttaattaatgatagagctgattttattgcaggagacaaggggacaggcaagactgcagtttatagaatattgcaaaaaagatattccataacgccagaattgaaaaatgtagaagtaatagcaggctttaatcctataggcaatcctgtctttcagcgtcttgtgcagcaggatgttaatgttctgactgaagggcaatatgtaagcgtttggaagacttatattttatcgttaattggtaattggcttattgatatagttggtggagattattccgaaaacttaaatcaattgcaaaaacttcttaatgaaacaaacttattgagcaaaggcaataaacctgaaaccatttttagtaggatagttaactctttaaagaaaacttttagaccggatacttctgaaacaacatttacgatatctgagactggtttacctatagtatctcaaaaatttaccttcggggatgttggcaagagtgaaagcgctaaaataagagaggtaactcatgaagaggcatttgatttattaaatgattgcttggttgatgttggctattcggtctgggttgcgcttgatcgtttagatgaagcatttcaagggtaccccaatattgaggtgcctgccttaagagctctattaagaacatatctggatttattagctttcgataagttaagattaaagatatttgtccgcaaggatctatttagaaaaataattggggacggttttgttaatctaacgcatataaatgctagaaaggtcgagattgtttgggatgaagcagatttattgaatcttctgtctcgtaggattagagatagttctgacttcattgaaacattggaggcacaggcagattctgatgaaactctgttttataagattttccctgaaaaggttgatgccgcagatcgaaaaccaaccacttttaattggataatgtctcgtataagagatggtaatgatattagagctcctcgaaatttaattgatttagtggggaaagccacagaagagcaaatccgtgctgactcgcgtgtgtcaagggtaataaaggcaggtgaacgattgataatgtctgaggcacttaggaatgcgttatctagattaagtgatcaacgagttcaggatacattgcttgctgaagttggaccagagatatcagcatatataaataaatttactacggaaaaagcagagcataaccttgaaactctatcgggaattctagagttggaaggagaacaattacaatatgctattaaacagctcatggagacaggtttcttggaggaaataaaggacacttggaaagtaccaatgctctatcgcgatggtttaggtataacacaaggtaaagcattcgcttaa

SEQ ID NO: 98898 - DNA, 267 bp, Enterobacter aerogenes
atgttgtatcattattgcgattttgggaaaaatggcgcgagcgtaaaaatgatgatttgcccattgtgtggaagtgcagcccatactcgcagcagtttccaggtcttttcaatgaccaaagaacgttacaaccagtaccagaatatcaactgcagccatacgttcctaacgtatgtggcttttgtgcgctcaatctctacacctaaagaggcccatcctgtgcagcctcacccctcaaacttaggtcaagcagcactgattctttga

SEQ ID NO: 98899 - DNA, 492 bp, Enterobacter aerogenes
atggtgaatacattaacggcaggccgcatgagtcgtagatactgttatcggtttgcaacggttttggtccgggaaaaacatgtgctttgtgttaatttaaagcctattgcgctcccgatatttcttctgcgttatggtactcatggcgcagggagcgcacagggggcggccagtcgccgccgccccctgtacccccgggctctggccgccaaaatcgccacttcgtggtaccttcgacttatcccggcaggcttcgggtcgggccgaggcagcgtccgtgcaaaacacggccctcagcccgcatccatgcgggctgccccgacctgccgggaacgtctcagcgattttgaggccgccaacaccggcagtttcagccagcatggtgaatatattaaagacaggccgcacggaccgtggatactgttatcggtttgcaacttttttaaggttttttcccggaggcggcgcgctgcgccttctccgggctactaa

SEQ ID NO: 98900 - DNA, 237 bp, Enterobacter aerogenes
atgcccggcgcttcgcggtttggccattcctgcttcaccaccatcagcattatgttcgggcagagcttgcggcctgacaacgatctgatgtttggcgacctctttcattctgccacccgtaatcttccctttggtatgggtataaatatcggctcacaggttacctggaagaaagccaatcaaaacttttccctgtctgtatttatgaattcgctgcataggtcaaatcagaaatga

SEQ ID NO: 98901 - DNA, 1173 bp, Enterobacter aerogenes
atggaacatttatcagaagtaggtaaaagagtagagagattgctttactcaagtgtgctaataattttagctagtttctttttttattttttatcatcagcaattacattagataataatggtttaaagaaaaccatgcttacaggttttattgagggaattaatgaaagcagagaatctctcgacgttgcaaaagtacttcagggaaaatataagcagtatgtggatgataataaaaagaaaacagatgcacagaaaaaagaggaagaggacaagaaaagacttgaaataaagaatattaacaaaagcagagtcaaactaggcttacctgaaataaatattgagaaaaaacttgaagaaaaaccaagttcgtatgacgaccttgatgttaaaaatataaatttaattagaagtaaattaggacttaaaaattcattgtctattgaaggggcaaaggatgtatataacgaattttattattcattagtttacaaaaatctttatggggacaaggatttaataaatacctatctaagtaaagtcgatttaccaataaatgaagtattaatagatgccaaaaatagcatcaagatttttgatagtggttcagttaaagtcttcgacgtagatactccaatacagatacctttttcattaggtgatatgaaatcaaaggtttcattatataatattgaaagtgttggaataatattcatgccagtactgctagttatatggattggttctctctcaatgacaagaattagagaggtttactatataaaaaaggtgaagaatattgccaagtcataccctcacatcttaaatatttattattttatcgacagggatatgcttgaaagccagaaggaaatagatgatttcaaccgaatgagaattggagatcctgcaacaataaaacaaaacagatcgatttctgtaatatgctttttatttagagcgggtgtgatattgacacttttattactaatgaccgctcctttttatttaggtgcgctcagaattttcaatagtctaaacatctttaacttaatgatattgtttgtgtgcggttttataaatatcattcaatcaatgtcattgctagttgctgagttctctatttttcgaaaaatattctttactgaaggtcaagctaatgaatatatttaa

SEQ ID NO: 98902 - DNA, 348 bp, Enterobacter aerogenes
atggttccaatccaagaagttgattttcacacggataaaaaaatcttctacaagctgcatattatttctccaacaagaactgcaccattttttacagaggtgtttgtttacgactctgaatttaatccaccctttgtatcaacggttacttttcatcagcagtttcaggattccaaagccgcgtttgcttatgcgcttagttgggtggatggctacagtaaaaagcatggttacacggtcaaccagatcaacaatccatgtaactgtgaatttctatcacaagctgatcaacaacaatcagtccaaagtgccgggctcaaaatccaagttaaagtaaatggggcataa

SEQ ID NO: 98903 - DNA, 813 bp, Enterobacter aerogenes
atgttcagtgaattagaaaaggaatttcataaaaaagggattcctacagataaaccagatttttatgatcatccaaactttattaaggaagagcaacgagatccaagctacttgattaagtttgcaaaatttgtagcagaaaagtcatacactaatgaatatctagaaaaggcagagcttataatttctgatgtggcaaaaattttaagcaaacagctattagataatggtcgtcaaggtgcttgtgtggatatatcaggaattcttgctcgtatactggaacgtaaaggtatatggtgtgcttgcattaaaggctcttgcacaattgattttccaaaaaagtctaacgaggaaacaacatactactggtcatcagaccatggtgaatttaccgcaggacatgcttgggtatttgctccaccattctctatagtggatatcagcttgaagcagcaaccatacacaggtactaaaaaaaactatatccctgaaattatcatggtgaaaaatgctgtcaaaacaacatcaactatagaagacattatcagtcctgaaatcaggatgctaatgaaagctcaaggaattccaaagcatcttatgctaaagtatggcgcatccgagatgaatctcatccaagaaatatttcctgcccaactgatagaacttaatgaaacaaaattcaagttttcacctgttgctgttcatgcgtctacagagtcattgccgggtatgaaaaacatgaagtttaatggaatgtatccttacgatatgtacaaaaaaactataaaagataaagtgccaaatattgtctaa

SEQ ID NO: 98904 - DNA, 1020 bp, Enterobacter aerogenes
atgacatcaaaaattaaattaatagtgtttacctctattgctttgttgactggttgtaaggaagctgagatcgagggggtatggtacggttcagataaaaatttcaatagtggcattatcatgtcgttattcgacgaggtaaaagaagagcttgccggggaacaaattattatatcaaatttaaaaaccgaggggggatctaacacttttttggtaaccttaggtgaaaaaaaacattctaaagaatgggttgaggaaattcttaaaaaaattgagcagcgacgaaaagataataagaccactataaccttatcgtttactgatgtaggcgatgggaaagatgagaacgaaaaaatgttgctctcagttctaaaagaattaaaaatggaacaaacaggaagtattacttcagagattaaatgggaagatgccaaggtaattgtctacacacaacaattaagtattatggggcacacagatccttatagcaactttaaccctaaggtatattgcgaattaaaggttcctttaacaaatgaactgtctgggttaactatagatgcgccactaccagatatcacacccgcggatattccagaaggaatacgtcactcgatgacagacaagcaaacaatagattatattaaagaaaaaaatgaattaagacgttatgtaaatattggcatgcaagttaatggtaataattatccgaacaaagcaacatttagtgacgcttttatgaatgagctatcccaggataacggaatttataattctaatagattatcttactctctggattacggaaatatacatatcgcttatggtagtatccctgatgccaacttcgatcctgtttacggggctatgttaggcgatgtaagcggaaaacttcatcgaaaatgtgacgatatgataaaaaaaatcacgccagcacttgataagaaacgagcggatgccctgaaatttgcaaatgttggtaagatggagatcaaccctgagtggaaaccagagagttaa

SEQ ID NO: 98905 - DNA, 2124 bp, Enterobacter aerogenes
atgacgattccaacgccaaaggtggcactttctgatggttttctgggggcttttgcgcggattcctaaagcgcagcaaaaaaaggtccaggaattcatctccaagttccgccaggatccgacgagtaatgggctgaactacgaaaagatccacgatgcacgcagcaataatgtgcattctgtgcgtattgaccaaacctaccgggggatcgtcctgaaacctgagcagggtgctctgtatatgctgatgtgggtggataagcacgacgaagcctacgactgggcgcggcgacacgaatgtgcgattcacccggtaaccggtgcgattcaggtgattgataccagctatatcaaacctacccccgagccgaccgttgttgataaacccaaactctttgctgcttatacggcagagcagatcctcgcgctgggcattcctcctgtgtttattgagcaagtgatggctcttgtagatactgcagggctgaatcagctggaaagtgtgatgcctgcggaagcctgggaacccctacactggctggcagaaggtctggattaccaggaagtgctggaggagtttaacgatcaccgtgatgagcctgttgataccaacgactttattgaggcgatggaacgaagtaaacgtcgtttccatgtcgttgaaaatgaacaggagctactgcaaatgctcaatgcgccactggaaaaatggcgtgtattcctgcacccgagccagcgaaaactggtggagtctccggcaaatggtccggtacgtgtattaggtggtgcaggcacgggaaaaacagttgttgcgatgcatcgtgctcgttggttatcccaacgcctggccgataaacccggtaaaaaagttctgttcacaaccttcacccgtaacctggcggcggatattcgcgccaacctccagcgtttgtgtagtcgtgaggagatggcgcgtattgaagttgttaacattgatgcctggatgagcgagcaactaaaacgccatggatatgatttccgcgtggtgtatgacagcgatgaagggcgacgtaaatgctggaactatgccttgcagcaagtccctgctgaattgggattaccggataacttttattcagaagagtggcaacgtattgttcagccgaatgcggtttacagtcgtgaagaatatctgaaggtgagccgtattggtcgtggcacggcgttatcacgtattcagcgtgcgaaaatctggcctgtgttcgaagagttccgggcacaaatggcgcgtgccaaactgcgagaaatgggtgatgccatgcatgaggctattattctgtttaaagaaaaacaggtgcaattgccttatagcagtatcgtagtcgatgaagctcaggatataggcgcaccggcctttacccttattcgtagcttggttccagagtctcctaacgatctttttattgtgggtgatggacatcagcgtatttaccgcaataaagtcgtgctcggtcagtgtgggattaatgttcgtgggcgtcgtagtaaaaaactgaaaattaactaccggactacagaagagacgcgacagtttgctgtcgggttattaaccggcgttaaggttgacaacctggatggtgaaactgattcctgcaacgattatttatcattgcttcatggtgaaaaacccatgattactcatgcttcagattttaaggaagaggctgagacgattattaagcaaattcaggcgttgttagccaatgatgtccgttcccaggatatttgcattaccgctcgtacgaagcatgcttacgagcgttatgcttctgctctgaatgatgctggaatcgagacctataatttaggtcaggatagtggtgatagtgatcaacgccctggtgtgcgtatggcaactatgcaccgcattaaagggctagagttccagtatgtgttccttgcgggtatcaacgatggcgtcgtgccggaagtgaaagccatatcatctgacgatcctgttgaacaacgtgatgcattatttaatgaacgtgcgctactccatgttgcagcaacccgtgcggtaaaagggctgtttgtttcatcttacggtaaacctagtttcttactggagcctgaaagcgagtaa

SEQ ID NO: 98906 - DNA, 6342 bp, Enterobacter aerogenes
atgctgccttccgttgtcagtcggcaggttgccgacagtgttgcttcctttttacgggcagccttcccgcttaacagcccgctgtttaacggtgaagaaaacaataacgtctcgatgctggagcaatttctggcccagccggaaacgctgctgaaaggtccgtatctttccgctcaactgccgtttcgtaaaagtgacttatcgctgaatttctttcccaacctgacgctgccgttcccaccacatgcgcatcaggcgcaggcgttccagcgcctgggtatcgaggtgcctcagccgacgctggtggcgaccgggacgggttccggtaaaacggaatgttttatgttcccgctgcttaaccattgtgctggggcattagaggccggtgttaaagcgatcatcatttacccgatgaacgccctggcaaccgatcaggccagccgtttcgctaaaaccatcgccagcgatccgcaactacatggcaaagtgactgtcggcctgtttgtcggcgacagtgaaatcgagcccagcaaaaagatgtctgcggataaagtcatcacctgcaaacataccctgcgtgagaacccgccggatatcctgctgaccaactataagatgctggattacctgctgatgcgccccggcgatcagaaactctggcgttataaccagccagggtcactgcgttatctggtggtggatgaactgcatacgtttgatggtgcgcaggggtcggatctggcctgtctggtgcgccgcttaaagcatcatattggtgtcgatgacaagcgttttgcctgcgtggggacgtcggctaccgtaggtgacgaactgggacaactactcgattacgcaaaaacgatctttgatcagccatttggtgatgacgcggttatccgagaagatcgttacacggcggcagagtatctgcagggttataccattgagtacagtcagtatccgggccaggagaccagcgttgtgctggatccgcaagcgtacgccagcccggtagactatctgaacggacaaattccgctgtggttcccggatagttcactgcaattacctgccgatctggacagcgatctcggacgtgaaaagcgtattgagttgggctcattgttacgtcgccacagcatcctgcacgtactccttgaggatttgcaggggggaattttgtcggaacagcagtgcctggaaaatctccaggtgatgctggcagaaagcgccgggcatgcaacccgcgtgctgcaaagcattctggcactaattgcccaggcacgcctggaggttccagaaaaacaggacgatcgggaaaagcgcctacaggcgaataaagcacgtcccgttctgccttttgtgcaactacgttctcagctgtggttgcgcgagatgcgccgcctggttgccagcgtgtcaaaaacacctgagcttgtttttgctgatgatgtcgcggtggaagatcgcgaacattaccttcccgttattcactgtcgtgactgccatgctaccgggtgggcgagcctgcgccatggtcagagcgttcaactcgaaactgatctggacggtatttatcgtcagttcttcgaaaaaggccgttctattgtactggccttcccggataacaacgataaacctgtcagcggtgttcaccagaagctgtgcccttcctgtttaaagctcaataagcaatctaacgtgcagtgcgggcattgtggccatactggtctgctacaagtacttatcccggatatgctcaaagagcgtaaggatgagctggaatttgccaacgaatgcccgtactgcaacagcaaacagggtatttcgattcttgggtcacaggcagccagcctgtcggcggtgatgatccatcagctttatggcagccagttcaacgaacataaaaagctgattacgttttctgactcggtacaggatgccgcacaccgcgccagtttctttaccgcccgaacctggccgttgatggtacgcggacaaatcgccagcgtgttgggtgaaaaagaaacgttaccgttggatgcctttgcggcacgcgtctgccagcagacgcgtgaacgttcaccggatgatgctcattttaccgcgagcttcatcgcgcccaacatgcagtggatgaacgattaccagacgctgaagaacgaaggccagctggcagagagttccgatttaccggagctggtttctcttcgtctcgactgggaggtatacagcgaatttaccctacgcgcacgaattggacgtacgcttgaggccacgggttacgcagctgcaggaattgatattgcacgtttcaattcagcgataacggcgcttcaccaacagcttgtcgaagagctgggtgatgaaatggtgggggtcagcgttgagcaggtggcacacctggtgattggcgttctttggcatcagaggcaggcgggagctgttctgcatccggcgttcgaaagctatcggcgtgagggtaagacctttatgatgacgcagaaggagcgaacttcacgctatatgccatctattggtccgaaaacgcgtaaaccggcctatgcctcgtttgaaaaaataaatggcttccatcgattgattggtgcgaaatccaaccccagctggtatcagcattggatcaatcgcacactcagcaacggtaataatctgtttatcagcagcctggccgagacggttttacgacgtctgtttgcggcactgaaaatggccgggttggtaaaagattttgatacaaaaggcaaagaagcatgggggctagtaccttcggcgctggtggtgagccgcgatgttgttcagctaaactgctcttgctgtcgtgaggttgttcgggcaccggccgatcaggggtggcactggcgaaacgcgccatgtctttctctgcgctgtgaaggccgctatcaggaaactgaaaatacagtgacctggcactgggataatatggacatcgctcgtgttcagggggcagagcataccggattactgagccgtgaagatcgtgaggctacggaacaatcgttctaccgcggtaatcagccatggaatatcaacctgctttcggcaacaccgacgctggagatgggtatcgatgtgggtgacctttctacggtattactctgttctgttccacccgcgcaggctaattacttacagcgtattggtcgtgccgggcgtaaagacggcaatgcacttaacatcactgtggctgaggggaacccgcacgatcagttcttctttgaagagcctctggagatgatgcaagggcaggtacaggcccctggtgtgttcctgaacgcaacggctatcctggagcgtcagctggctgcattctgcatggacaactgggtgaaaaccggcgtcccggcatctgctatcagcaaaaacgtgaagcagatgctggacgagctggagtttggacacaagtctgggttcccttataacttcctgcgttatattgatcagcatcatgtgtatattgctcagcagttctcatccatcttccctgatcttacggaagacactcgtctacagttactgtcatatttgcaaggggcaccagggcagcgttctctggttcaacgtatcgaacaagcattaaaactgctggtggaggatcgcaaatcgttgcgttcccgaattgataaactcaagcgcagtatcgacaagctggatagcgacccgcacgatcaaaactttgacagcgatatgcgcgagttgacttcggaacgtcaggcgctaatgacgctggtgaaccagatcaataacaagcaaacgcttaatttcctcaccgatgaaggattacttcccaactatgccttcccggaggccggtattacgctgcgttctgtgctgtggcggcgcaaggacggtggggaaacgcgtgagtatcagaacacgacctacgaatacgaacgtccggcttcaacggcgctggctgagcttgccccgttgaataacttctatgcgggtgggcataaagttgaaatcgaacagattgatctgaaagtgtctgagcctgaaaactggcgtatttgcagccactgtaactacagcgagaatatcgatcagaccggcgatcagcataaatactgtccaaaatgcggcacaccaggttgggctgatgccgggcaaaaaacgacattactgaagcttcgtcaggtttatgcccgctcaagcgcgcgtgacagccagatcagtgatgagagcgatagtcgcgaaccggcattcttccagcgacagctactggtcagcttcgaaaaagaggatgtatcggccgcttatgctattgatgaaggagaaatcccgtttggctttgagtttttgagcaaagtgactctgcgagatatcaactttggcaaaatggcggatgatgccaatgagctgatgatcgcaggagaggcaaagaaacgcaccgggtttaaagtttgcctcggctgcggcatggtgcagcgccctcgagatcatgaaccacgtcatgacctgagctgtaaatatcgcgctgaacccgaaaaagcgaagtttgaagattatctctacctttatcgccaactggaatctgaggcattgcgtatcctgctgccagtgaccagctacagcaacgatcgcgtggtggaagcctccatgggggcagccattcagcttgggcttaaacattacttcaaaggtaacgtggatcatctgaaaggcgtggtgtatcgcgagccggaaaatgagggcgaatcctggcgtcagtatctggtgatttacgacaccgtaccagggggaaccggctcactcaaagaattgatgcgtacacctgacaaccttctgaaattacttgagctggcctacaaggcgctagtggaatgcagctgcaaccatgatacgcataaagacggctgctatcgctgtgtttacgcttaccgtgaccgcgggcgtatgaagtatgtatcaagagatcaggcgcgtctcttactggcgaaaatcctgaaggccagtgctgctatacgcgctattgattccatcaaaaacatttcgcttgatgccatgatggggagtgaactggaaaaacggttcattcactgcctgcaggataacaaaaatcttctcgtgagccggagttatgcccatcagaatgcaggctggattattaatacccgtacagaaccggcgatgagctggcatctcaaagcacaggttgatttaggggttaaagaaggagtaggcatccttagccgaccagattatgtgctctatcctctgatgcagtcagaaaagataaaaccggtagcaattttcctggatggttttgcttttcataaagatagcgtgtcggatgatgtccaaaaacggcaggcgattaaagacagcggtaatttttgggtatggacagtgacctgggcagaccttcaagaacaaggtattaaacatgtacagaatgttatggggcttggtcataacccggatatgaaacagcctaagttttataacccgttccatgatacaaactttgctacgcttgaaggttcattcagggagagaaacagttttgcactgctactcgattatctctctgatcccggtaataaaactctgctatggcagaaaatggccgctgcctttgcttgggtgtggctggatcctaaaaagtcgcaggataccggagccaaacaaaagtatgcctatgaaatgcaggagaacgctcccgcttatcggttgaatgcacttttgcctgatgaaccttttgtatttggaggtttactggatagctgtagttcatcacaacagttcattgagctggcagctgttgtaccgcaacaagccattaaatcaacgacaagcattgaacaaatgcgaaattggttgaggctgcatatttgctttgacgatcgttatccccaggataatggctatgaagccggatttaatggtttctggtggatggtgaatttactgcagttcctgccagatatgacattcaccagccgtaaagcggtccatttaccgcagaagcctgaagcggtaaaaatgcagacttcggtggtagtggatattcagcctgacgagagctgggcggatatacttgagtttggtttattgagcgcagaagaaatcgctttgcttcagtcgttatcgcttccggcaccgacagtcggatatgaattacaggatgacgatggcgaaattattgcggaagccgatctcgcctggccattacaaaagcaagccctgattatcgataatcagagctttactggtttattcgaaagtaagggttggcacgttgctttcgggccaattgacgaaaatacattgcagcatctgtccggaggtgacaaatga

SEQ ID NO: 98907 - DNA, 4902 bp, Enterobacter aerogenes
atggcgctggtcggtattaataacgaaaacgagttttactctaaccactatttgggcgaagtctttaccagcgacattcgcgatgtactggaaccctggattaaccaggaaaatgccgcccgcaacgctgagcgcgctgcccgtgaacagggtaaagacccggagcaaggatatcgtgctccatgggaacaactaaagagtttggctacagagtttttccgcaaacttactgaacatgagaaacagcgccagatcccgcagcgtcttgccgatcagcgcagtcgctggcagccgctgttaaaggcattgggttatgaactcaatctgcatattcagatgctggatgacgatacgcctttgccggtactggctcgttacaacagcaccgacggcagtccgtggctgtggattgttgaagcgcatgatcaggaagaaggaacgctggatccgctggcgctgtcgttactgaccgcgcagttcccggcagataccgataaacataagcgcgacagcctgcgtaaaaaagcgaacggtgaatatcgcagctggcaggatctgctctccacggttgtcttcacacaaaatgaaccgccgcgttttgtgctgctgcttggcaaccgccagctgctattgctggatcgtactaagtgggcgcaaaaccgcctgctgcgctttgattttgaagaaattttaagccgtcgtgaaacggatacgttgaaagccacgtcggtattgctacacaaagattcgctgttacccggcagcggtgcgccatatctcgattcgctggatgacaattcgcacaaacatgcgtttggcgtgtcggaagatctgaaatatgccctgcgtgagagcattgagctgttgggtaatgaagcgatgcgttatctcatcgacaacgagctggcttattataccgggaaacgtgctattaacccggatgagttgagccgcgaatgcctgcggtatatgtatcgtctgttgttcctgttctatatcgaagcgcgcccggaactgggctatgcgccgatgaccgccaaaacctatctacagggctacagcctggaaacgctgcgcgatctggagatgatcccgctgaccagcgaagaagatcgcaacgggcgctacttccacgatagcctgaatatgctgttcaaactggtgcgtgacggctacagcggcggcgtgaaaatgcagagcgacctggagagcggcgaccagatcactattcacagccatcagttcagcgtgccgcgtctggaaagtcatctttttgaagcgaataatacccgtattcttaaccgtgtggtgttccgcaacgaaaccctgcaacaaattattcaggcgatgtcgttaagccgcccgggtaaagggcgttttaaccgccgcgggcgtatctcctatcgccagctgggtatcaaccagttaggtgcagtgtatgaagcgctgctctcttaccgagggttctttgccagtgatgacctctacgaggtcaaaaaagccggagaagagtttaacgagctggagacaggctacttcgtcagcaaagacgagatcggcaaataccacgacgacgagaaggtttacgaaaaagacggcagcctgcgtattcaccgtaaaggcagctttatctatcggatggccgggcgtgaccgcgaaaaatccgcctcttactacacaccggaagtgctgacccgctcgttagtcaaatatgccctgaaagagctgtttaaagagcaaattgatccgattaccgatccgcacgccaaagccgacgccatattaaacctcaccgtgtgcgaaccggcgatgggcagcgcagcattccttaacgaagccatcaaccagctggcggaagcttacctgttccacaaacagcaggcggaaggtcgccgtattcctcaggatcgctacacccaggagctgcaacgggtgaagatgtacattgccgacaacaacgtattcggcgtggacttaaacccggtggcggtggagctggcggaagtgtcgctgtggctgaacgccatcagcggcgatgcatttgtaccgtggtttggctaccagctgcactgtggcaactcgttggtgggcgcacgccgtcaggtgttcaacaagagcgagctgacctacaaaaaagcgaaagatccgagctggcttaacagtgaaccggccgagctggcgatgaatattccacgcgaagagaagcagattttccacttcctgctgccggatagcggtatggccaactacagcgacaaaaccgtcaaacagcgctatccggatgatttcaaagcgctggacagctggcgcaaagagtttaccaacagctttgcaccgcatgagattgccgatgtgcagcgcatcagcggcaaagtggaagcgctctggaacacgttccgtcagcagctgaaagctgagcgccagaaaaccgccgacaattatccggtttggcctgcggaaaatatgaaccaagcccgctcttctttaagcagcaaagatgaaaccttcagcggccgcctcgaagataacagtacctatctgaaactgcgctgggtgatggactactggtgtgcgctgtggttctggccgatcgacaaagcggatgaactgcccgatcgcggtatgtggctgatggagatggagactctgctcgatggtattgtcgtcacggaaagagtcactgaagtcgcagaacaggccaccggcgatctgtttgccgacgagggtatggtgcgtgaagagtcttcgctgttttccggtgctggtcgcctgaaaaccgatgtgttgttccgccatttgccgcgtctggcgattgttgatgcgctaaagaagcagcaccgtttcttccattgggatctggaattctgcgatctgttcgccgagcgcggcggctttgacctgatgctcggaaacccaccgtggttgaaagtagaatggcaggaagctggcgtgctgggcgattatgagccggagtttgtgctgcgtaagctgagtgcctcgaagctggcgacgttgcgtatggatacctttaaccagattccggcactggaagatgcatggcgcagcgagtatgaaggctgtgaagggatgcaaaacttcctgaatgcccagcagaactaccctgtactgcgtggtgtgcagactaatttatataaatgcttcctgccgcaggcatggcgtttaggatcgcagaatggcgtggcaggtttcctgcacccggaagggatttatgatgacccgaaaggtgggcagttgcgtgcatcagtatatctgaggttgagggcgcattttcaatttcagaatgaaagagctctgttcccgatcggtaaccgtaacaagtttagtattaacttgtatgcaactacacctgcgacaattgggtttagtaatatagcgaacctctttatgccacaaacgatcgatggctgttttatgccttcagataagatcgtaggtggcattaagaatgatcaggatgaatggaacctagagggacatccggatcggttactgcacattgatgagcaattattagagctcttttcgcagctttatgatgaagaaggaacgccaggtttcgaagcccgcttgccagctttacatgcaaaacaattgattaacgttttgaggaagtttgccaatcagtctaaacgtcttggtgatttgcaagggcaatatttgtctttggaaatgtggcatgaaacgaatcaacaaaaagacggcaccattgaacgtaatacgcagttcccaaaagatgcatcacaatgggtattgtctggccctcacttttatgtgggaaatccgctatataatacgccgaaagtgatttgcgatacgcataaagcatacgataacctcgatctgctaactctgcctgatgactatctgccacgcactaactatattccggcatgtgatgcgcaggagtattccaaacgtactccacgcgttacttggactgaaccgggtgaagatgaaccgagaaaggtgacggattattatcgttacgttgccagaaaaatgctgagccagtctggggaaagaactctaattccaacgcttataccacctgcagtagggcatatagatggttgtttttcggcggttttcagcgatactcatcgcctgacattatttacaacggcatcactgtccattgcatttgatttttgggttaaaagtactggtaaatcaaactttagagatgaattactaaaactgatgcctttggtctgcgaagctggaaggcagttagtcgcacgtggcttaacattgatgggtgtaggtaccgcttatgctaatctctggcaatcctgctacaccccagaattcaacacccaacgctggagccgcgatctcccacagctccctcaggatttcttcgccaacctgaccccggagtggcagcgtaactgcgctttacgctccgactacagccgccgtcaggcgctggtagaaattgacgtactggtggcgcaggctctgggtttaaccctcgaagaactgcttactatctaccgcgttcagttcccggtcatgcgtcagtatgaagccgatacctggtacgatcaaaacggccgcattatctttactccaagtaaaggcctggtgggcgttggcctgccgcgtaccgcgcgtaaagcggacctgaaaaacggttttgtctttaacgtcgccagcccagactggaccggcggcgattgcaccgatcaagccatcggctgggatgatgtcaagcatctgcaaaccggtaccgtcagcgtcacttttgatgactatacccgcagcgatgaaggcgagcgccgaaccgtcatttggcaggctccgtttatcaaacccgaccgcgaagatgattataaagtggcctgggcattctttgcacaagataaggagagtgcctga

SEQ ID NO: 98908 - DNA, 2832 bp, Enterobacter aerogenes
atgcgggtggttattcgtgatgcagagtggcgcattcgccgggcggatgacagcggagatggtggttacctgctgacctgtgatggcatttcggagctagtacgcggtaaagaagggctgtttctgacaaagctggagcaaaaagtcgagattcttgatccagcaaaaacaaatctggtggaagatgagtcagccaattacctggcggctcaattgtacatagagagccagctacgccaacgcgtcccgactgacagcaaagtccattttggacatcaggctgcgatggattccatgccctttcagctcgatcccacgcgcatggcactggcgcagccgcgtcagcggatattaattgctgatgcggtagggctgggtaaaacgcttgaagccggtatcctggtttcagagctgattcgccgtggacgtggcaaacgcattctggtgctggcggttaaatccatgctcacgcaattccagaaagagttctggagccgttttgctattccgttgacgcggcttgactccgctggtctacaaaaggtgcgtaaccgcatcccaaccaaccacaatccgttccattatttcgataagaccattatctccatcgataccctgaaacaggacatcgaatatcgccatcacctggaaaacgcctggtgggatattattgttatcgatgaagcgcataatgtcgctgaacgtgggaccagctctttgcgcagcaaactggcaaaattgctcgccgggcgcagcgatacgctgattatgctttcagctacgccgcatgacggtaaggctgaaagttttgccagcctgatgaatatgctcgacccgacggccattgccaatccgaaagagtatgaatacgccgattttgccgataaaaatcttgttgtgcgtcgcttcaaaaaagacgtaaaagatcagatggctggcgagtttccggaacgtaatatcgtcaaattgatgcacccggcaaccggaactgaagaggaagcctatcgccgattggttgagagtcagttccgtgacgatgatgatgaagactcgcggtcaaataaaggccgcctgttcaaaattacgctcgaaaaagcgttgttctccagtccaatggcatgtgccagcgtggtggctaaccgcctgaagcggcttgataaccgcaaagaaataaacagtcagagccagattaacgaattagagtcactgctgctggcgctcaataatattgatgccagtcagttcagcaagtatcagttgttgctggagaccatccgtaacgatctccgctggaaagcgaataacacagaagatcgtttggtgatctttaccgagagtatcaaaacgctcgagttccttgagcagcaactgcgttccgatctcaagctgaaagacgatcaaattgccacgttgcgaggcgatcagggcgatacagttctgatggaaaccgtcgaagcgtttggcaaatcccagtctccgctgcgcctgctcatctgctcggatgtcgcgtctgaaggtatcaacctgcaccacctcagccataaaatgattcacttcgatattccgtggtcgctgatggtattccagcagcgtaacggacgtattgaccgctacgggcaaaaacaccagccacagatccgttacttgctgactgaagccagtgaaccgcagatcaacggtgatatgcgcgtgctggaagtgctgatcaataaagacgaacaggcgcagaagaatatcggcgacagttccgaatttaccggcaaatttacccaagaagaggaagaagagcaggttgctgaattcatgatgcaggacgatggcgccagcctgttcgacgacctgttgaatagcaatgtcactgaaaattctgaacacgacctgtttggcgaaatctgcagcgcagtgtccagcgatgcttcgaccgtgaccgaaagcgacattagtctgtttgataatgagcaggcatactgcgaaaaagcgctaggctatctgaaggcctgcggccagaccgtgcaatacgataccttgcctgataacaccttatcgctggtcgcaccggaggagttacgccgtcgctttaaccagttaccgccggaaattgcgccggaaaactggcagctttatctaagccaggacaaaactgttattacggaagccatttcgcgtgcgcgcggtgagcaacatgcctggcccgatgtgcagtatctctggcaaattaacccggtcgtgcagtggttagacgacaaaattcagtctgcctttggtcgccaccaggctccggtgatgcgcctgccgcacctgtttgaacctgatgaggatcatttcatcctttccgggttgttcccgaaccgtaagtcgcacccgatggtgaacccgtggctggtggtgagctttaaccgcgaaacgttaagcggtagcctgccttttgctgagttcctgaaacgacatccgcaactgagtagcaagctgactaacagtggcggcaaagatcgtaaccatcaacgtcagcaggatctgctggaagcggcaatcgcccatgcgcgggatgtgtttgttcacgatcgaaatgcttttgaagagcgtatcaatcagcagctcaatgagcatctacagaagctagacgttctgcgtgggcgtcagctgaatcaactggagctggattttgccgataataaacagcagctttcagtgaaacagagccgcaaagaacaacgtcagcgcgaaatcgaacacaattttgacagctacatccaatggattgaggacaccatgaccaccgaaaaagagccctacatccaggttattgctgtaatcactggagcggagggttaa

SEQ ID NO: 98909 - DNA, 2232 bp, Enterobacter aerogenes
atgatccctaatctgaatgaactgacggatactccgattgcccgaaccaatttgatcaagcttgaagaagatcagctgacgattatccagcgtctcttggcccctatatctaatatctatacgatagactttatggttcagcgctttactaaagagcgaaaagaaaaatccgctgattactatgcgcgaattcatcaggaggtaaaatcttgcgtgcggcagaagcttgggctggaagccgggcaggaggtaaaatatgaactgcattgcttaccaaattaccatcacgtcttttttttcctggcgcctgcaactaacccgaacagtcaggctcataggacgttggcagaacgtattgaaacgctttgtcagcaactcaccgctgaaaatcatgacctatctcgcctgattcagggattatttagcctgcatttgaaaatggtaatgctggaaaaagccagtgagcgtttttcggtatcgccgacttacttcaactcaacgctttaccttaacactcgtctgagtcagcccgtcacacaaaaaaaaggcaccggggtgatggaagcctttgagctcgacatttatgcctcagaatataatgaactcgcttttaccctgcacaaacgaaaattcttggtcgaaccggcggatgagatgcacctatccctggacgataccagcgtgtggtttagcatcgataatcgtcggcttaaagctcggcgcaaacttgatgcccgtgatagcaaactggatttttttcgtgagcgcagcggttatggcgaatgccaggcctatacctataacgtggtcatgaatgctgcctgcgagcggctcagtgaactagagatcccccatcaacctatcccatttcaggctacacacgaggtcaatcagtttgctaccgacctcgatcaacagctggctaatacgctgttggtggttaataacggcgtcgaattcagcgtcacgcaagaagcttatttctttgatgcattagccaaccagtaccccgggtatcaactctggtctctggcatcgcttaaacattcccgacaaaccggatttgctgatctgcctgctaatacatccattctggtactcaatgcggtagaggaagaacgaagcaacagcatccggcagcaagagaatgaatctgttgagtacaatgatttctatgcagcctttgccgacgcccgaaaacaacctgaactcaactgggatacttatacccagcttaagttagatcgtttgcaagggtggctaaatcagcaaccactgcctgtggttttacaaggaatgaacattgatcgtaagttgctggatgcgattgattttattaatgaacaattgataagtaaccctgctcaatacgaaatcgaacttacgaaaccacacagtcgtctcaagtcagcagttaccttattaaaaagtaaggtacgccgaacgaaaactgaactatggttcaaagagagcttactcaatcaacatcacattccactgccagacttggcgaacgggcactataccgcctatgcggtacgcaaaacgaaaagtaatatccacctgcttgggtatgttgaactaaaaatagagcacggccaacttagggtggttgataccgggatcgtcgaaggtgaattcgagtatctatctgttgatcatccagctttgggacgactaaagaaattattcgataaaagcttctatctctacgaccatacagcagatgtgctgcttaccacctataacagctcccgcgtgccgcgcctgattggcccagcgcaatttaatatcgtcgattcatatgcttatcaggaacaagaaaaagcgctggcggagcgtaaaggtgataaatttaacggctataccatcacccgctcagcaaaattggagcaaaacgtactgccctatctgatatcaccgggccgctcgaaatacgattcgttgaccaaaactcaaaagatgaagcatcaccatatttacctgcaaccgcatgagaatggagtgtttgttctggtaagcgatgctcagcctacaaatcctactattgcacgacctaagctggtagaaaatctgctgatatgggatgctcaaggtaaggccgtcgatgtatttaaccacccgttaactggtgcttacctcaatagcttcaccctggatatgctcaggagcggcgaaagtagtaagagttcgatttttgccaagctttcccgattgatggttgagaactaa

SEQ ID NO: 98910 - DNA, 4710 bp, Enterobacter aerogenes
atgagaaaaagctggactataaaggaagattgtaagctgcttaccttggtacgtcagcacttttccgcgttggtcagccataaccggctgaatgccacaatgccatttagccagcagcttcacgatgcatttgactcacctgatcgcgatgccgcagcattgttgtatcgactcgaacaggcaaaaatcctgggatttgccagccgtcctggaggcgatcccactaaacagctgtttcgctgtctgataaacaatgatttggcgctatacgattacagcctcacctttcccactctcagaaaagcattgcatccagataccgttgcagcagcacttaaccacttcacgaatagcaatccacacaagccactgtccaatactatcaatgaaattgcaaaagccttgcatctttcctccatgcagatagaaaagcttctgctcgacagtggccaaataaccatcaatagttaccgtaagtgtgagcgtgtgggagagataactatcaataataatctgcaagatctcatctccaggcaaattcctgacataacgctggttgaggatattaacgcttgccgcgcccaagtttctcaactttaccacgtacatgaacgtgatggcgctgaggtcatcttcagttccgatggcacggggttcggcaaaagttatggcgtaattcaagggtatgtcgaatatctggagtgtttcgccaaaaaccaaaagtcagatgatctgtttcccgaaggtggctttaccaacctgctgttcatgtcgccgcaaaaatcacaaatcgacctggatagcagccagaaagacaaaattctggcttctggcggcgaattcatttgcgttctctctcgtaaggatattgccgatctcgactttatggactgggccacgggcctgaaaaatcgcgaccgctatattcagtggtacgaaggggcgaaaggtagcaaatatattggcagcgcaatgcgttcgctcaattaccatgtctcacaaattgatcgctgtgaagagcagttaaaaaagctgacaacatacggttctcaggataccaactacgaaagagaaattcttgaagagcagctaaaaaactgtcgtcatagtatccgcaatacgattgagtcagcctgtaaattactatttggaccagatagtgaaaaagcttccattaaagagtacattcgtcgcgggctccaggcgcgccaagagcgaatgcaacacgcggagacagcacgaaaaccaagcaagtctgaactaagcgtacacgaagtctacttcgagcttatcaaacaggtattgcctttcgaagtttgccagtaccgcccgtcggtgctattaatgactacaaataagttcgacacatcaacttaccgactggcgcctcgtcagcgaggtgaaggcgtgcgttttgagtccgtaggtttcgacttgctgattggcggcaagctgactcccaaagatccacagatcagcaccgttgcggcagctggccataccgggcaggttgcttatcttcgtgatgaacacttcagacgtaatccagactgcccttttcgccagaaaaatattcgctttacggtaatcattgatgaactacatgaagcctacacccgtcttgaagaaacatgccatgtaaagctaatcacacaggaaaataatctggcgcatgttatctctgtcgcgggacgtattcacaatgcggtactcagcctggagcgccggaaaaagcccaaagaagcgcaaacgacctttgagcaagagatggtcaaattcatcaccatccttcgagacctactggcgaaaaagtgcgaattatcacccggtacgacgctgggctcgatcctggagatgtttcgcgaccagttaggagcattcgaagttaacggcgacgccgccgaacgcatcatttccattacccggaatgtgttcagctttaaccccaaaatgtacgttaatgaagaggggctgaaacgcattcgtatgcgcaacagcgaaggcgacataacgcgcaccgagctatattacgaagtcgaaaatgatgccagcgacaccaaccccaccctgcacgatctgttccaattggtctccgtcatccttgccgcctgttctgatatcaccaaccgacactttaagcgctgggtaaaaaatggtggccaggataactccagcagccagaatacacctttgggccaatttgttgacgcagccaataatgtagctggagtggtgcgacatatcttcgatcgcaccaccgataaaaacttgttgattgatcatttctacacttatctgcaacccaaaaccgtattcacgatgacgccgatagttgaactcaattacgtgaacagtggagccgagcgtacaattattctggcgtttgagatggatctggtacaagagttgcctgaagccatgctgctacgtttattaacgggcacgcacaataaagtgattggacttagcgccaccagtggttttagccacaccaaaaacggtaacttcaatcgtcacttcctggaacgctatagccgtgaccttggctatcgagtcattgaacgtaaaaaaacagatatcgatacgcttagagcactacgcgcgttgagagccagtatccgcaacgtcgacttcagggtgttcgatgataagcagctaaaattgaccgatatctaccaaaattgtgagatctatcgcaggacgtatgacaactttttcgacgcgctgaagaaaccgctggagtacgacctgaaaaatacctataaacggcgtcagtaccagcgggaactggaagcgttattacttgccgcctacgagggtaaaaacagcctgattttgtccctttcagggacatttaagcgggcctttatcagcgcctggcgcactcatcaatcagcctggcgtcagcagtacggtatgcactcccggtgcgatgaaaaaacggataacgataagaaacatgaccagatcctgacctttaccccattcaaagggcgtcacaccgtccatttggtcttttttgattcaccactggctaatgtcgaagatattaggcaagaaacctatctccagaacagcaataccgtactggtatttatgagcagctacaaaagtgcaggcaccggcctcaactactttgttaaataccatgacggcgatattaatgatatcaatgcaccgcgtctggatgtcgattttgagcgcttagtgctcatcaactcctcgttttacagcgaagtaaaggacaacagcggcaaccttaatacattacctaactacgttaccgtgcttaaacactacgctgatgacgatattaccgtccacaagctggctgatttcaacgttaatttcgcccacggcgaaaactatcgcctgttaatggccgaacatgatatgagcttattcaaagtcgtcgtgcaggccgtagggcgagtcgagcgtcgcgacactctattgaaaacagaaatctttttaccccgcgatgtgttccgtaatgttgcattccagttcgccgctctcagtgaagatagcggtaacgaggtagtatcagaaagcatgtccttgcttaaccaccgcctcatggaggagtgcgaaaagctgagtcagagccagtcatttagtgatgcaaaacagcggcatgcgtttgaacaggctatcgtagaaaatggtcgccgcatcgatgctgttcataagcgagtcctgaaaaccgactggataaatcaggtacgcgccggcaaccttgaatatctcgaattgtgtaatttattccgcgattctgactcctttaccgatcccatgcgttggctggaaaaacttcaggctaattccttgtatgccgccaatcggcaaatgcaatcaatccaccacgccctgtttatcgaccgccatcagggcaaccaaactattttactttgccacaaacgcggcccggatggacttgtccacagagattattccgccctgtcggatttcgctggcggcgcaagagagtaccggcctgagctcaccctctttccgcagtatagaaacgatgtcgattttacccccggcaacctggtcggcgagttgattcgtgaatgtgacaacatccaggaaacagcattcaaaaaatgggtacctaaccccaggctagttccgttgctcaaaggcaatgtcggtgaatatctcttcgataaagtgctaaaaagttatggcgttaccccactttctgatcaacaggtgtttgaacgccttgaaccgctagtatatgagttttttgaccgctttattgaagtgggtaacgacctgctctgcatcgacgttaaacgctgggcgacgcagttggacgatttaacgcgggcagaagaaacgcttgagaaaagcaacaacaagattcgccagatccgtaatatcaccagccaaaaggcagataccgaggggcagaaacagcttcaggctgtgctggcaggccgttatgaatgcattcgatttgtctatctgaacgtcgcctacagccagaaccccaataatctgatgtggcaagataacgtggatcacacgatccactaccttaacctgttgcaaaccgactaccagtactatcagcccaaaaatcgagagagcggacgagctcaggaaaactcgaaactgagcatgacattggacattaacccaatgttactaaccctgctgggtgtagaacagttgccgactaaaggaaaagtctcatga

SEQ ID NO: 98911 - DNA, 1185 bp, Enterobacter aerogenes
gtgaaaagcactcgctatttcaccctgaactataccggattcacggccgcggcctctgaagggcaagcctatttacgcctgattgcaggcgagcatctcttttataccgataaacgccatttcgccgacccggctggcttccagtcactgcgtatcgatcgccctttgcatctggggactcgtcgcttagccgacggcagctattggatccactggctgagcgatggcgaaacgcggctcgaaccagcccgtccgccgctgaagaaaaagttgctcattttctttatcagcttgctgctgtgcttcgccacagcctggccgacgtttctctatttcagcccgctgatgctcttcacctgcggcaccatcgccatgatcgccttcgttaccgccctctattttttctgcggtttgctgcagcgtggcgttcgccgctgccacccagcgatgcgcgatctgcaggcgcggatgcgacaggccgctcgcggggacttctccttttgtcagattctgtcctcatcgccgtcgctacgcaaacaggcccttcccggttttactcagccagaacgttttgctctcattgaagggacgatagaggcaagccgatttaaacagtggtcacgcggcgcggggaaaacccgccgcacctatcatggcgtggaatttatctgcgctcgccgcgcactaagcttcagttggctggtgcaggatttagcgcagggccttgatcccattttctatcgccgccacccgccgtttctcgccaacggcgaccacatcgtcgccgtataccaacgtgacgataatagcgtgcaggcactgtataacgttaatgacggcgccgcttatctcaaaagccatacctttcattcaggcgatcagcaaatgtcgcggatctataaagtagtgtatggaatcggcttgttgttattcctgtttacgtgcgggatgattgctcacgatatgctaccgggttgggacagctggaaattcgccagccaggcgctggatatgttctctatgatactgttggtcaccagcggctttatcgcggtctttgaacttgtgcagctggcgatacgccatctgtcatcgcaggtagccgactggctgaagctccaccacctgttccgtcaggccgtaaaagacagcggcaccggtattgcctatcgggagctcatgtaa

SEQ ID NO: 98912 - DNA, 1281 bp, Enterobacter aerogenes
atgttcagcacattgaaacgccgcctcctgtgcctcgcgctgaccgcattcatcgcgtttctgtggtccgctacgtttctctttaacctgtttttgcctgatttgacctggcataagcggcaacatagcggcccggcaatggaggttgaacagcccgacatcagcagctttcgcgacggtgcattaattatcagccaccagccattatttaccaccaaaggctatgagctggataatgaccgggttattcaacattttaatcctccgctggaacgcctcccggccctgatgccgaagctgctgaacgcgcgaataatcgcccgcgagcagctggagcagggtattgaaagccggtatcagcagttaagctaccggccacaaagagagagcctcaacgtacctctcaccaccatcatgcgccttaataaggcgggccaaatggagagtagcgccttctggttgggtaacatcacttctataacctgtaccttggatgggcattgctacctcatggcgcaagaaccttttgcctatacgcagagcgtctggtttaccgaggacggtggaataaactggcagccgctgacgcagtggcagtttccccaatcagacagtgatgcgctaccgggcaggcaaagattagtttccgctaccgatactaaaatctggctggcgagccacaatacgctgttcatgtctgaggatcggggaagtcactgggcaattgccgccgatatccgcccgctgctgaagcggcatcatatccgccagcgggaggaggaaggcgatcatgccaggttatcagcactgcattggtacgtagatagccggcagcaaatcttcgccgatgtcagcgtgttactcgccgatggtatcgagcaaaaacgttttctgtaccatctcctgtctgcacagcaggaacagatcgttagcacggattttgacaatataacctgctcgccgcagggaacgattttcttttccagccgaatcagccgtactcgcttcgcgctatatcagttgtcggagaacggagtgccgatacagcgacttgagcatatcgatcgcttaggcaagattagcgccgggaggaaactgctggcgctggaaaaaggtcatggcgatggggcgcacctgtttctctcccgcgacggcggcgaaaactggcagcgttatcaggcaatcgggaagaatacggtgtttgacggttggggcgatcgctttattcgcttcccgcagtatagccgttcgctggagtatcaaataggcacaatcgagtaa

SEQ ID NO: 98913 - DNA, 387 bp, Enterobacter aerogenes
atgctgctcgacctggttgataccttccgcccgctggctcaccatgcgccaatggcgccggaagcggcgcaccgcttcgatcgggtacgcgactacctgcacgataactatatgcgcgccgtcagccttgatgaactggcgcaggtggcagcgctcagcccctatcacttccagcgccagtttaaagcccactttcacgttaccccgcaccagatgctgatggcgattcgcctgtggcgcgccaaggcgtttctgacccacggcatgcctgccgccgaagtggccatcgccgccgggttaaccgaccagtcacatttaacccgcgccttcacccgtcgctacggcatcacaccggtgcgttaccaaaagcaggtcgccgggcgctaa

SEQ ID NO: 98914 - DNA, 345 bp, Enterobacter aerogenes
gtgcctctgaaactaaaccggttatcacaccgcttatttgcttatattattgcctgcagcctggcaattattacgatcgatttattatctaattcagttgttaatcgtatccctacgacttcatcgccacttttccctttactgacaataatattaatgatttttcacattactatttcctgttttatgagcatgaagtattggtgtgataaaaaccgcctgtatctgatgcccatcgctttcgcttttgccagctctgccctgttgatgctaggcactctgagcagctatcccggcggctactgtgcaacagcgaatatattgttaaacaaaatgacgcgctga

SEQ ID NO: 98915 - DNA, 168 bp, Enterobacter aerogenes
atgtcgaaacagtccgtcaaaccggtcttgctcagcgaggcacagattcaggcaatccgaaaaattcaggaacagcagcgccagcaatcaggtatcggtgttgcacctactatccatgaaatcgctcggggactggtggacaaagcattgcaacagcatttggggtaa

SEQ ID NO: 98916 - DNA, 201 bp, Enterobacter aerogenes
atgaaaacgaatatcactgacgaagagttgctgcaggaagttcaaacactggctgataaattaccacctgaagaacgcctgtccattttagagttacttcagcgttacatcaccgtctacagagttgctcaatcatttattccggattatccatgcggtgttttggatacgttatgttttatccaaaaaagcaaaccataa

SEQ ID NO: 98917 - DNA, 2697 bp, Enterobacter aerogenes
atgccaatagtgccaacggtacaaggccgtcaggttgaaagccgcggagttcagaccggaggttttcagacgttcaatcaaccaaatatcaccgatgcccttgttaacgtcggtaaccaggcgattggtgtgtttggacaggcaaagcagcaagcggaccttgcactgactcaagatgcaactcaaagactttatgctgttggaagcggattgatggatgatcctaaggaaggtctgatgactctccagggaaaaaatgccattggtcaggctcctgggtatatccagaaatttgataacgagatgcaaactattgctggcacgctgcctgagtccgcacgaaatgtttttttaaagcatgctcaacaacagcgaatacaatttgccactcaagcagagcggtatgaattaggacaacgtagacagtatgagtccggtcagcaagacggttatttatccttgcaagctcagcaagcaatatctaatccacagttgttcaaccaatcagctttgaatgccagagcctcaattatggcttatggccaagcgcatggacaaagccctgaagaaatagaatcaaactgggttcaatggcgtgagagcgccgggcagaaggcgacagaagcagcatttgcaaatgtttatcaacaactactggggccaggtgggaaaataagcgtaacggattctcccgaccaatctcagttattctctgcaatgatctggcaggagagtggtggtaatcagtacgcaaaagacggttctccgctggtttcaccgaaaggtgccgtgggggctgctcaggtaatggagtccactggtccagaggctgccagcttggctggtgttccttgggatcgtgataaatggctcaatgacccacgatataacatgcaattgggccaggcatatttcagtgcgcagatgaagaagtacgacaataacccagtgctggcggtggcggcgtataacgccggacccagtgctgttgatgggtggattaaacaaattggcgatccgcgtacggggcaggtatctaatgcgcaattcgctgcagcaattccatttgaggaaacccgcaactatgtggctaatgtaactggtagtgctggcgctatccctggtaatgcaacgatggaaagccttaccaacctcccttcctggaatgcgatgaatgctgcaaacaaatctcaaatgatgagccgaatgacaggattgtacgatatgcaagcgtcatctggccgtgtagcgctacaaagccgtatgcaggacgatctggctcagttggaagcgggtaagacagttccccctatttctgcgcatgaatggattgccgttatgcctttacaggctacacctgtagagcgcatgcagctcgagaaaacttatcaacaatatcggcaagccatgagtttgcagcccgtctaccagagcatcgttaaaggcaattctcagcaaggccttgctgccattcagtccatacaaccccaacagggcgaaccggattacaaatataagagcgagctctatgcttctgctgtatcaaaatttcagcaggttcatgatgcccgtgagtctgaccctggtacttggttacagcaatattctccggtagtgcaatcagccttccaggaatatcagaataatcaggttactggtgaatatctgatttcacgcattcaggcagaaaaagaccggcttgggatccgaagtaaaagtgtattaccagcaagtatagttgacggaatatcggcaaaagttgatagcggaaatatgaatttttctgacctgaaggggattatcgctggctttggccgatatggtgattcagttgtcgcacagttgcagcccaaaacaaaagcggctgtaagggtcgcaacagcaataaacgatgctaacgcagctgacaccctgtttaccatccgtaatgtgaagacagaagagctgaagaagaactctggcgaacaagctaaaggtgttgatgcagcttggaactctctaatcgctgcagcatcaccaacgtttagcctacagcgacaaggtggagctgaaacacttgctgatatcaacgagcaaggtaagcgtctggcttattactacatggcatcaggggaagatgctcaggctgcgacagaaaaagcctataagaaaatgatcggcgatcattatacggtcaacgatacatggcgaatgcctaacagcttgggactaaaagagaataatgttaccgacggtctgagtaatatcgttaacggtctcaaggtagatgatattggcagccggagtctgttttataacccagcaatgacgccagagcagaatgccgcgaacaaccttgcgcagatacagaatagcgccgaatgggtgacagacgaaaatgaacaaggtgtttatctgacagtgaacggcactcctattctggatcagcatggttctcctattcgagtgagctttgccgatgccagtaaatctggaattgcaaagccgagttcaaccggcgcagttcttaactggatgggtgaaaaacgcaaagttactccaccatctgagttctacacaccaaatgttaatgccactatgtccgatgccttcagggtgctccagggacaggatgcgacaagtccgctacctcaaaaagaggctgataacacgtcaaatacattacgcgatgctcttaatacgctaggaggcaaataa

SEQ ID NO: 98918 - DNA, 1728 bp, Enterobacter aerogenes
atggcgttctatactggcgcaccgctcagcaacaaccccttgccagtcgagggcgagcagccactattacgttcgcttggcgcgtctgtttctgaaggattcaacgaagggccaattgtttcgtggggtgaagagtcccgccttgccagattgaacatggatccggtcgcagaacgatacagccaagaggatgcaaaacgcctcttcagtgagcataaaatcgagtcaatcaacattcctacgtcggggttaacaaaaccctatattgatgcggtcatccaagaccatcaggctcaccttaatcgccagcagatcctgcagggttccccatcaggtactatagcaacaccgcttaaatttatggccaatctggccggaaacattgccgatccggggaacattgctattgggcttattccctttgtcggtgaggctagagctgcaacacttcttgggcgtgctggacagcgttttctacaaggaagtgcatatggtgcggttcagacagcggcaacaatgccgctggtcgcagatggtcaggctgcccagggcaatgatttcactatgggggactacgcttccaactttctttttggaacaattggcggtggtattcttcacgctggtggtgggattgtggctgatgcgcttcgagcccgtgatatgtccacttcacgggtaaatgaggtgccaggtgcagcaaccgaaaagtcgccatctccggaaaatggtctccccatcgaatcaccggtggcggaaccattcgttatgcgacctggcatatttcctgattcgccaacatacctcgcaagagcgccggcagatgacctggccagaagcatcgatcattaccgcgagaactatacgcagcaaacggcttataacgatgttgtcccttcttatgccgataatcttcaggagttggcatcacggcagataacaggtgttggtgaacttcagcgccaggttgaaagcctaaccagagatattggctctcttgatgcatcgttgcccgagcttactaaacagtatcaggggcaaaggatgaagttcagggaagcgcgtgcagcggcgcaggctgaacttgataaccgccgccagcagttacaggcagaggtagaacaactgaattctcgtattggagaacaccaggacggtgccagagcggcgcaggaactggcatctatctcccgcggggaacttcccgaaccgcttgcacagcaagtctcccggcgagccgatgagatccgcttgtcactccgacaatccccggttgcgcaaggtgtcaaaagtgcagctcagaagttgggtgatgcggactggatggtgcgcaatcaagctatgcgatcggcagtagcgcaaatgcgcagaggagaagatgtaaatatcgagccgtttctcaacctggcagacccgaagaaaaagattacagctattgaggatctgtctttgcctcgccgcattccggctgcacaagacgatgtggcggccagtgcttcagctgataaccagataaagtccgctggtgaatcagggactactgatgacgcattgaggcaagcagaagataacctgaattatacgcgccagattaacaaagctatttcttctgatgatccagagtttgccgcattaatgaaacaggttgaccatgaggccgctgatacctccatggaaaaagcaatcaaagctgcggccatgtgccgtatagggaaactaaatggctaa

SEQ ID NO: 98919 - DNA, 2568 bp, Enterobacter aerogenes
atggctaataatatttttctcaccgcatgcgaaaaaacagtaaatgatgccgccggtcgtaccctgaccgatgaagagatgcagagtttatttaacaacatggatgatacgatagcgcgaatcaaagctgagaatgctgctatttcaaatgagggggctgcgctgcaggctgctgaggagttaatgaaatccgagaggctggcaaaagccattgaaactcagcagaagctgatcaacctccgtctttacaaaaaacactcggcctttctcaacaatactcgttttggcaaaggcgcagcagatcgccctgatatcactctatcttccattctggtcgggcgtaatgaatatgcggccggaacccgtgaatcagtagctagggagcaggagcaactgagcggtaaatacaacggtggtttctttcacgacatcgataaaacaggttacgaaaaagctttttcatctggtgagtacgatcttgatatagcccgagctattgaccgtatggggcgccgagagtctaccggtggtctccctaaagaggcgatagcacttggcaaagttataatgaagtggaatgaagtcacgcgtcttgataaaaatcgagccggcgcatgggtaggtaagctggcgggatatatcactcgccagagccacgacatgtacaaaatcagagccgcaggatatgagggatggcgtgattttattttgccgcggctggatgatggcacttttgaaggcatagctaatcgcgaagagtacctacaaaacgtctataacaacctggcatcgggaacacacctgacttacaagcccgcctcagaatggctgaagggcttcaaaggtggcggatccaatatagccaaacgagccagccaggagcgtgaactcatttttaagcccggtggtgatgcctggttcgaatacaacaaactgtacggcgccgggaatattcgcgagtctgtcattgcctctctggatagtgcagcaaaaacaaccggtctgatgcgggtactcggaacaaaccctgagcacatgtttcagcgtctttttgatgaccagttgcagcgtattaaaaagacaaatgaccccgcggcagtggctgatcttaacggccagttccgtatgctcaaacagcagcttgatgaggtcatggggcttaccaatatcccagggaacgcaaccctggcaaaaatgggcgccagtattcgagcagttgagggaatgactaaactggggagcgcaacgctttcatcccttaatgatataggcaacatgtccatggaaatgcgatatcagggcatgaatatctatgaggcgatgagtaaaaaccttgtggccaagttgcagggctacagcagcgaagagaaaaaagaaatcctcagttatatgggaatcggttttgatgcagtgcgcaatgaagtgatctccaaattttcgggagatacttctgtccccgggaaaatagcccgtcttcagcagaagtttttcaaatacaacttgcttaactggtggaccgaaaacgggcgttcgggcgccggccttatcatgtccaactggatggcgcgtaatgctggcagtgagttttcaaagctgaactccgaactccgccgtgtacttgaaataagtggtatcggtgaacatgagtggtcggtattccgtaatatgcagatggacgaactgaatggtaacagtcatatgacgcctaatggtgttcagtttatccccgatcccgacattgaaaaatatcttgcgactcagaacatcaaagccagtgcagcggctatcgccaatgctcgggaaacccttgcaggtaaactccggggttactatctcgatcgcattcaggttgctatgtccgaacccggggcgcgaacaaatgcgctaatcaaatttggcactgtaccaggcacaccggttggtgaagccgttcgcatgatgatgcagttcaaatctttcactgcgtcgtttatgcaaaataccctgggaagggaattatatggtcgtggttacacaccagcggcattggggcagagtaagttcccggcgctggccaaagcgatatttgcaggtaatggtgaatggcagggctttgctcagttgttcgtatggatgacagcctttggatatctgtccatgcaggcaaaactcatggccaaggggcaaacaccgcgcccgctggatcataaatcagtcatggcagcgatggctcaaggcggcggcgccggcctgatgggggatttccttttcggcgaatataatcgttttggtgggggcatggcatccagcctggcagggccattcgtcggagatgtagatcagctaaggaacctgtatctgcaggcccgagatggtgatgcaaaggccggagattttctccgtttcggtatcaaccatacaccgttcctcaatctgcttggtgtacgtcagggaatggactatcttattctgaaccgcatgcaggaatggttatcacctggttctcttgagcgctatgagcagcgtgtacagaaagatcagggtaatacctttatgttaccaccgtcgcaattcatgttagggaaataa

SEQ ID NO: 98920 - DNA, 201 bp, Enterobacter aerogenes
atgattgatgcctatggtaatgaaggggctcaggttttttgtgagcctaatggtcgtttacagacatatgccgatgtcgtttataaatacttaaatgataatccggaccagagagtgaactcagctgaaagcttagtcatagctgctatgcaggcatcgtttcgttgtaaagagccgccaaagctgaacggcaataaatag

SEQ ID NO: 98921 - DNA, 477 bp, Enterobacter aerogenes
atgggaaataaaatagttcgctccgaattgattaaagaagcaattattgaagatcctttggtacgccttcccatagatgagtttgaagaatacaaactcatctgcttggatgagggaaaaatacctgccccacctgaacctgaacagcatgagtacgtttcttacatagacacaatcggaagggataagtacttcaggaaaccaaccgaagcgagagctgaggaactttttcatgctcatgtttggcaagagggttgttgctggggagagggtgacgatttactaattcaatgggcctgcacaagtaatagttacgttgtgtattcctattttgttgatattgatgatgatcatcatatctatataattgattattgtaaggataaagctcacgacctgattgaagacaagcaacaggtatccatatggactgagcaagctaaacagtatcgattacaacatattaagcccgcatag

SEQ ID NO: 98922 - DNA, 267 bp, Enterobacter aerogenes
atgaaacgagcaatcggaaaaaaagagttaatgaacatggttccgctgtctatgagtacgatcgacagattggaacacaaagggcaatttccaaggcgatggtacatcacagataaacgctgcgcatggaatgcggatgaagttgagtgctggcttgatgaacggcaggcaacacgcccagcagaataccaaggaaaaaagccgcctgttaagctacgcatttatcagccagaaaacacgactcttaagtggcaccatggcacctga

SEQ ID NO: 98923 - DNA, 270 bp, Enterobacter aerogenes
atggcgctacgcgagatagggttactgaccattgctaagctcgggcatgacggccaccagctcgaaccggtagaactgcgcgagttgaagcgccagttggcagagggtacagccttattcaggcggtatcgcgaaattgatgactggccctgtttaccgatgaaacaaaccgtcgccgcggcctgctatgtgatcggctccagcccgcaacagacaagccctgtgctggtggattccgccctaactacctccctgaatagcggtttttaa

SEQ ID NO: 98924 - DNA, 504 bp, Enterobacter aerogenes
atgaaatttaacaaagatcaagattattgggctaatgcctttattactaatgaatttttacttattgaaactcaatcagggctagggcgagttcgtacagatcctgaattttcacctcatttattatctcctgatgcagatgatcagaggatcggtgaaaccatcttacaagccttgtcggacagccgaacattaaccgaacttgcagaacgcgtagtgttttttgaccttgagaaaggcaaagaacaatatgtaacttggatagccatgctgatggaaagatacggctataaaaccaaaaaatcgttattcaaggatatgaaaaactgcgggatccattgtgttaatgatgttatcaccatttcacccacgcgccatgaaaagctggaagcatgggacggtatgggtcttaaaagtagtgataatgtcatattatctgtagatagcgccccggctgaaatcggtgctggtctcaggctggcactgagtcgctgtattggttga

SEQ ID NO: 98925 - DNA, 126 bp, Enterobacter aerogenes
atgccgatccagatccgggtgacgccgggctgcgtcattattaccattcagaatacccgcgagttgtacggctgcgccgaaacactgggcgtcgcaggtgtcaaccggataaagatgctccagtaa

SEQ ID NO: 98926 - DNA, 1227 bp, Enterobacter aerogenes
atgcccctcacagaccttgaaatcaggcgttctaagccgcgtgagaagtcctatacactcaatgatggcaatggcctctctctgttaatcgagccgaacggatcgagagggtggcgtttccgttaccgcttcgatggtaaggccaaaatgatttcgctgggcacttatcccgatgtaaccctgaatgatgccaggctcaaacgcgatgatgcccgcaagcaggttgctggtggcattaatcccagcgatgtccgcaaagaagataagctggcgaagcagggccgcaacgaaaacaccttcgaggcgatcgcccgtgagtggtacgccaagcgcattgaccgctggtctgagtcctacggcgaagagatgatgaaaacctttgaggctgacgttttcccacttatcggccgacgaccgatcgccgatatcaaacctatggagctcatggccgttctctcgaagttggatgagcggggcgcaacagagaaactcaggaaggtgagacaacgttgcggcgaggtgtggcggtacgccattgttactggccgggctgattataacccggcgccggatctggccagtgcctttgctcctcataagaaagagcattacgcttttctcaccactgacgaactccccgagttcttccgcacgctgaacacgtatagcggcagttctgttgtgaagctggcgatgcgcctgcaggttcttaccgggttacgcccgggcgaactacgccagggcgagtggactgaaatagatttcgataaacgtctgtgggaggtgccaccagcacgcatgaaaaagcggcgccctcactgtgtgccattatccgaccaggcgatcgccatcctggaacaactgcacctaatcaccggcaattatcggtttattttccccggcaggattcagcacagcaaaccaatgagcgagatggcaatgaacgtcctgatccgtcgcattggatacgccggaagggtgaccggtcatggcttccgccacaccatgagcacgattctccacgagcagggctataacaccgcatggattgaaacgcagcttgcccacgttgataaaaactcaattcgtgggacgtacaaccatgcccagtatctggacggccgccgggaaatgcttcagtggtatgccgactatatggaggcactggagaatggtgaaaatgtggtgcacggctcgtttgggaaaagtgccttactgtatgaatag

SEQ ID NO: 98927 - DNA, 933 bp, Enterobacter aerogenes
atgttgaatacagattcgttaaaaaattgccataaggctatatcgactattcgtcgcaaggaattattatgggtgccaagaagacacttatgtacccaattaagcttttataatggaagagcgcctatacaccctggcgcagtacatggcctgattaaaacacatgatgattttcatgagtatttgtctatcattgataaaggtattactgaatacctacccaaagaaagtttagtttcctgtaatgatgtatggaatgctattcgctctgataaatatattaaacaatctttaactaaatctaatattccatttgaaagcacaattgatccagtcagatacgccaagtatagagttttagctgggcgtcttaaaaaatcagaagataatcggtcgtatggttattggaaagaactttatgactttagtaaagaagaaattaatgtttttaatcatgcttatcttcgttttcatgagcggttgattgcaatcatgtatggttacatttctggagagcttcgtattgcttatgccaatggtgctgattccattagtaaatataaaacattgttgaagcagttggctgaaatagagagtgaatttgtttttaagtatgtatttgatgggagcaggaaactaatcaccgatctggaatgggatttaatgattgctgataacgtatctgattttatagtgacaaacagaaatgatgaaacactttctgaacgcgctcttgttacggaactccttaagatttttatggagtatggtgaaggaaattgcgtatctgctgtttatagatttacccgttcagcattcatagagaacgacattgaaagaaaaactatccagcgatgctgggaatccttatgcaaagcagtggaagtaagagattcggcaagagctgcatatgttcaagaagccaagaagtag

SEQ ID NO: 98928 - DNA, 198 bp, Enterobacter aerogenes
atgtctctaaagtttatccgtctttccgaagtacaacggcgcacaggctatagcaaagcatggctttaccgtctcatgagtcaaaaaaagtttccagcctccgtgaaaatcggctcccgatctatcgcattcatcgagagtgaaattgatgaatggattaatcagcgcatcgctgaatcgcgtggtgaggtggcgtaa

SEQ ID NO: 98929 - DNA, 720 bp, Enterobacter aerogenes
atgaaactgaataatatgaccttatccggtcagggcctcgctcaacctgaagccagccagaatgacattttaataaatcataaatctgagccgcgcattgattcccgcatcatttcggagcgcgccggaatacagcatcaaagcctgggcgcgacgattaaatcgcaccaggatagattccgtgagctgggatcgctgccccgtcagtccctccaggaattacccgatttgaaatcgggaaaagccggtcgtaagcgtgggcgtcctgagatcagctatctgctgaatgagcctcaactcgactatttgctgcgtatcatccgtgggcgtgatcctgagcgtgttaaccagttcaagctggatgtcactaaggcattcaccaatcgtcgtgccacccagcctgtacgtcgggaatatctgcccggttatcatgaaagccgtgatggcttaaaagcactgggggcgcagcgacatcactacatcaatctggcgcgtgctgaaaaccgcgttgctggcctgtcagatggtaaacgtggcttcgctgatgcgcagcagctaggtgtactgatcgttatgcagaaaattgagcaggccgcatttcatgaagccattaatagcggcatgaccccgacagatgcggtaagggaggtagctaagcgcatggaggcattcgccagccttatgagcggcaacgccattctgggggtaggtcatgcgtaa

SEQ ID NO: 98930 - DNA, 567 bp, Enterobacter aerogenes
atgcgtaaaaatgccataaatcacattttgcaccctatgccgaaaaatggcttgccgtttgtcccttacctcgtctatgtttataggacaccagcaaaatctggtgtcaggattggcgtcctagtaatgttatcggcgacatatgacgcgcctagcgtctttttttatgttgttaattcagtgcatcatttttttagcgttgcgggtataatccgtgccgctcccaaaattatggtgggctgggtgggggcttcttcagaagcgccggtttccgataacgccggttacgccaaccctgctcagttcaccaccagcgaaattggcgtttccggtggtggttataaacatcagttatcggaggttgccaccatggctaatacccctacccaaaattcgcaattcatttggattatcgccgctgttcgccgagattgtctgacaatcaagcctattcttcaccatgttgctgctgagactgagcgtgacgctcgtcgcaccctagcacgagaacacgtcaccttttttgttggccgcgttcgtttatcggaggtggtctatgcaaactga

SEQ ID NO: 98931 - DNA, 210 bp, Enterobacter aerogenes
atgcaaactgacaattctttcgattctgacaaaccctttcttttcgatgaaatgacacacgaaactgaatgtgttttggcaattcttcggaccgttaatcaggttaacgatcctcataccaagagctatttgattgatgctgcagagcttattggcacgagattgttgaataagcttcagcataatgagcgtattgaggatggggaatga

SEQ ID NO: 98932 - DNA, 2760 bp, Enterobacter aerogenes
atgatgcgtaacatcgacatgatccgccaagtatccgaggcggcccgtggtcgctggccggacgtactttcgctgatggggatcgaggttcctacctcgccccgcgcacaggtcgcctgtccggcatgtggtggcaaagatcgctttcgcttcgatgacgacggccgtggtgcgcacttctgtaatgcctgtggtgccggagacggattggagctggtgaagaaggttaacagttgtgatgccactcaggccgctcagttggtggccgatgcgctggggttggatgtacagaccctgcacagaccaaccggaaaggaagtatcactgttggcgcagcgccgggccgaacgtgagcagcggcaggccgtagaacgtcagggtatggcggcgaggttcgctgctagcctggacaaactaaccgcccaggtgttgccgggagagcctgcttacctgactgcgcgcggtttggttggctttgttttccccgtcctgcctgatggctccctaatgatgtctctgacgggcaacgctggtaccaccactgctgtgcaaattatcgcaccagacggcggcaagcgccttatttcaggctctgcccttaccggctcctggcatgccgtgaatgcggtgttggatccgcaggtagtgattattgccgaggggctggcgacggctcttactgcccaccagatccgctcggacgcgctgacgatggctgcgattaatgccggaaacctgaagccagtggcgctggcgatgcgaagccagtacccggaggcgcagatcatcattgcggcggataacgactggcatgcagagggtgagacggatgaccggggcaaactgaaggtaaacaccgggcgcatcagcgcagagaaagccgcccaggccgttgacgggtgggtggcgttgcctgaaggcgagtttaaagccgactgggacgatttgcgccagcgcaacggtattgccgatactcgcgccgcgttcagtaaatcactgtatcaaccacaggtagaggatgtatttgtgttacctgaagtgaccgcggcagatagcgccagccagaaacgcaacacacagaagccctatgtggacagtcgccgcaatggcctttactgggttgagcctaaagaaaaaggtggggagatcaccgaagtagagagcctgctttgttccgcgctggaagtggttggtgtgggcattgatgacaacagaacgcgatatctggtgctgcgctggcgggcgctgggtgcgaaggaagaaacgacgcaagcgatccccctagctgacattggcgaaagggaggggtggcgaacactcaaagctggcggcctgtacgtcaccaccaaaagcggcttgcgcgcgacgctggctgactggcttcagagtcaggcccataaaggggagatctggcgtattgctcaggctacaggctggcagtgtggcgcatatttaatgcctgacggcgacattatcggcacaccagagataccggttctttttaacggccgcagttctgccgcatcaggctacaccaccagcggcacaactgagggctggcgtgacagcgtggcgcatctggccggaggcaattattccatgatgacgggtgttgctgcggcactagcggccccgctgattggcctcgccggagccgacgggttcgggatccatttctatgagcagtcgagcgccggtaagaccaccactgctaacgtggcggccagtctgtacggtaatcctgatgtgctgcgtctgacgtggtacggcactgcgctggggctggcgaacgaagctgccgcacacaatgacgcgcttatgcctctggatgaaataggccagggcgcggacccagcggaggtatataaatctgcttatgcgctgttcaacggcaccgggaaactgcagggagccaaagagggcgggaaccgcgagctgaaacgctggcgcactgtagccattagcacaggagaggtggatctggagacattcattgccggtgtcgggcgcaaggcaaaggccgggcaactggtgcgtctgcttaatatcccactctgtaaagctgttcgcttccacggttatgaaagcggcaaacaccatgccgatgcgctgaaagatgcgtatcagagccaccacggtgctgctggccgtgcatgggttcagtggctggctgaccatcagcagcaagctgttaaagcggtgcgggaggcagaggcgcgctggcgtgggattattccggccgactatggggagcaggtacatcgtgtaggggcgcgtttcgccattcttgaggctgcacttatggccgggcgggtgatcaccggctgggatgagcaaacatgccgtgatgctatacagtacagcttcaatgcctggattcgggaattcggtaccgggaacaaagagcatcagcagatcatcgagcagaccgaagcattcctcaatgctcacggcctcagccggtttgcgccattcccgtatgacccgagcagcctgccaattgccaacctggcagggtaccgccagaagggagggcatgaagctgatcctgtggtgttctacaccttccccgcagctttcgaaaaagagatagcgcatgggttcaacgcgaagatgtttgctgaggtgctgaaaaacgccgggatgctgacgccgccaaataccggtcgggggtaccagcgtaagtctccgcgaattgatggccgacagatcaatgtttacgtgatccagtatcagccggaggggagccagccagagtga

SEQ ID NO: 98933 - DNA, 783 bp, Enterobacter aerogenes
atgcgccttctccgggtattcaccccgctaattcccgccattttcttcttttccgccgccctttatactgcgggggtctcccttactgataataaaaaaatgaaatacctctatttactgctggcgctggcaagcttcgccgcagacgctgcggatccgggcagccaataccaacagcaggccgaagctggcgatccgcgcgcgcagttttatctggcggatacctgggttagctccggcaactatcaacaggccgaatactgggcgcagaaagcggcggcgcagggcgatggcgacgcgatggcgctgctggctcagcttaaaatccgtaatccgcagcaggccgactatcaacaggcccgacagctagcggaaaaatccgtgcaggccggcagcaaggccggcgagattatcctcgcccgcgtgctggtaaatcagcaggctggcccaaccgattatgcgcacgccatcaggctgctgcaggatgcggccaaagatgaagagagcgactcggccgtcgatgcgcagatgctgctggggcttatctacgccagcggcgtgctgccgccggaagatgacctcaaggccgcgcaatacttcaaaggcagctcggcgctttcacgcaccggctatgccgaatactgggcagggatgatgttccagcagggagagaaaggttttatcgaaccaaacccgcaaaaagcgctgcactggcttaacgtcagctgtcaggaggggtttgataccggatgtgaagagttcgacaggataaccaaaggctaa

SEQ ID NO: 98934 - DNA, 234 bp, Enterobacter aerogenes
gtgaagatcgcccttaacggacagttgcagattctgcgcggactgaatcacgccgctgttgctgagcgagccatcagcgctgattgctacgtcccccgccgccgcgccgatattgccggcattgtgcacgcctacgccgcgctcggtaccgacaagacgaattttatgggcgtacatcccgcccagggcgctgacgtctatcgccaccgcaggcggcgcactgccgtcggctga

SEQ ID NO: 98935 - DNA, 576 bp, Enterobacter aerogenes
gtgctgagcgtcaaagcatggctgttgctggcgatctcaccgccgcggttatccaaccccgcgcgaaaatcaaggcgtagatcgtcctcgcccgtctgctggattacgccctgttggttatccagcgccattgctttcagctcaagctggctggccgtcaacaggccactgtggttgttgagtttgccgctggcggccaactgcagtttttcgctggccgccaccaccgcatctcgggtggtgatatcgccggacgcggcgctgaccacgatccgcgcccccgaggttctactgttatcaagatccaccgtcctgccctgcgccgtcagcgttcctgccgccatattgtggccattcagcgccagcgagctctggctattcagcgtcagcgcgccgctgctggcggtagaaccatcgctatataatccggcggcgagcgtactgttttgcgcgctacgcaaagcgttggcggcaatccgcgtatcgccttgcgcggcgatcatgccgtcattggttagcgtcgcgctggccgtcaccacgctatcttttccggcgtacagctggccctggttgtga

SEQ ID NO: 98936 - DNA, 204 bp, Enterobacter aerogenes
atggcgcgcagtgagctgaatgtcgccctgcgccgcgctgatttttccgccatggttggtaagattgtcggcgtcaagcttgatattgccatttgcggcaagaacgccttcgcggttatccagccctccttcagcgctcatggccaggtcgccctgcgccgcaatcacttgcccctgctggttccgaaggctggccacttgtag

SEQ ID NO: 98937 - DNA, 264 bp, Enterobacter aerogenes
atggttctcgccagcgctgatttcaccttcctgacggttatccagcttcgccgcagagagattgagcgcccggccggcgctgataaccccctgattaatcagccccagcccggagagattccactgcaggttgccgttggcgatgatcctcccggcgttatgaaacgcctgacgcaacgtgagcgacatatcgccctgagagagcacctcgccatcgccgctgagggaatcggcatcgaggctaagtttgctcgcggcaagtaa

SEQ ID NO: 98938 - DNA, 315 bp, Enterobacter aerogenes
atggtcgttgtagttattgatttgttggatatcgagcgccatatcaccggcggactcaagcgttgcgctgtggttattaaacactcccgcccggccgctgagcgaaccgtcttcggcaagctggccgccaatggcgagcgtaccgtcgctgtagatcagcgcgtgatcctggttattgagcgtgccgacgcccattgccagcgatgcccgtgcggcaatcgtcgccgccacgccgttctccgcggcgttagtcagcgttgccgcctgcagcgcgacggcgtcgccgtacaggcgcccgctgccgatattggttaa

SEQ ID NO: 98939 - DNA, 1083 bp, Enterobacter aerogenes
ttgttctcaatacaaatgctacctgcacgtgaaggcgatgcaattttggtgcgctggggagaggaacactctccttatcaaatgcttgtcgatatgggggtcgaggaaacagggaaagagtttaatgataaaattagcggcctgcccgatacgcagcggacctttgaagcagttgtagttacacatatcgacgcagaccatattggaggatttttgagttgttttgttgactgcgatgagccgtgcgccatagtgaaagatttttggtttaatggttacatgcatctggatggtcgcagaagcagttcttctttagaagggctaggtgcagttcaagccgaaaggctcactacatggttgagcacacagccctggaatgattgttatgacggaggctcagtctgtcgaagcgagggagaaccgcttaaagtcattgaactcgcaggaggcatgaaggtaactgtccttgggcctacgatgcaaagacttgaaaagcttaaacctgaatgggataaagaaataaataacgctttacaaaaaaaacaaaaaaaactctcagtacctaacctggaatccatgggagcaagtttaccattggagattccagacgctcagtccctcaaatttttagctaagcaaaggcccttgcgagacactaaagctgcaaatgggagcagtattgtcttactactagaatatgatggtaaaaaagttctactcgccggcgatgcgttcgctgaagacttggttgatgctattttagttttatcaagtgaatttcccctaaagctcgaagctttcaaagtcccccaccactgtagtcgtggaaatatctcaaagcaactaattgaagctgttgactgcacaaattggcttatatcgacagatggcagcagacataagcaccccgacgatgaagggatagcgtctatcctgcttcacaggacaaccgattttgtaaatttggttttcaatgtaactagcgattacaattcaaaatggtcgaacaccgagtggaaacaatgcttcagatattcagcaaactatggctctaaagaagatggttatttactgaatctttga

SEQ ID NO: 98940 - DNA, 1041 bp, Enterobacter aerogenes
atgaatgaggtcacacctaaaaacataaaccttagtattagagtgaagtctaaattcaatttcggcggacgagacacgaaaatcgacatccgagatagtgaactcattcttgttgaaaagctcactacaagcagagagttcagtctgctccccggactgtatgaagttagcacatttctgggcgatggaaagagagcatcgcagattgttgaagtattcgaatcacaattaactgagataagtttagagccagacattgattatcagcctgcgcctccaaaatatgacagtcagtttaagaaaatcgaggagttgaatcaggataatcgatttggtttgactattcttgatgaagatactgactttactatttatccggctggaagctattggatcgtgcaacacaaagacgcaatgcaaaagatgcctataataacactcaaaaaaaatgggtcgtatattcaagctagcctccctattagccaaggccaccgttattccgttacttgtcatgtgaaacaggtcttaaattcgaagtatggccacgtagaaataaacatctcacagtctagagctatggcttttggcttggagtgtatgctcaaaagtgggcaaattatgaatgcagccgaggtggcttctaatgcactagaagccttgatagaaaaatacacggaccctacaggagcaacacttgcagcactgattctttacaagacatgccgacttgatgagtcgagcaaaagacatttaatcaatttggtaacccatcatgattggttacctgatgcaaaaataatattagctttatacttagcacgcactggcaacctggacgaatcaatgcaacttgcgtgtgaagctagcaaaaaacgtattcttttaactgagagcttttcattattattggatcttcttcgttattggccagaaacagaacacgatgagaaaagaagcgaagctctcgcacgtttagcgcaaatcgcgccattcgtaatttggaagtctatgtatcttaccaccagtatgaccggagattaa

SEQ ID NO: 98941 - DNA, 1170 bp, Enterobacter aerogenes
atgactgcagttatagatgatagctcaaactcacccggaacccatgcgcttatcattggtgtaagcgcgtatgaccatctgatgggctctagtgaaggggaatgcagtgagcaaggctcagattctggtctcggacagctaagtgcggccgcaagatctgcttcccagtttgcgacgtggttaatgaaagattatcgacgcaaggactttccgcttcggagtttgcgggtacttttatcgccagcgactgaagacgaagtgggtgaaaacctcaagggttatcttaaagaagactcaatcccaacgagggaaaatgtatcaaccgcatttagaaaatttaaacaggcagccgcaagaaatccggataatatcgcaatcgtttatgtggcaggacatggagttcaatttactaatactggagcagtactcctattaaaggattttgcccatcctgatcatgaggaagaacgatataagggagctgtagatattagagccatgcatgaaagcatgacgtatacaaacggggcgcggcgtcagttttggtttgtggatatatgcaggcaaagagctccggatgctaaagagttcgaggaattagctggtgtattaaaattcaacaaagttatcaatacaggtagttctggagcgaccatatgctccccgctatttctggcggcatcatcgggcgagcaagcgtttgccaaacctggaaagctaactcttttctgtgaggccttgatgtcagcccttgttgaaggtcatgctgcttcctccgatggggagcgcagttcaccatggctagtatcaactagtggattacagatgtatcttagagacactgtagaattgttagctgcctgtaatgatgaaaaacaattaatcgaatgctcagggatttttagcaatgaagtctttcatgaatgcgaaaaagctccgaatgtagatttaacaatacagatcaaagacggcttgcctggggcccactacagtgcaaaattgtctcatctcggcagagttctttatgataatcatacaacatggccgcttcgcgacagcatacctgcagggatctataagatagaagttacaactctaaccactaatgagaaagactcagataatctcaaactttcgcctccaagtaggataaaggaacttccactatga

SEQ ID NO: 98942 - DNA, 468 bp, Enterobacter aerogenes
gtgtcggatagtctgtttaacgggcggcgttttcgggcgctgactgtagtggataattttagtcgggagtgtctggcgatccatgccggaaaatcgctgaaaggcgaggatgtggtcagcatagtggaagcattacgggtgctggataaacacctgccggtacgtatccagatggataacggcagcgagttcatctcgaaaagtctggataaatgggcgtatgagcacggtgtcacgatggacttctcccgtcccgggaaaccgaccgataacccgtttattgagtcatttaacggcagcctgcgggacgaatgtctgaacattcactggttcctgtcactggaagatgcgcaggacaaactcgacaagtggcgcagggaatataatcatgagaggacgcattcatcactaaatgacatgactccggctgaatttatccgaagtctccagaaagacgaagatctctga

SEQ ID NO: 98943 - DNA, 927 bp, Enterobacter aerogenes
atgacaatgtttcatgatgttcatctggaactgctggtcgacgcctattcacttccccaggcagaacgacttgcgtacatagatctctgtattcgctatcttggcagcatctccagagctgaaattatggctgagttcaaggttgctcaggctgcagcatctaaggatcttgctctctatcgggagctaaaaccggataactgcagcattgatactgcaactaaaagaactgttatccttgcagacagttataccccactaattaggattggtgttcacacggcccttaaccttattcagtatgggtttacacgctccgaattaatgcaaaagcggccaatgctacccattgatgaagtggacccgctctatcagccggaacgtctcaaagaagaacaggtagcggcggtaacaagggcaataaaaggacaatgtgccattagatgttcctacggttcaaaaagtggtgatcacagggaaaggatactgtttccatcagcattgtttgttgaccgtaagaactggtatttccgagcttatgaccgaaatgaggaacaaccacagcgcagtggttttaagaacttcaaactatccaggctttttgatgctcatttggaaacaacaatttcgccgacacttgctgagaagacggatagagagtgggacgaagaaatcacttttatcattgaatttaaaaagaatttaccaaaagaaacaattaatgagatatcgcgcgagttctctataaatggtaacgtccattctgtcacttgccgtgcagcattggcctgttatgtaaaaaccaattggaaaattgacttggtcaatgatgaaaatagtaagtggttatactttgatgtactgaatgcagaggctttacaagacgttcagtgtttggctccattgtttgaacaaaaaagcagttaa

SEQ ID NO: 98944 - DNA, 162 bp, Enterobacter aerogenes
atgaccacaccacgaatgggctactgcccacgctgtaaacaggattgtgaaatcacttttgctacaaaagccattcatgaaaagacgggtaaggtaattttgccgaaaaagggtaaagtccttgtcattcctcattgtacggcttgtcgtaagactaaatag

SEQ ID NO: 98945 - DNA, 345 bp, Enterobacter aerogenes
atgaaaaaaattcttcgtaatatcattcttactacagctgtggtttctggttcagtattcgcagcagatagtagccagaaggttgcactttctgatcttcattttgccacaacaccaaatggaatgcagcaaattgaaggtaatggtattaatactaccagtcagacactcaagcatgttttcgtgaaatttaaccttcttcaaaataataccgtagtggggcaaaccatcgctatggtagagaatcttgaggccggacagaactggaaagtacaggctccttataatagtttttctgttaagcctgatagttttaaggttactgagattaatgttataaattga

SEQ ID NO: 98946 - DNA, 375 bp, Enterobacter aerogenes
atgaacacactgacagtatctctggtaacaataatgatcccaggtgtcattatggcactaatttatgatacttacactcaacataaatcctgggattcatttcgatatgttcttatgtcggttgtatttggtatcgttacttatctggcaatgcaggcagcagtgagcttatttcaactgattgctgggatcggtgataccaaatccattaattggagattactttcagtctggtcaattcccaatgaggaaaagatagcgattaatccattggagatcttactgggcgggctttgtgctatccccttagggctaattgctgtctatcttgcgaccaaacggactgaccctggcccaaattcagtgcagtgctaa

SEQ ID NO: 98947 - DNA, 468 bp, Enterobacter aerogenes
gtgtcggataacctgtttaacggacgacgtttccgggcgctgactgtagtcgataattttagtcgggagtgtctggcgatccatgccggaaagtcgctgaaaggtgaggatgtggtcggtgtgatggaagggttgcgggtgctgggcaagcgcctgccggtacgtattcagacagataacggcagcgagtttatttcgaaaagtctggataaatgggcgtatgagcacggtgtcacaatggacttctcccgccccggaaaaccaacggataacccgtttattgaatcatttaacggcagtctgcgggatgaatgcctgaacattcactggttcctgtcgctggaagatgcgcaggacaaactcgagaaatggcgcagagaatataatcatgagaggacacattcatctttaaatgacatgactccggctgaattcatccgaagtctccggaaagacgaagatctctga

SEQ ID NO: 98948 - DNA, 246 bp, Enterobacter aerogenes
atgccggacatcgcgccgctgtcgcagctcgcccgcgcgatcgaatacataacgcaccccgcgctgcagcccctcgcggaaccagcccccgacgctctcattcaccgcccgggtctgcgtctgcaggtggctgcccgccgcatcctgcacaaactgccgcagcgtaccgtccggcgcggtatgggccgtcaaacgccccaccggatcgtaagcgtaacgattgctgccccacaggctgttatttaa

SEQ ID NO: 98949 - DNA, 204 bp, Enterobacter aerogenes
atgggtgcagtgtatctgattatgtttatgaagactctgttcttaagaaaatatatgttcagcaaaaagaacatgcagaatcatcttttacagaatttgaagttgtattttcgtataaaaatgcaatcatcgataccattaaaaatgtatttcctaatggttatcaagaacaacgttatcctgcacgctgaattagctaattaa

SEQ ID NO: 98950 - DNA, 486 bp, Enterobacter aerogenes
atgaatgacgctaaaagcattattaataaatatagatcaatgagtgactctgagaagattgaatatcttcgagggtttaatagttcactagatctaatgcttgctaattttttggttgatattgtcaaagacaaatcagaagatgaacttttacgaatagaagcagttaaaatattagggctatatagaggggagtataatgatgagcttatcaagaaagaattattaaagttgattgttgatgaagaagatgatggagaactcaaagtatatataattaatgcattttcactaatgagcatcagtgaatcggacatagattttttcttgagtgttattcgtggtgagtattatattctagtaaaagaggcggcattttctttgttggtttataataaaaattacactcctgctcataatgcattgaatgaattattaaatgatgagacttttgggaaatcagctaagagggaattaaacctttaa

SEQ ID NO: 98951 - DNA, 258 bp, Enterobacter aerogenes
atgagtattaataatagaattagaatgttaggtgaagggctaaaagatcgaatagatgcttcgatcattgattttgatttagagtatatagatcattcagaaagtatcttagcgtttgaaacactatgtgatcatattgctgattatgacgtggttataacaaaagatgaatacaatcaagttatcaatattgcaaatgagttaaatttagaaatagataataggtatttatatattaatccagaaaataagagataa

SEQ ID NO: 98952 - DNA, 891 bp, Enterobacter aerogenes
atggaatataaaaataagttagttgacgcatcacccaaattaaacaaccctcaactattggctataatatacttaataccttttggatacttgattgtagaaaacccattatggctagaaaatatatacattgccgctccaatttttctatcatctatagctttattaaccagtgtatacataggatatcgtgatttattaaataaagtatttaataatacagtggttaagtggggcgtaactggctttacatattcagtatgcttatggatcgcaaagtttaagcttgacatagcttatggtatagccccagaaaatcttaattactcaacattagcttatgctttcatgctctcatttccaataggagcaatgatttgtgcaactacagtctatatatacatatttatgcgagatgtatccccagcaaaaatagtaatatcctctatgatttcagtatatattggaaacttggctcaacatcatatacaggtgaacaatcttcctgaaaaaataatattaataggactcataattatggtcccctataacatggtcaatctagccagttcattagttattaaacggaaatttaattttaatcgtttagtatcaggcttatccctttttgctgtgtcagttgctctttttattattagcatgacagcaatgaaatatattgaaagatttcaagaaaagtttatttttcttgatgcaagaacatctacaacatgtggtagcccagaaagcaaatctctttatattgaaaaaaatgaaaatcagtgttataaaatatcaggaaataaattctcggagttaagactaactcttgtagataaaaacatcccgaatataaataataagggaacttcaacttatgaacaaaaataa

SEQ ID NO: 98953 - DNA, 228 bp, Enterobacter aerogenes
atgaacaaaaataaccctgctaattcattttctatagaagcaaggaaagaagcttttcggagagctgaagccagtctttttttatcaagtaaagatcccaaaggctcctcattttttaatgaaataaaaaataaggtaatcaatggagagctaacctatgaagaggcaaagagagaagtattaaatcatcacattgaacaatctaaaaataaaattaaaaaaggctaa

SEQ ID NO: 98954 - DNA, 1053 bp, Enterobacter aerogenes
ttgaaaaatcatacaaaaatcaaggcagtggatcttttttgtggggccggggggctaacgcatggtctccagcgttcaggcatatccgtgaccgccggatatgatatcgaggaatcctgtcgttatgcgtatgaaatcaataacaacgccagatttataaaacaagatgtaactcatctttcaggaaatgatgttgcaaagtatctggctggcggcgattacaccctccttgctggatgtgcaccttgccaacccttctcaacatattccagagcaaatataaaacgaactacttctcctgacaaacgatggaaccttctggaaagctttgggcgcctgatcaatgagatcactcctgatttcgttacaatggaaaatgttcctggcttggcagaacagggagtttttgatgcgtttttagcaactcttcggcataaaggttattcatttgattgtaaaatcgtattttgtcctgattatggaatgcctcaaactcgaaaaagattggtattaattgcatccaaagttagcgagatatcaataataccagctacgcatactgcagataaatatgtcactgtaagagacgcgattgagcatcttcctcgcataacagcaggcgaaaaggataaagttgatcctatacatcgctcatcaattctaagccctataaacttaaagcgcattcaatattcaaaacctggcggttcttggctggattggccggaagaattaagggctagctgccataagaaaatgacaggaaaaacttatccaagtgtttatggacggatgacatgggatgagccatcaccaacaattactactcaatgtaatggttatgggaatggtagatttgggcatcctgtgcaagatcgagcgatcagcctaagggaggctgcattactacaatcatttcctttagcttataagtttcatgatgatgaaaacccgctaagcgtcgctacattagctaaaatgatcggaaatgcagttccggtcaagttgggagagattattggccaaagtataattacctccttggccaaataa

SEQ ID NO: 98955 - DNA, 726 bp, Enterobacter aerogenes
atgcaactagtaaaagatgtttttgatgaaagagttgctgatatcgagagctattttgaattggtgaataatgttgagcttgcaattggctctggaggagctatattcagcgttaatggaacaccgtaccaaataaatcctgatcagcagaagataatgtattctggaatatatcttcatttgtataatttggtcgaatcgacgatctctatgttaatagatgctgtcgaacggcacgcggcgcaaggaattaatgggcaactggttctactaactgaaaacatgaagaagctgtatgttaaatctgtagctgccccttttgaatcaataaataatgatttacggttagagaaagcgttagaactatttgaccaagtattaaatataaagcctcttgaacttaggatcccgccgggaggcggaggtaattgggacttaaaagaaatagaaaggataagtaagagtataggtgttgatatcactcttcccagagcgcttaggacaaaggtaaatgctccatttagagacgataaaggacctattcggctagttaaagaaataagaaacaaattagctcatggttctctttcatttacacaatgtggtacgaaccatgtagccagtgattttaggcggttgattgatatagtcaaagaatacttagcccatataatcctatcttatgaaaacttcataaccgcacaaggttataagattgcacaatga

SEQ ID NO: 98956 - DNA, 1050 bp, Enterobacter aerogenes
atggaaaaggaattacagctcaaagctgatgaacaaataaaagcgtactccaaaaaaatcgatttttacacctcagaatatactgtagagatacttgcacaaaaagtgagcgctggtgagtatacggtacctgaatatcaacgtgagtatacctgggatgaaccaagaaaatgtaaatttattgagtcgctaatcataggtcttcctataccattcgtatttttctggatgaatgacgataccggaaaactagaaattgttgatggttcgcagaggcttagaacccttgatgaatattttaaaaatcgtttaacccttgatgggctagagcggctggatcttcttaatggtacaaaatttgaagatttaccattagcacgtcaaagaaaaattttaaataaatctatccgaggtatcatactatccgatgatacagatatggaagcaaggattgatttatttgaaaggataaacaccggtagtaaagttgctaatcctgcggaggttaggcggggggttttacgtggtccatttatggatttaattaatgaattagctgctaatgaattatttatcaaactagcgcctgtttctgcaaagcaaaaaaaagaacgagagccagaagaactagtaactagattttttgcgtactccgatgggcttgaaggatatagagatgatgtttcaccatttatatttagatatataaagagaatgaatgaatcattcaaggataatgcagatctggcccagcaatatagggagcgtttctctcggatgctatcgttcgtagaacaaagtttccgtctcggatttaagaaaacagttaaaggttcaacaacgccacgtactcgtttcgagtccatagcgataggctcgcatttagcattagaaattaatggtgcgcttcaagtaacgaaggaacaaactgacgaaatactagaaagtgattcctttaaggctgaaattcgttctgatggtgctaacgcaataagaagattgcagggaagaattggttatattagagatgctcttttagagagggcttga

SEQ ID NO: 98957 - DNA, 558 bp, Enterobacter aerogenes
gtgaagggccatctgggtacattgctatttgctttgtcactaacaccattatggggaatggctaattgtctgtcaggtgaccaaatacgctcgaatggccagattattttgaacgcgcaggcatcttttgcgcacaaaagtgactccatttggcgcatcaatggcgctaatccatacacggccgataacgcgtataatgatatttctattaatctttcaagcgcttgttccttcattgaggatgtgctgggattagatttttcattatatagtttaggatattatgcgataaaagaagtaggattattcgaacaggatgatcatcgcgcaaaaatattaattgatcggctcaagattaactggtcgttgtctgatagcataagttttgaaggtggaaaaataaattcatttccaggtgcctttcatttaaaatcaccagcatcactgttgacttcctattatgccggatttaaaccgacacgaatatacgatccgaagctggagtccgcctatagcgagtcgtattgggggggggcggttagccaaagaatttcgtga

SEQ ID NO: 98958 - DNA, 270 bp, Enterobacter aerogenes
atgcgcgcctcgctcggccgccgctacgcgatggtcgggccgctggaagccgccgatatgaccggtctggcgaccgtccaggatatctgccagcacctgctgccggaactggccacaggcagcgacatgatgtcgctggtcgccgacaaggttgcgcaaggcgctaccggcgcccgcagcgggcaaggtttttatcactgggatgagacccggcagaaacgaatacagtcgcgccgtgagcatcagctgcgctacgccctgaaaccgtaa

SEQ ID NO: 98959 - DNA, 1233 bp, Enterobacter aerogenes
atgcagaattattcgttatcaggtaagcgcctcggtcgtcaggcgttactgttcccgctgtgccttgtgttatatgaattctccacctatatcggcaacgatatgatccaaccgggtatgctcgcggtggtgcaggagtttcaggtcggcaatgagtgggtccccacctctatgaccgcctatctggcgggggggatgtttttgcagtggctgctggggccgctgtcggatcgtattggccgccgtccggtgatgctgaccggggtggtgtggtttatcgtcacctgtctggcgacgctgctggcgcaaaccattgagcaatttaccctgctgcgtttcctgcagggcatcagcctgtgctttatcggcgcggtgggctatgcggctatccaggagtcgtttgaggaggcggtgtgtatcaaaattaccgccctgatggctaacgtcgcgctgattgcgccgctgctcgggccgctggtcggcgctgcctgggtgcatatgctgccgtgggagatgatgttcgtgctgtttgccgtgctggcggccatctcctttgtggggctgcagcgggcgatgccggaaacggcgacgcggatgggggaaagactgtcggtaaaagagctgggccgcgactatcgtctggtgttgaaaaacctgcgctttgtcgccggcgcgctggcgaccggttttgttagcctgccgctgctggcgtggattgcgcaatcgccggtgattatcatcagcggcgagcaggccaccagctatgagtacggcatgctgcaggtgccgattttcggcgcgctgatcgccggcaacctggtgctggcgcgtctgacctcgcgccgctcggtacgttcgctgattattatgggcggctggccgattatgtttggcctgctcctgtcggcggcggccacggtggtctcgtcccatgcttatctgtggatgaccgctggtttaagcttctacgctttcgggattggcctggctaacgccgggctggtgcgcttaacgttgttcgccagcgaaatgagtaaagggacggtttcggcggcgatgggtatgctgcagatgctgatctttaccgtgggcattgagcttagcaagcatgcgtatgagcttggcggtaacggcctgttcagcctgtttaacttgctgggcggggtgctatggctggggctgattatttacttcctgaaagataaaagcgtcggcagttcgcagcaggcgtga

SEQ ID NO: 98960 - DNA, 639 bp, Enterobacter aerogenes
atgcctgtaccactaaattctcaggttgctggcgagcaggagacgctcaaccagctcaaaaagcaagtttcctctgtgttgcgcgtagcgcttccgggaacggttgaatcgttcgatgctgagacggttaccgcaactatccaattaggaattcttggactttcagacggcgagtcaacggcactctcggtgttaaacgacgtacctgtcatgtttcctcgcggcggcggttgctctcttacctttccggtgaaaaaaggcgatgaatgtttggttatttttgctgaccggagtatcgatttctggtggcaaagcggcggcattcaggagccggtagacgacaggatgcatgacttatctgatgcgttctgcatggtcggcccacaatcacaggcaaagaaaatcagtggtatcagtagcagcgcggtagaactccgtagcgatgatggcggtacgaagctgagccttaatccttcgagtggtgaaatcaacggtaccgcgccaggtggctttaatctgaatggcctgaaaatcctcccggatgggcgcctgcagttggtggatggttccattgtcgataagcacatgcacggcggcgttgaatcaggaggcagtaatacagacccactagggggataa

SEQ ID NO: 98961 - DNA, 900 bp, Enterobacter aerogenes
gtgaatagtgtagcaacagcagatcgtacaatcaacgtgccttttcacggggcgcatctttacattgtcaatcacaatggcgaaccgtacaccccgatgaagcctatcgttgaaggtatgggcctggactggaaatcccaatttagaaagttgaatcagcgatttaaaacctgcgtggtggaaatgaccattcagctccctggcgatactcaacgccgttcaattacctgtcttgccttgcgaaaattagcagggtggctgagcaccattagccctaacaaggttcgccctgagatccgcgacaaagtgatccagtatcaagaagagtgcgacgatgttctctacgaatactggactaaaggtcaggtcattaatccgcgcaaaactgtgaaaacaacgccgggtaaaattacctctgaccagcaggaagccattaagcagttggtgctgacacgcggacatgcgttgccaaaggaaaatcaggcacgggccattatcaccatgtggtcatcgctgaaatctcactttggctgcagctacaaagatatcaatgaggagcaatttacagaggcgctttcattagctgctcgcgttcctcttgagggtgagttgcttaacaagcaagaacaacccccggtgatgccgatgatcccaatatccgcaagcggtgaggtcatattcaccttccgtgatgggtacatagtctcagcaacagcagtcaaacctaatgagtttctgacgagccttgaggggcatactgaaatgctacttcgtcgcgggtatgttgtatgtcaccacaaaaagctcagaacggcccagatagatttcatagggcagatgtgcgacgagtctgcaaggcttgaggctgagtggacgttggcgaatagaaaccgccgataa

SEQ ID NO: 98962 - DNA, 288 bp, Enterobacter aerogenes
atggcagctctgcagtgtggaaacttttaccttaagtccggcgatgatggttggatgcgagtgaatggggtaaaggcggagtcgcagaaaatcactttcttgaaggctaaggaagactacgacaacgtcaagattcagatcatgcttcctgataaaaatacaggccgctggttgggtatggactacatacgtcgtaatggcaaacccatccttaacgttgaagcggtccgtatgaatatggacgagcctcgcgtttttgggacatacgactgtgtgaaggtaaagtaa

SEQ ID NO: 98963 - DNA, 1077 bp, Enterobacter aerogenes
atgtctcaaaactggatgcgccatttcgagctgcaactgctcgatgacaaaggacagggaattgccctgtctgattttaaagtggtattcgatattcagaagatggcccagaacagcttcgccagcttcgtaggtaactttaaggtatacaaccttacccctgagacctgcaaccgtattcaggggcaggagttctctaaaatcagggttatcgccgggtatgatggtatcccgccaaccgttgatgaaagccaggttggggtagttcgtaatgtcactgcaggtgaggcatcacaacctgacggcaccaattacggtatgatcttctctggtgatattcgtttcaccattcaggggaaagacaacccgactgatagttggattttggtgcagtgtatcgactgctgggaggggcatcttgccgctcaaactaccgttacgcttgcagccggttggacgtggacagagtttctcaatcaggtcgccagagattacgcgccgtacggtatcaccctggggcgtattcctgagcttcctacgacagtgttccctcgtggcagaaccatttttaaagccagtcgtgaggcgatggatgacgttgctcgccagtgcaaggccaactggtggtatgaagacgggcaaatcaacatgctgcccccggataagtatctgcatgaggccattgtgttaaatgctgatactgggctaattggcatgccgcagcagaccatgggaaacggagttaacgtccgtatactgattaacccgaatgttaagctgggtggtcttattcggctggatcaggcgtcggtttatcgtaccgcgctctcagccgatgaaattggtaactctgccgggtggatcactgaacaggacaataatggcaaccgaacagtaacgggcgctgtaagtcagcagccagcctctattaataccgatggtgattacattgtcggcagtatcgactatcatggcgatacaagggggcaggcctggtatatggatttgctgtgtattgccaagggttctgccgacattatgagtcaatcaacgatcagaaaggtggatttgggatag

SEQ ID NO: 98964 - DNA, 303 bp, Enterobacter aerogenes
atggttatcagcgaaatatcactgactccggataatcagcaattcggtattgtgctggaaggtgttgcgtatcagatacgggttatctggcgcgagccgtgctggatactcgatctgatggatgccagcgaaaagcccatagtcatgggtattcctttggtaaccggcgcggatcttctggctcaatattcctatctaaatctgggttttaaactggcggtcatttgtgacgacagtacgcaggattaccctactcaaaccgatctcggcactggcagtcatctgctggtggtcacggagtaa

SEQ ID NO: 98965 - DNA, 417 bp, Enterobacter aerogenes
atggaagtcggctttgctggtggtggttcgttgctggatttcgccgacactacgacgttaggaattaatcttgggctaagccccagcgaaacctacgcgcagatcatcgatatccagcggagccgggttccgtttgatgtggtaacaggcaagcggctgtacagcaacatgctgatacgggcgattgaggtgacaacggacaggactactgaaaacgtattgtcggcggtgctgacgctacgagaggtcatcattacccaaacgcagaccatcaccgttgcggaaaaaaccgacatgaaggagggtgttaatacttcatctgtgattaatacgggctccaaagcaccgaaggcgcagaatgaatcgcttcttagttctggctggaagcagtttaagtcaattatcggaggtggttga

SEQ ID NO: 98966 - DNA, 372 bp, Enterobacter aerogenes
atgccgcttctcgatgttaccgatgtgctgctggatccggactttatggatacctcgctggtctgtcatcggcaggtgcaaacggttgatgaagataatttcccgaccaacaccgatcaggttatcccgttctctggtgtggtgacggttgaccgttctctggaagcacaacgaatgattgccgggcaaaacattgctggcgccattctcatagtaacgcaatttcggcttacgcacggtaatcgtgaaggattggatgccgatatcgtgccgtatgagggatacaactatcgtgtaactaaggttgatccgtacacgcgctatggagcggggtttgtgcaggctcattgtgaattgcttgatgaggcgtag

SEQ ID NO: 98967 - DNA, 507 bp, Enterobacter aerogenes
atgaaatccggattaacgattaccacagataacgctgagtctgttctggagtctctacgccagctttcaggtatggatgtgctggtgggtatcccggatggtccaaagcgcgaagacgccccgctgacgaacgcagaactgggttatctgcaatcgacaggggcaaccgttgaaattgatggcgaggtggtgacgttaccgccccgtccatttctcgatatggggattgaagattccagaacgaggaccacagcatgcctgaaagccgctgctgaagctgctctggatggcaagcaggatgcagctgttagtcaactggagaaagctggtcaaatcgcccgcgacgcctcaaaagcagtaatcggttctggtgaccggttgacgccgttatcagataaaaccattcagaaacgcagaaaatcaaagccgccaattaaaggcatcaagccgttgtatgcgcgtggccatctgctcgaatctataaactacgtcgtgaggaaaaaataa

SEQ ID NO: 98968 - DNA, 429 bp, Enterobacter aerogenes
atgaagaaatttctaactgacacattcagtcaggtgatttattacggcctgctggtggcgctggtatttgcaacgtttactggtcaaaacaatatcctcagcgttgcggctgcggcgttctgggttgttattgcgctgggtgccattattggtccgctgaccttatttcttgcttatggagctggacaagttagcgataaaaagactgcttctgaagtattggaaacagttaagaaaataacccggagaaaaaatgtcattgctcgctggtggggatggatttgcatggtgcttaccatcgtcctgctggcttatagcggctgggtattcaccgcagtgtgctacgcgctgtcatcgttgttcgttcgcttctgcgtgtcgctggctcgcggtaaggtagagaagcttgaaggtgccgcattagcttga

SEQ ID NO: 98969 - DNA, 513 bp, Enterobacter aerogenes
atgatcctccattcatcaacagaaattgaaattggtcgcacaggagagttttttacgctcttcgcgttagccaagcaggggtttcagtgctgcctatcagcacaaatgcttccgtatgacattgttgtggatattggcgatatggttttgcgtggacaggtgaaatcaacactgcggtatggagattttggggggagccgcagtgtttatcggttcagtatgcggtgcggaaaaggatcaaagacccctagggaaatatcctgcactgacttttatgcttttgttgctattgaagatgaaaaaatagcttttattccttctccgatgttggagagcaaaagtcatccggggatggtcatgcaaatgatcgagcttagaagtagtgatatgaagctgccaggcagaacgtacagcaacgggacggtaagagaagccaacatgtcgaaatgctttgaatattttgatgatttcaatgatgtggttaatttttatcgggagaataagcatgggtaa

SEQ ID NO: 98970 - DNA, 396 bp, Enterobacter aerogenes
atggacaatgaaagcgacaacgtcatcaccctagtgcaaccaaagcgtgatgaagagaagcttctgaatatcaccgtaactgaccggaaggactacatgcagcagcggtgcaagcatcgggctgttgaagttgatgaacagcatcggctgattaagtgtctgcaatgtggctgtgctgttgaccccttccagtacgttcttcagagcgccatcgatggagaggctgtggtcactgagatagcgaaacttcacctccggcgtgacgaactgcgagaagctgtcgccaatatggagcgtgaagagaaaaacgcaaaggcacgtttgcgctctgccaggacagcaatcctctttgcagagaacgacctgaaaaacacggagcagggagtaaaacaataa

SEQ ID NO: 98971 - DNA, 1053 bp, Enterobacter aerogenes
atgaccaaatcaaccataaccagagagcgcgctgaacaactggcaaacttcaaaggtgcgccagtgacacgacaggaagagcaggagcttgcccgtatagcgctggccgcaatggacagcgagccggtggcgtggactgatgagcgcaacttagggtatgtcaatcgaggcagggagatggcgtatttatggggtaagaagaatcaagaggagtcagatatccccctctatcgccacgcgcagccagcgccggaatatccggaaatactaccatgcgccgtattgctggagcctgggatgcgcttcgggaaaggcgttaaaaccagactggtactggatgccattcaacgcagggctgagtattacgccgaacttgaggctatgacgccggaagaacgagcagaacacaacgctaacatagaagcatttaaaaccacgttgccgcagccagcgccggtagtgcctgatgatctgcttagtatggccgcttcagcgatagaagacctgttggagcataccgatcctaacactagttattattcgggtgtgtgggctgatgtgcctggtaagttgcgcgccgcaatgctccaggctgaacctgtaacaacgactaacaagttgggcaactctccgacgccagtaccatcacgcgagaaattcatctctctgtgcaatgagttctggaactggtcagaaatggacctggtttgcgctgatgaccgtggctacgagttgagaatggaatggaacggaaaggtattttcgcatcccataacgcaggcgttgtggcgtatgtaccaggctgctcccggcaactctccggtaattccggatacatggatttcggtaagcgagcggatgccggaaaataagccggggagttacgaatatctggtattcgaaacgctcaacaatcgtgtaaatcacgactactggaatgtgccggatactggtgatgacacattcacaccattctggaaccattacggagagtatgtaacccactggcagccgctgccagccgccccgcaggaggcctctgatggacaatga

SEQ ID NO: 98972 - DNA, 177 bp, Enterobacter aerogenes
atgttcagtatagaaaatccagagcaacgcctgaagcgcgttcttacagaaaacgtcggtaaattcaccatcgacaaagatggcggcattcataccaactggcaacatccagaagtgcaggcaactatgcgtaagcatgttgaggcgctgagcaaaattaaggtggcgaggaaatga

SEQ ID NO: 98973 - DNA, 549 bp, Enterobacter aerogenes
atgacagatatcaaccgactgattgccagtatcaagcgccgttcagcccacgcaaaagaattcggcgacgatattacgtttgtaaagcttgaagacctcgacgcgttgatcgaagcggtggagcttaaggaagagcagcgcgctaactggtttcagatggcacagaaattaggggaagacttggatgcggcagagaagcgcatcgccgagcttgaagaggctcaatctatgcacgagagcgatacgctcatgctatgccgtcagtttgatgaactcgccgctgctatgggctggtcatcagaacttgcaatgcagcagggagtaagccaactggaatacgctcgaagcctcaaagaacgcatcgccgatctggagtcccgcaccgtcaccgtgaagctgccgcccaaaattgagcgtaacgatattgatgggtggtttacatacaaaggcggtcgcgtcggtggcggcgctgctgagtggtacaacaaggctctggatgatgtcggctcagaacttatcggcgctggcatcaagtgggaggctgagtga

SEQ ID NO: 98974 - DNA, 1005 bp, Enterobacter aerogenes
atgagcaatcaggtctttgaaattgttcaggccatgtcagggcaggggaactgcatcacgatccctggcccatatctggacttctttgcaggggacaggcagcagcatttgctggcggcaattctaaatcagctggtgttctggtcgggtaaatctgtcctggaaaatgggtggttttacaaggaacacgcagcccttgcaaaagaggttcgggcgaaagacggcgatgtggtcaggaaggccatgtacaagatgattgagcagtatttagccgatgttattgaggaagaacttcgacaggtaaacggtaccccgaagaagcattaccgcatcgaccaggaggcgctaatagcgaaaattttcccgtcaacactggattcggcttttaagccgaatggaaacggctcaagagccgaatggaaacggcctaagagccgaatccaggaatcggcccataagccgaatggaaacggctctcaagccgaatcctatctctatacagatcttaaaaatacagatcttaaaacagatcttaaaaaccaaggggggaaggcttcccctgtggataactttcctgaatcaaatcgggaaacagttcttccagaagtgaccattccagacgcaaccgaagacagcgatttggctactgatgacgatttcgacctggcaatgtggttctggtcaaccatcgtcgaaatgtacgagcgtgccgccgaattcgatggttgcctggcaaaaccgagagaaccaaattttgttcgctgggcgcaagagattcgcctgttacgccaggaacacggctgtaaacacgagcaaatccgcagcatggttgaacgtatccaacgtgatcagtggtggtgccagaaggtccaggatgtgccgacactgcgccgcaaatggcctgagctggtgctgaagctgtgttcaggaaacctggcgacaggtaacgcgttcggcatgggtggtggtctggatacacatatcccgaaagggttcaggggttaa

SEQ ID NO: 98975 - DNA, 591 bp, Enterobacter aerogenes
atgcaagaagttatgacgcgtattgaattaagtgggatgctcggtaaaaagtttggaaaaactcatcaccgtcttatttcgtgcatccatgaagcaggcatagcgctggcgaaaacgatacccggctttgaaaaatttatgattaccagcaaagagcgcggattaacctatgcggtatttaaaggagaaaaaaacataggggtagatgacttaggttttccgataactggagaggtaattcgcattgtccctgtagtcattggtagcaaaaaagccggttttcttcagactattttaggtgcggtcattgttgcggttggagctatagccactttcggattcggtcaggcgtggggcgtaaatgtgatgatggcaggcggagccatgatgctaggcggtgttgtgcagatgctttcacctcagccagcaggccttgcccgtaaagaatcccccgataataaagccagctatgcctttggcggcgtaaccaataccgcctcacagggttatcctgttggtttgctttatggtaagcggcgaattggcggcgcgattatttccgccggtatctatgtcgaagaccagcagtag

SEQ ID NO: 98976 - DNA, 552 bp, Enterobacter aerogenes
atggaaaaatcagagcgtcatcattttgttagttttccgtatcgcccggccatcagagaagatggtgaaataaacaacggaggattcgatctgaccctcgaaccggagcgcatatcagaaatacacgaaatcaaagattatccgtggttcagggattttctgattagcgtcaatacatacggtctcttatttatgacctttggatgcgcccttgggagtctggaagaatctttctgcggatatatcgatttttctcttcgccctgacagtccgacacatttgcgggtagatcttagtcaacttgacgatctgttttaccaatatcttgcaggggccatgccggacgaggaaacccgcattcggggtattgaatatgcccgaagcattctccattggacactttcgcctctagaaattcgtggtgaatcctatgcaaaagtgactctgacatttgatgcttctcaacaagaaggggttgcatgggtgtttgaccatctgagttattttttaacaatctcatatccttcattacctcatgtcatggctggttga

SEQ ID NO: 98977 - DNA, 375 bp, Enterobacter aerogenes
atgcagattatgccgggcaccgcgacgcataccgtcagcatgttcagcatccctggttatagcggcccgtctcagctgctggatccggaaaccaatatcaacattggtaccagctacctgcagtacgtctaccagcagttcggcaataaccgcatttacgcttccgccgcctataacgccgggccaggacgcgtacgcacctggcagggcaatagcgccgggcgcatcgatgcggtggcatttatcgagagtattccgttctcggaaacccgcgggtacgtaaaaaacgtcctctcttacgatgcctattaccgctactttatgggcaagcaggataacttgctgagcgacgccgaatggcgacagcgttactga

SEQ ID NO: 98978 - DNA, 2355 bp, Enterobacter aerogenes
atgcagattcaagatgaagccttattcaaacactatcttcatgatgggataaatctttttacaggctctggtttttctattttagctagtggcatgtttgaagatgttccaaagacaatgcctataggtgatggccttcgtacggaactattaaaagcattcgagcgtgatcctaaatctgtgttgtcattatcccaattatgtcagatacttacagcaactagaaaagatgatttgataaattttctaaaggcgagattcactactgttaactataataacgagtatgattcattagatagagtaaatgtaaaatctatatttacaacaaacattgacgatcttgcttataagatttatgaaaatagtagcaagtactatctgaatgatatcgcagttcgcggaccttcaataacttcatctaactcaatagattacatagctttacatggctgtgttcggtatgatgacaaggattttgatttttctccagttgagctttcctcaagcttcgagcgagataaggataaatggtttggctatatcaatagaatacaacatatacctaccctttattgggggtatagtgtatctgatgccggtgtgcttcaatctcttgcaaaaagtaccactggaggaaaagaacgagcgcctgcctggatcgtgctgagaagtgatgatatagaagccagagaatattatagttctttaggttttaaaataataattggtgaaacccaacaattactcaattattttaagcaactaaagattataaataaacccaataaaaaaattattcgtgcagcttcattttttaaagaatattctatcccggataaatctacaattccagtcagaactcttggtgagttttaccttggggctgaacctatttggtatgatgttttttatggtaacttgcataaaaatgaacatttccacaatgtaatgaacattatagcagaagggaaaaatgccattcttaccggtggagctcttacaggtaaaacaactttgctgaagttgctaacaataactagcggtgattttggttggcctttttatatcgaggaaataacaccagagaaagcaagtttattaaaaaaagaaattgatgctgaaggcaaaaaggcaatgttatttattgacaatgcggctgatgcttgggaggcaataaatatcttaaaagatagtgataatattcaattaatagcatcagatcgtgattatataattgatagtgtcgcacacagattctctagaaaaaaatttgattttattgatgtcacaggtttaacatattttgacgtacaagcagttagggataaaatccctgcgggcttaaaacgcagaagagtaataaaggatttttctcctgacttggatgtcgaaacagcaccaactttttttgaggttatagatagcgccattgcagatcactcgttaactgaccgttttatggatgcgctcagaaatttgaaaatagaggacccattgagtcatgatatcttagtaatgtgctgctatttgtattcatgtagaataccaacttcaatagatgttgctattgcttactcgcgtaaatacaatttacaaccggaatttattcaagagaaaatgtcgacaatgataagctttctatcaatttatgaaggcattttatctgataaaaaccaagattactatgttccaagatctagatcagtagctgaggctgtaattcgcaaaattccagcggaagatatcaaaaatttgcttctaacgtttcacactgaagtttccccaactaaaattagtcgttatgatattttcaggagaggcgcctatgactctggtttggtgggtagggcattcccagactggcaagaaggattaaagttttatgagttagcatctagcagggataatactcattcgctaaagcaacaagccgcaatttatcttgcgcataggaaacaatatcaccttgcttttagttgggtcgatgaagctctttcaatgattggaaggcagaatgcaccggttaagaatacatatgcggtaatattatttttagctaatagcgataagcctcttgatagtgaagttattaattctttgatcgagagcatggagattttggctaattgttacaatagtgatattcgaaaaacatatcatgcaaaggttttttctgatcaggctctgaagtttgcctctcggctccctatgcaaccagagagcatgcaatatatcgataaagcgatacattggttagagactgaattgacaatgagaaccgcagacagatctattactaggttggtttcgcaattaaaacaagccaagcgctccttaattagaacttattga

SEQ ID NO: 98979 - DNA, 735 bp, Enterobacter aerogenes
atggctgattatatcaatagtaacattcttagccaatcatatgtacatgtagagcctgagtggcttgcgacagtaaaagggaaagagaaacaagaggctattgaaaggataaaaaatatcatcaaaaaacacgccgaagagaggatgaaattctttctttatgatgatgttgatattgatgtttcctttgaagatggctctattaaagctcgtatcactgcatatggtagtgtttgtgttttattaaatgctcttactccagtcggtaattttgtgacaaactactcctcatatagagaaggaattaaaacaatagtttccgatgtggcaagacttagtgatgttgtcaacgctgaagttttgttccaaactaaatcaaggagtaaaaaagaaattattagagttgaggctaggaagggtattgttggttcgcttgagaatattaataaaaaaataaatgaaattagctataagactaaaacgcacaaaaaaaactcagtcatgtcaatatataattcaatcttggaattacataaaaatattcttgaattgatggataatgtaaatgatgctgatgataaagaacttgtaagaactgcactgattgatggggttaaaaatcttaacttgggaaaaggtgcatttgatctaactgatcccatgtctcaaaaaatacacgctgatttgctacaggaacgaaaagaattagttagtaatcttgaaaattacaaatag

SEQ ID NO: 98980 - DNA, 1356 bp, Enterobacter aerogenes
atgggacacaaaaccatacgccacaccattaaacgtaacggggtttattacgttcgttttcgcctgcctgataagaagtttttccgtaagtcgttagagactgacagccacacccaggcgcaattgctcatgttatttgtttctccagtaattcctctggttcaacgtggaaccatccaaccggatcacttcggtaagcgtctttctgagtatggcaaaagcctgaagcagcagaacgaacaatggctggcgcaccaatttctgaatgatgtgcggcgccatattcagccaatggttgctcaggaagaccgcgaggttgtcacaccgtcgggagatgaggaagaacacactgaagcgcaaccagaacacgtgttaacactggctggcgcgtggaatatgtataaagaggagaaagcccaaaactggacgaaggcaatttcacaggccaatgagcgctttatggaagtcatgttaattgtcctcggtgcatcaacagacgtaacgaagataaccaagcaggacatcaagcaggtgatggaagttgttgaaaacttgcctaagcgtgtagtgcagccttatcggtcaatgacggttcagcaattgatcgagtgtgatgatgtgccacctgaagatttggttggcgctgagtctatccacaagcatttaaagatttacaaatcgttgttcaaaaccttcctgactgacaataaagatattctggagaagtctccgactgatggagtagtcgccgccccctcgaaagcgagatttggtgcatacagtgcagcagaaatgagaaagtttatggggtgggcgctcaagcagcctgacggatggcagaagtggatcaccttgttgttggcgtatacgggagccagaagaggggagatcgcaaagctggagaagtcacaaatcaagtatgacgaggacagccagcgtcactatctcctgatagcagaaggagggcagggtaaaactgagaacgctacaaggcaggtagtgatccatcccaaactgatcgagtggggttttcttgatttcgttaatcggcagtggaaagagaaaatcttctcccctgtgtctggtaagaatatgccgaagatcggcaaagttttagccgatgtccgcgatcagcttggtatcccctaccatgatgattatggacagcgtcgactggtgcatagtttccggcatacaatgatttcaacctgtttagccggttgggttgctaacctagcgcacttgcaacaggtggttggtcacgaaaaaagtgggacgggtatcacaaagagatacatgcataacttcccattacatactgtatgttatgtaattgataaacttaattggctctaa

SEQ ID NO: 98981 - DNA, 204 bp, Enterobacter aerogenes; identical to SEQ ID NO: 79423

SEQ ID NO: 98982 - DNA, 870 bp, Enterobacter aerogenes
atgaaatcttgggtaaaaatgaatagttggacatcagaagacaccaaagcagtgaaaacgtggtttgatttggacaaatatcgagagtttgaaaacatttctattaatatgctttaccatgaaatatgggcgagaacctattttttcaaaccagtaatagaagaaggaatgcagaaaacagtattgaaaaattatatgcagatattggatggtgatccttttcttatcaaagagaagcacttaaattatatggatgccgaaaataaattatatcaacccccatacttttttattactacagttgatcgaatagcaaatatcagttttgcttgtatgagaaaggctttattcataagagcaaatacagagcaatataaaattgattccactattgaaaatgaatatatttccgaacaaatccctgaacagtttcctactacgattatgttagaaatcgatcttgcgggtggaagcgatgatgagatagctgaggccctgcgagtatcattaccacaatggcgaaaagtaaaaggcgttaaacctgcaccacttgatgcagtcagatttggttatggggcaataaaaaaattaattagctatcgaattatccctatgcttgatttgctcgcatggtcagaacgaaaaaaagtacttctgtctgacgacagactatctcgattactatacacggatgaagatgatgataaggcgattcggcaaggatatcatataagagatgctgatcggcctttcgcaatgaaaactgtagaaattgattttttaagacaatttaacttttttattaataaaaatcagcatgttaaagaaatgagggtttcggatgttatgaaactctcagattctgagtga

SEQ ID NO: 98983 - DNA, 1020 bp, Enterobacter aerogenes
atgagcattgatgcaatgcgatgggccaaaaaagtcaaaaccgggaaatcttctgcgaaggcagttctgacctggctggccgatatgtgcggggctgatctctgtgcttttccatccattcctgcgctggctgaagcaactgaactggataagaaaacagtccagtcgagtctgcaatatctggtctcgattgggcttattgaagatacaggtgaacggcgtgggcggactaaacaaatccctgtttaccggcttcttggtgtggaagaaagcattgccgaagctgaacacacccaaaaacgggaacattaccaaaaacgggatcgtttaaacacacccgaaaacggtgttgttacatctgctaagggtaccgaaaacgggactgtttcctgtacgcaaaacaaccaaacgatcccgttttttccgtcaaacgatcccaaaaacgggatccggaatctaccagaggaaccaaaagatataacccccacatatagcgatctggtcgaaccagctaacccgagttatccgaatcagcccgggattgcctttggtgccagtcagacatttgggaagtttgcgatgcaccatgactggaaaccatccgcggaatttcccagacaggccacgctctggggcatgccgctaaagccggggttaaatcttcccgcagagctaagtagcttcattgcctactggcaggccgaaggaaaagtattccatcaggtgcaatgggaacagaagttagcccggcatctcagccgggcggaagtccgccagaaaaaaccagttaacgggggtaacgcgaatgcaggagttcaaccagataacaccagatctcgggcagtccaggaaattcaggcggcccgagagcgctgggtacgcaggaacggacttgctggcggcggaaactgcatggcgcctatggacagtcatgggggaaatatattcgaacaggtggacacagaagaacggggcggagccctcggatatgtggatggccaagattggagcgatgaatga

SEQ ID NO: 98984 - DNA, 489 bp, Enterobacter aerogenes
atgtggatggccaagattggagcgatgaatgaagcgcagatcacacgtgtctgccaacagtgtattgagcgatgtgcttcgggtaatagctggccaccggatctggctgagtttgtgtcgctggtttctgctagtggggccaatcccttcaatctgaccactgaagtggtgatgaatgaatacaagcgctggcgtaatgagtcttatcgctattccgacagcgacagatacccctggaaacaggacgtgctgtatcacatttgcattgagatgcgtaggagtggggttgagcgaagtctgactgagggggagctgaagaaactggcgggtaagttactcatgaaatggacaaagcacgtggctaatgggttttctatcccgccgattcgtcggcaactggaagccccaaggcatccgtcgggtccgacgccagcacaaattctgatggaagagtacaagcgccgcaaagcggcaggtttaaccaggtaa

SEQ ID NO: 98985 - DNA, 1032 bp, Enterobacter aerogenes
atgcgtgcattactaaatgttgatgttgcccggcacctgggaattgtgttgcttaaacccgggaaagagttgatgcctttattcagcggtgggcgcgtgctggtggagactctgccagaaaaaatgaaggctctaccaagcgggcgcattcctgacgtcgggcaacctttacgagatgatcctgatattcgaccattctttatgaaagagcgggtagtgagggctgctggtggtgtgaatagtctcgaatcctggttgcttaagagggttaagcattgccagtggccacattctgattatcaccattcagagctggtaacgttccggcattcaactggggcaatcgtcgcatgctggcattgtgataacgagctgaagtaccagaccgatcagacccttgataggctggtaggtatcaataacgcagatctgataatcgatgctgcccgtatcgcactgggatttgaccctgaacgctccctgtcacttgctgaattgtgctggtgggctgtcagcgttgggataggggacgaaatcacagaagagatggcgcgccgttccctccggcttaaagaagaggttttccagtcagtctacaaagaaagcgaaatcgtcccatcggtgccggccaccagcattctttccccgcttgttgctaaggttgccaggcatcctgggccaccagccccggtaaaaccagaggtgccagtggttgttgatcccgtggcaccagccactttattcaccagacctaagcggatccgctgggtgtcagatggttttatttcttgggtaaaaactcagccatgtatgtgctgcggtcagtctgccgacgatgcgcatcaccttatcggatgggggcagggcggcgttggtaccaaggcacacgatatttttacgatccctctttgccgtaagcatcaccggacgcttcatcacgatccagttgctttcgagagtgagtacggcagtcagccggaattaattattaaattgctggaccgggcctatgcgctcggcgttctggcgtaa

SEQ ID NO: 98986 - DNA, 1674 bp, Enterobacter aerogenes
atgctacaaaacaaccctgaccttcaaagcgcgatcaaacgcctctgggataaattctggagtagcggcattagcaatccgctcacagccattgaacagattacctacctgttgtttatgaaacggctagatgaactcgatcataaaaggcaagacgaaggtgaaacgagtggtgagaaatacatttctaagtttgctggtacttggattccaccagaggaaagaaaccgccctgttgcggaacaacaccctatagataaacgcacgcttcgctggagcgagttcaagaaattgcagcccgaagagatgctgcaacatgtgcgagacaaagtttttccttttctgaaagatctgaatggtgctgaatctaacttcactcatcacatgaaaaacgcagtattcattatcccaaagtcagcattgttggtggaggctgtgaaggccattgacgaaatcttcgagatgatgaaaagggattctcaagaaaaaggtcaagctttccaagacattcaaggtgatgtatatgaattcctgctgtcggaaatcgccaccgcaggcaagaacggccaatttcgcacaccacgccacattattaaattgatggcagatctagtccagccgcaactgggacaacggattgccgaccctgcctgcggtacgggggggtttctgttaggtgcctaccagtacatccttactcagttgtctttatctcaaaactcaaaaagagataattcaaaaggatctactcatgatgaagatgggttctttcgcacttctgtgactgccgctctgaccaaaaaggcccggattcttttgcaagagagtctgtatggttatgacattgacgctactatggtgcgtttaggcctaatgaacttaatgatgcatggaattgatgagccgcatattgattatcaggacacactaagcaagagctatagtgaagaaaccaaatatgacatagtgctagcaaacccgccttttactggcagtatagacaggggggatattaatgagaatttgaaactctcaaccactaaaaccgaacttttgtttgttgagaatatctatcgtttgctgaaaaagggcggtaccgcctgtgtgattgtgcctcaaggagtattgtttggctcgggcaaggcattcaaagaactacggcaaactttagttgagcgctgcgacctcaaggctgttattactctgcccagtggagtgtttaaaccctacgctggagtaagtactgccattttattgttcgccaaagttttcgggccgggggataaaatttccaaacctgctaccgattatgtctggttttatgagatgtcttccgatggttactcattggatgacaaacgaaataagcttgaaggctatggcgacctgcaagacatcattcaaaaataccattcccgtgatgaggcgtctgacacagatcgtacagctaaatgttttatggtgccaagaatagatattgaagcggagaattacgacctttcgctgtctcgctataaggaagaaatatttgaagaagtgcagtacgaacagccagaagttattctggaacgactaattcaagcagaagtggggaatgtggataagaaagtgcttagtaaagtacaaagtggcatattgtacgagctactggagttaaaggggatgatagtatga

SEQ ID NO: 98987 - DNA, 1572 bp, Enterobacter aerogenes
atgaatagaatgacaattccccttggtgacatattaactcaatccggtcaccaccgtgcaggcaatcgagagcttccggtcctatcaataaccatgaaaaatggtttggttgaccaatcagacaaattcaagaagcggattgccagttcagacacgtctaaatatcgtattgtatacaagaacgaacttgttgttgggtttcctattgacgagggagttcttggattccagacaaaatatccggcaggaatcgttagcccagcttatggtatctggaaactcaaggatgaatcggtatgccatatcccttaccttgagcgttatctgcgctcatccgaggcaaggcgactctatgcatctcgtatgcaaggggttgttgcacgtagacgtaacttgacgaagtctgattttcttagtttggaagtaccttttcctcccatcaatgatcaggctcgtatagctaatttattggacaaggtagaagggctaattgaacagcgtaaacaacttttgcaatacctggatgacctactaaagagtgtattcgtcgagatgtttagtgatccggtaaaaaatgcaaaaggatgggaactaacaacaataggtgagttagctgtcgatgtaagatacgggacaagtgtatcagcgcaaggtggaaaatataaatacatacggatgaataacattactccggatggttattgggattttgagaatcttaaatatatcgatgtagataataaggatctggataaatattctcttcagaaaggagatctcgttttcaaccggaccaattcaaaagaattggttggtaaaacggcggtttatgatcgagatgaaactgttattattgctggctatctcattcgtgttaggttcgatcaacaaactaacccttggttcgtatgggggcacctgaactcaaagtttggaaaagcaaaattatttaatctttgtcgtaatattattggcatggctaacattaatgcccaagagttaagggctatccctattcttaagcctccaatgaagttacaaaataaattcgctactattgtagagaaagcgcatgctattaaatttcgctatcagcaaagtcttgctgatcttgagtccctgtatgatgttgttagccaaaaggctttcaagggggaattagaagtttcacgtgtgcctattccgacacagatatttttcccggtaccagatgaagaacaagccgctgaacacggggatgccgaacaacatatagcagcgggtaattatctacccgtaactaatagcttaccatccgcgttggataatgcagaggctcgcaagtctctgatcgaggaatggctagaggcctatacagcgcaattgggcaactcatcgttttcagtacatgagttcatgatgacggcgcaggcacggctggcggaattatatccggacgttgattctaagtttggtgaaagtgactatgagcatatcaaagcttgggtgttcaaagctctggctattggtgcactgaagcaggaattcaatgacgctgacaattgcattgaacttaaggcggttttggtatga

SEQ ID NO: 98988 - DNA, 1785 bp, Enterobacter aerogenes
atgaagctattacgcctaaaaatctctgatccgtccggcttccgtagtctgccctgtggttttgaacactattttagaaccgaatgggatttacaggaagaattggatcaacatgaaggctttgccccttttgtgtgtgctggtcccaacggcagtggtaaatccaatctgcttgaagcattagcagctattttctttcagttggaaattttgcgggtccgtcgaagctttttgcctgaggtattgcaaagtaccgatcatgatttatcaccaatctcatttgagctggattatctaattcgagtaccagaagagtttcgaatctctggcggacaagaatgggcaaaagtctccgtgtggaaaaataacggggagtctgtgcgtttccattgggtcaatcagagtgactttgacacaaatgctgatgaagttttcaagggaagccatgccgatattctattgcctcagtatgtgttgggctactcgtctggcgagaatgaaattctcagtctaccgtttttcaaaatgcgctttgtacagttcgacgagtactggaatgccttgactcgacaactgagctactctggccatccagagtcgaggttggcctatcttgacagtggtttcagccaagctattttactttgtaatttactttttcaaaacgaaaccgcgcttcaacctttccgtgaggatgttggtatagaggcgttgcgggagtttcgtattattatccgtcgcagtattcctcttgcgccggagcagttgacctcgtttgccagcgaggataaaaaccagcaccaatcacttgatgacattttgaatagtaaccccgctctgcatgtagatatggatgaagaaagtggtcaaagttaccacttaaacctgatgcagctgctggaaggggatgacaaatcctccttggtagtcagcgcgcttaaacgctgcgctagcttgtattacgaggacgagtctaacgacactctaattctggactactgggttaatgatgctactcgacaggcttttcgcgagaattttaatggttcggcactggctctattccaggcgttccaagtattgctgacactcaatttgtataaggtgagtgataatctcaaaactgatctgtatcgctcaacaagtcactatgtcagtgaaacggtaccaacgttggcgtccgacgaacgaattatgcgcttcaagtttgtgcgttttactaaacaaggagtagaagagccaatgatgctcaaggaactctcggacggtgaacaccaattgcttcatagcctaggtctatgtttactgtttagagaaaccaacagcctgtttctgttagacgaaccggagactcatttcaacccacattggcgtgccagttttatcacccggatgcgccaatgtttatgtaatactgagaatgtggagcaggaaatgttgatcactactcatacacctttccttatctcagatagtaaacctgaaaaagtactggtgttttctaaggataaatatagcggtgcggtcacaataagcatacctaaatacaacacacttggtgcatcaatcaataaaattactatgaataccttcggcaaacgtgaaactatcggtggccatgcgcaagcagtactggatgatttacgcagacgttttaacgaaggcattgaagacaaggaaactctgatcacagaaattgatgaacaattgggtgactcggtggaaaaagtattactcctcaaggctatttttgatagcgacaatccaacgaatgacgaggtttag

SEQ ID NO: 98989 - DNA, 1059 bp, Enterobacter aerogenes
atgctgttttcatatatctatgtgccacacaaaatggaaaagatgcaggcattcattgattttattttttatgaggtatggtgcaaagcgcgggtaggagggcctttttgtcttaaactgtttgaagctaacgcagaattgtatgaagttatggaggatttttcttcctcggatacacaaggtgctgttttcttttataaccatgtagagaaaatttatggcttgttttcgtcactgactgaggtacaaatcgatcagtttaaacagtggtatcaagggaataatgatctggaaaaaatatgtgctaatgacccttcaatacaagttgtccgttattccgatattgccattcaccacaaagatatagcagaacaacttgctgttttctttaagggcttatactcacagtcactgcttgatctcgctgtactgcgtgccaagatcggtgatatacatgatcactatcaatcctttgcaacagtgaacaaggcgggtaaatgtcctttttgtggtattggagatataaagggtgggaaccatagcaagcgcgaggcctatgaccactatttgcccaaagctttatacccatttaattcaataaatttccataatcttgctccggcctgtcatgaatgcaatagcacatataagttatccaaagatcctattcagagcggcgctcttcgtcgtaaggccttcaatccatttgcctcagtgggtcatgtaattcaattacagattactctacaacatgcaaatatcgatgcgcttgagcctgctgatattattatacagttcggtcccgatacgctggaggaggaactagaaacatggaaagacttgtacggtatagaagaacgttataaagccaaagtttgtgcagaaaatgacggtaaatactggcttactcaggtgctagatgagtggaaggaggaggggttgagacctaccgaattcatgagaacattagcacgtcaagcgaaaaagaagccttatgctgagtgcaatttccttaaagaaccttttcttaaagcttgccatcgaataggtgttttttga

SEQ ID NO: 98990 - DNA, 264 bp, Enterobacter aerogenes
atgaagaagcgtttttccgacgaacagagcatcagtatcctccgggaagctgaatctggagtttttgcccgggagctttgccgcaagcacgctatctctgatgctgcgtactacacttggcgcaagaagtttgatggcatggaaatgcctgaggtgaaacgtcttaagtcatttgaagaagagaacgcccgcctcaaggagttgcttgcagaagtcatgctggataaagaagcattgcaggtggctctgagccgaaagttctga

SEQ ID NO: 98991 - DNA, 1308 bp, Enterobacter aerogenes
atgaccgacaaatctttcccggacgaaccgaaaaaaaccaccgcagaacgggaagcagaagcccgcgaacgcgcccgcgcggcaatggcatatcaggagccggagcagaaaacgccgcccggccagccggaagtgacccgtttccgtaagacgtccggtcaccgtacactgatagtcagcctgctgagtctggtcctggtcatcgcgctggcatccggtggcgatcgtcttcgcagcgccctgaaaaggggtgatgagaaagaatctgacaccgcaccgccgccctcctccggggcggtgcagcaggagcgtaagaatctgggcatggacagtaacccgtttggcctgttcgggccagggaggcaggaaagcgcaggccctgccagtcagagcgccccggccacaccagctctgccgcccgggccgcccgccctgaacaaggcggcagcactggcaaacgggctgaacagcggcagcacagggtcaggcgacgatacacgcacgttccgaagcggatcgcgcagcaacgcgggaacgtcgggcagcccgtctgcctccacggcgtacacatcctgtcagtctgtactggtcagtggcgaaaatggacgtctgcgctgcccggatacgacagcaccgggagacagcaataacaacggcaatccaggcgttgcccgtgtcactggtgtcaggcggctgggcctcgatcctgatctctatatccccgtggatcgttatattccgtgttcgatgatgcggcgcttcgtatccgatgttggcggtcatatctcctgcctgatcggtgagaatgtctggagcgccagtaaccatgtgaagctgatcccggcaggaacggtcgcccgtggcgtctaccgcaccggcgcactgcaacatgggcgcagccggatgtttgtgctgtggacggagctgcgcacgccggagcccggcagcctgcaaatcccgctcaccgatacgcaggccaccggcccgctcggtgaggcggggatcgcgggctggatcgacagccatttctgggagcgtttcggcaacgccctgatgctcagtaccgtgcaggacgtggcggcagcggcatcagatgccgcgccgggtaaagaccgcaatactgactataccgaaaacacccgcgccgccacggcggaaatggcgaaaacgacactggaaaacagcatcgatatcccgcccacgatgtacctgaaccagggcgatgtgatcggcatcatgaccggcacggatattgatttttcctctgtttatcaactacggctgaaaaagaaatggtatgagcgctga

SEQ ID NO: 98992 - DNA, 276 bp, Enterobacter aerogenes
atgctcagatccttattcaccttatgcgcactctcaggcgtgatattactgtccggctgcaaggaaaccaaatccgaagcctggtataagcagcatcctgacgaaacttatgtggtttatacgcaatgcctgaaggatggtgaggcaagcgataactgcgaatttgcccaccgggcagcacttatgtttgcacaggaaggccagcccggggttaaggagaaattcgaggcgatatttcagcaggaagctgaaaaacgaaatgcagtgacacagtaa

SEQ ID NO: 98993 - DNA, 411 bp, Enterobacter aerogenes
atggctacgctgaataaagcgcttacacggcctgccgccattatgggtattcctctggtgccgttcgttctcgtcagcggggccatcgtcctgctggcggtctatgtcagctattacctggcggttctgctcattcctgcctgggcggaaatgaaaaataaaacccgaaaggacattcattatttcagtctgctctggctggcgtttaaaacccgtggacggcttttcaccaacacccattttggcgcgaatgccctgctggcaaaccagtacgataacgttgatgtctcggagtttattcagaaaatgaaattaaacgagcgtattacgctggataaatatattccgtattcctcccatattcacccttacgtcatcagaaatcgtcaccgtgatttggttgccacctag

SEQ ID NO: 98994 - DNA, 210 bp, Enterobacter aerogenes
atgccggatgagattgaccgcgatcaggagtttaatgaacagcgactggatgagatgattgagcagaatcgatttaaaccagggcctgggccatcattattccactgtcgtttatgtggtaaacccattccagaaaagcgacggcaagcactgccgggtgtaaccacctgtaccgaatgtcaggaaaaacttgaacgtagtagccgctga

SEQ ID NO: 98995 - DNA, 588 bp, Enterobacter aerogenes
atgattccattaattaattacaccatcttaactgatgcgttgcacgctctgaaagttggggatattcgtcactgtgaatccctcggattcactttcgacgaaatgaatgctcttaatcagttatcactcgatgaactgtttgctgtcagccgggcggcggctccctttgtttcggtcagtgtccgccatgatgtcctgcatcatttactggcgcaggcccgacaggaataccgacaacagcagcagattaaccgggctatccggctgggcggttctatcgcgttgctcaaccactactttggcttgacgtctaatgatgtctgccttcgccgacggttgctgggtgtcagcgtgccatatggacgtacacctgagccggatgaagagacagatgccgagatctggcggcaatggcagaagtgccgggtggaaagccttgaatcccccgacgcgctgatggccatgatgcaggttactgaactcctgctaccaaggttcctgggactatcactcaccatggtatggagacgtatcacgctttgtgaaaaggaagttgccactaacaggagggcaccacatgccggatga

SEQ ID NO: 98996 - DNA, 294 bp, Enterobacter aerogenes
atgaaaaaagaaaataatcgcactgacattaaatacccgatgactgagtggttaactatacctgaagccgtacaactggctcaacacaaattgaagtttagattaacaaaaagtgatatctacaagaatgcgctgagaggaaacatcatcctttccatttattttcagtcacctattacattaagaaaaatccaaaaattcaaaaataaattaaaatttagacctatagaaaacccattaacctcccgcctttgcgccctcgaaaaaaaagctttatcgaagaaaacaatctga

SEQ ID NO: 98997 - DNA, 141 bp, Enterobacter aerogenes
atgaaactgggtttgagatatattatatatgccaaacgtatcaggtctcatttatcccaaatcgtcacgcaggtattgaatttcagcatcggcaataagcctatactgacgtcgctgatgatgcggaaaaaaagtttatag

SEQ ID NO: 98998 - DNA, 444 bp, Enterobacter aerogenes
atgtcattcgataacgttttagagcagttctgggtttgcatggtaatagcgctgatgtccagttgcacttcaatcaccgtcacgcaacaggaaatgttccgtcttttgcgagaacgaatggtcaagataaatgccatgacaggttgtctcctcagttgcttttattgtttcagtcactgggtggttttagtgggtatggcaatctacaggcctgttctccttaattcaggattttggttagttgaccttgctgttactgctttctttaccatcggtttaacgtccatattcagaggtattattctactgatgatgagaaatgccattgccaaggcgattgaagaaaaggacatgaaagacaactttgtttatagcatgtacaacaccatacgatatatttttcttcgcaaggatcgccatctctgcgccaggtatgttgagtaa

SEQ ID NO: 98999 - DNA, 894 bp, Enterobacter aerogenes
atgctggataaacttaccggaatgcgggccttcgttgttgtggttcagacaggctcttttgttgcggccgcagaccggctcgatatgtcgcctcagatggtggcccgccatatcgccacacttgagaagcagcttgaaacgcgcctgcttaaccgaacgacgcgcaggcaaagcctgacgccggcaggctcgctgtactacaggcgttgtgaaacaattttacaagccatcaacagtgcagaacgggaagcaagcagttcgagtgcgattcttgcaggtacgctacggctgaatgcgccggtaacattcggccgttatgtcttagtggattttttgagcatatttcttgagcgttatccgcaaatgcgtattgaacttattctttctgatgacgttattaatcctgcttcagaagattttgacctggtgatacgcatcggcgagcttgataagaaactcagacttgcggcaaaaccgttgcctgcgtaccgatttattgcatgcgctgctcctcaatacctggcaaagtacggtcatccagaacaaccttctgatctgaaacatcatgagtgtctggtttttgcaccctggtctgcgggattaagccattactggcctttttccagcagtgagggatatgcggaagtgatggtaaactctcgcctggctattaacgactggggagcaatccttgaggcggcattaagaggtaccggcttgctatttggttatgaaaagggacttgaacgatttattaaaaagggaaaactcgttcctgttctggaagattttaatattccccctcgggaaatgcatttattgtacgacccttctcgggctaacgaaaaccggtataaggtttttattgacgaattgtatgaacatcttagctaa

SEQ ID NO: 99000 - DNA, 330 bp, Enterobacter aerogenes
atgcaaatttatattgtcagaatggaccatccggatggcaccgggtggaatacctttgtgcgcgagcatgtgatttatctgaaagggctgatagaacagggcaaactgttagcgtccggtccgctcaaaaacacgccgctgcgggcgggatttcttattttcagggctgagacgcgcgatgaagtccagtccatgatcagtgcggacccttttgctcgtgaaggtctcatcgctaaacttgaaatccatgaatgggacccgttgtttggtctgcttgacaggtactcaagccacaatacggtcagtgagttgcaggacttgattggctga

SEQ ID NO: 99001 - DNA, 930 bp, Enterobacter aerogenes
atggcagagcataaattacactcaggtgaaaaaatactggtgctgggcgcaggacaactcggggcggctgtactgcagcatctgctccccgcagtctctcagcgagaaggcactgtgtgcgttatcgtttcgcctcgagccagggatgaacaaggtcaactgtgcgcttccacgcatcaaaaatatgtggatgccggagcaaaattaatccctctggacatcgccgacagcacgatggacgccctgaaggatcagtttaaagagtttgataccgttatcaattgtatggggtttgttgcaggcgcaggaacccagataaaaatcacccgcgcagtactggaagccggagttaaccgctactttccatggcagtttggtgttaactacgatgtcgtcggcaaaggcagcggccagccggtctgggacgaacagtatgatgtaagaaccttactgcgagaacaacacaacaccgaatggatcattatctccaccggtatgtttaccagctttctcttcgagcctgcattcgatgtggtgaatttatccgcacggactatcaatgcgctggggggatgggacacacaggttacagtaacttctccggaagatatcggccgactcaccaccgacatttatctccatcagccgcgtattgccaacgaagtggtgtttgttgcaggagaaacgacttcctatggtgaactggcagaaacggtcgagcgagtgacacaacaaacctttgtaaaaaaggttctgaccctgccgaccctgctggaggaattgcaggccagcccggatgaccagatgcttcgctatcgtgcggccttcgcccgaggagacggtatgtggtggccgatgaacgacacctggaacgtgcagaataatattcccacgcagaatatcgcagcctggcttaagtcatccatttaa

SEQ ID NO: 99002 - DNA, 906 bp, Enterobacter aerogenes
atggataaactggcagcaatgcaggtctatgtcagcgtggtggaaactcatggctttgcaagagcggcagaagtgctgggtctgccacgctctacggtttctagggttatcctggagctggaatcctggcttggtatccagcttttgcagcgtactacccgcaaactcagcatcacggcggagggccagcgctactacgacgaatgcaaaaggatcctgacggatattgcggccatggagtcgtcttttcccgcccgatctgagcagccaggaggccgtttcaaagtggggatgccccagtccctcgcccgacattgcattatccccggactcccgtcgtttctccgccagtaccccgggctggaagtgatgctgtgctcaagcgataatgttgaggatatcatcagggaaggatatgactgcgtgatccgtactggcaggatcgaagattcaacaaccctggttgcccgcccactgcctggttttacctgggtcgttctggccgcgccgtcttatattgatgctttcggcaagccgcaaaaactggatgaactggaaaagcatcacgcggttggctatctgaatcaccgcaccggacgcacaactgaatggttttttacccttgatggtggggatcgggcgatccgtatgagagaggtgctaatcgttgacgataccgatgcctatattcaggccgggatacagggggttgggttaatccgtgtcgccagttatctggctatgccgtacctgcaaagcggggaactggtctcctgtctggagaacagcacctctaaattaccgctatccctggtatacccctatagccggtatataccaccgtcagttcgcgctttttatgactggagcagaacgatgttaagtcacccggataatcgtcagtaa

SEQ ID NO: 99003 - DNA, 558 bp, Enterobacter aerogenes
atgcatgacagcctgcctgcggagaaagcgtaccgtattcttgaagctggtcccgttattctggtatccacgagggggacagatggccgaacgaatctgatgaccgcaggttttcacatgatgatgcagcatgccccaccgctggtcggtgtgattatcggcccctgggattacagctatcaggcgctgtcagatacaggggaatgtgttctggctgtaccgccagccgggatggcaaagaccgttgtggacatcggtaattgctcgggggaaacagacgacaaatttgcgcgtttcggcctgacgcccgtcgccgcgcaatcgatcagtgcgcctctggtagatgaatgcctggctaacctggagtgcagagtggtggatgatcgccaggtgcggcgctataacctgtgggtgctggaagttcggcggatttggcttgacagcgcatggcaggaactgcgcctgctccaccatcagggcgatggccgtttcagtgtcgacggagagatgcttgaccttagtgacaggatggtaaaatggcgcgacctgatgaactga

SEQ ID NO: 99004 - DNA, 858 bp, Enterobacter aerogenes
atgcaacaacaaacctcccctgcaaaagtctggtttatcaccggcgctgctcgtggtattggcctttcgctggcacggcagttactggcgcgaggtgatgccgtagccgcaacctcccgcaccctgaccagtctgcgtcaggcattcggcgacgataacgcgcgactgctggcgctggaggtggacctggtgaacgaagccagcgttcaaaaagccatcgacagcaccattgccgccttcgggcgcattgactgtgtggtcaacaacgcaggctacggccagcagggcaccattgaagcattaaccgacagcgaattgcgtcgcaattttgatgttaacgtgtttgctcccctgcatgtactgcgccatgccctgccgcatatgcgtacgcggcgcagcggccatatcttcaacgtggcgtcgatcgtgggctttcagggcggttacgcgggctggggcagctatgtcgccagcaaattcgcactggccggtctgaccgaaaccctggcagccgaactggccgagctgaacatcagagccacagtggtttatcctggaccggtgcgcaccgggtttctgtcgaaagagacgctggtcgtggcccagcgcacaatcgctgactataccgaagctcaggcctcgctggacctacatctgaacggtctggacggcaaacaggctggcaatcctgataaagtcgcttctctgatactgcaggcggccagtgctgacgccccacccgtgcatctttttgcaggtaagattgccaacacacttgctgaacaaaaaatgcatgcagtgagtcaggacattgatgtctggcgaagtgcgtcagatgccacggattttgaagagtaa

SEQ ID NO: 99005 - DNA, 768 bp, Enterobacter aerogenes
atgtcagagtcaggctctttttccagggctatgccctttgcaggccgtgttgcgatcgtcaccggtgccgccagcggtatcggcctggcgaccgtcgaactgttgcaccgccaaggagcacgtatcgtcgcagttgaccggggggataatgtcaatgcgcttgcacgtgaaggtattgtgcccgttgttgccgacgtgactcaggaagccagtgcggaactggccgtgcggactgcaacagaacagttcggtcgcctcgacgtcttaatcaacaacgctggcatcatcatcaaccagccggtggcggaaatgacgctcagggagtggaaccaggtcatggctgttaatgccacgggggcattccttttctcaagggaagccatgcgcccaatgatggcggcaaaatcgggtgcaatcgttaatattggttcttacgcctgttatcagtcttttcccggtatcgccgcctatgcagcctccaagggggcgctggcacagttaacccgcacactcgcgctggaagctatcactcacggtattcgtgttaatgcagtcggctccggagatgcggtgacaaacatcacgaatacaatccagcccgacgggcaggcatatctggcagagcatggtcgtaaagcgccggttggtcgtgcagcccaccccgatgaaatcgcagaagtcgccgcctttctggcgtcagacagggccagttacattgtcggcgcagtggttatggccgacggtggcatgagtgtcgccattcagtga

SEQ ID NO: 99006 - DNA, 744 bp, Enterobacter aerogenes
atgaaagcagttgtatcagaaaaggctatggtggtcattcttaccggtgccagtagtggtataggtgaggccacagcccgtcatctttccaggaaggggcatcatttgtttatcggtgccagacgtatggaaaaactgaccgcactggcgacagagttgcgggcaacggggggtaatgttgatgccatggcaattgacgtcacgcgaccagaagatttgcaacgcatcgcaggcagggcgctggagaagcacggacgcattgacgttctcataaataacgctggcattatgccactctcaccgctggcagcgttgaaggtcgaagagtggaaccgcatgctggatgtcaatgtacggggcgttttacacggaatagccgccgtcctgccgatcatgcaggagcagggttatggtcacatcattaatattgcctccacaggcgcgtatacggtctcgcccaaagccgctgtctattgcgccagcaagtttgccgtgcgcgctatttctgacggactgcgacaggagaccgacgcgatccgggtgacgctggtcagcccgggggtggtcgagtcagaacttgccgatcatattacggacgaaacagcccgggctgccatgcgcgaattccggcgcatcgccttacctccggagcccgtggcgcaggcaatcgcctatgccatcgaacaacccgctgacgttgatatcagcgaactcatcgtccgtcctgtggccagtcctcattaa

SEQ ID NO: 99007 - DNA, 945 bp, Enterobacter aerogenes
atgccagaaagattgccctccatatctcaacagtccgaaatggcggctatgatttgccagctcgcccctcatgaaggtcacacccgtacgttgctggatggcgtgcgtctgatgcgtgctgacggtgcgctggggcgtacccccgtgttgtacgaaccaggcattgttattgtctgtcaggggcacaaaagaggttacctggccgacagggtttaccactacgacccgttgcactacctggtgctgtcagtacctctgccattttcaagcgagacagatgccagcccggcagaaccttttcttgctgtgtccattcggctggatatgacagcggtggcagacctcgttatggctgtcgaacaccatgccactgcatcaggttcacccgttggcattgtctccacaccacttgacgacacgctggcagatacgacagttcgtcttctgaaggtattattttcaccacttgaagcccgggttctggggccggggattgtgcgggagctgatttttcgtgttctgctgggtggacagggcggagccattcgtgctgcgctggcctgtcatggcaactttggacgtatcgcgcgtacgttacagcgtatccacctcgattacgcccggccactggatgtggcttcacttgcgcacgaagctggcctgagcgttccggcttttcatgcgcatttcaaagccgtggcggcgacttctcccattcagtacatcaagtcagtacgtcttcatcaggcgcgactgatgatgatacgggacaacgttactgcagcaggggcagcagcgcgggtcggctacgaaagtgcgtcacagttcaatcgggagttcaaaagactgtttggtcgcagtcccggagaggagacacgtaaaatgcgcacggcattcgcactgatggaacctgcgcaactcgaagcagcgacgtcgacacactaa

SEQ ID NO: 99008 - DNA, 375 bp, Enterobacter aerogenes
atgtcattcgataatgtgtcagaacagttatgggtctgcctcgtcattgcactgatgtccagttgcatttcaatcaccgtcacgcagcaggaaatgtttcgcccgttgcgtgaatggatggtcaaaaaaaatgccatgataggctacctgttcagttgtttttattgttttagtcactgggtggtttttgccggtgttgcaatttacaggcccgttcttgttcattccggattctggttaattgaccttacggttacggcattctttaccatcggtttaacggctatgttcagcgggatcattctgaaagtaatgagaaacgctatcgccaaagcaattgaagaaaaagaaatgaaagacaagctgggtttgtaa

SEQ ID NO: 99009 - DNA, 420 bp, Enterobacter aerogenes
atgagaaaagaccaccggctgtcccgtgcattacacgtgctgatacatatggataaaatccgcgatcccgttacctccgaagatatagcctcgatgatcaatacgaatccggttgtggtcagacgccttttccaggggctcaaacaggcgggtatcattcattctgaaaaagggcatggaggtggctggacactccagaaacctctcggagacatcactctccttcaggttttccacgctattggcagcactgaacttttttcaataggctgggcgactgaacatgacaaatgccagatagaggatgcagttaacaatgaaataagtgatacgcttgaagaggcgagacgtctgattacgaaccgctttgctgaacttacccttgataagcttgtgccggaagtccttaaacataaataa

SEQ ID NO: 99010 - DNA, 3192 bp, Enterobacter aerogenes
atgaaaatatcaaaattctttatcgacaggccggtttttgctggagtactgtctgcattgttcattctggcagggattatcgccatatttcgtctaccggtatcggaatacccaccggttgtccccccatccgttatcgttcatgcccagtatcctggagccaatgccaccacgattgcacagacggttgcagcaccaatagaggaaactgtgaacggcgtagagaatatgctgtatatgcagtcactttcaaatgaggatggcaatctctatctgacagtgaccttcaaactgggcacagatcccgatcaggctcagcaatgggtgcagaaccgggtgtcgcaggctctgccgcggttacctgaagatgtccagcgactgggtgtcacaacgaataaaagctcgccgaatatcacacttgccgttcatatgatatcgcctgatggcagatataacgataattacatcagtaattacgccatacgtaacatcaaagaccagctctcgcgtattgagggagttggccaggtatcagtatggggccccggtggttacgcgatgcgaatctggcttaatcctgatgctatggctgctcgcggactgacgacatcagatgtcgcctctgctatccgtgaacaaaacgcccagtcaccagtgggaagcgttggcgcagcccctatggcagaagaaacaccgttacagttgtcagttaatgccagcggtcggcttaaaacggctgaagaatttggcaacattgtgctccatgcccgacaggataccagaacgacattattgaaggatgtcgcccgtattgaactggccgctgaaaattatgccatgcgtacttacctggataaaaagcctgcggtagcgctggccatacaggagtctccgggcgcaaatgctctggaaattgcctcacaagtaagtcgcacaatgaaagatctgaaaaaacagttccctgaaggactggattaccagatagtttataatccaaccaaatcagtcagggcgggtatagaagctgtgcttcatactctttttgaggccatactcctcgtggtactggttgtttttcttttcctccagacctggcgagcatcaatcattcctctgctggctgttcccgtttcgataacaggcacaatggcatttctgtacctttttgggttttcaatcaatgccctgagcctttttggcctcgtcctggctattggcattgtcgttgatgatgccattgttgttgttgaaaatgtagaaagaaacatagaaagaggcatgacgccatatcatgccgcctgcaaggctatgcaggaagtcagtagtcccattattgcgatcgcgctgacgctgagtgccgtatttgttccgctggcttttatgagtggcctgaccgggaggttttatcagcagtttgcagtgacaatagccgtttcaacgattatctccgctattaactcccttacgctctcaccggctctctctgccatgctgctaaagtcacgtgattcagacaacgactggcttacgcgcattatgcatcgtagttgtggacggttctttactgttttcaaccgcctgttcaacagtagtgccaggcgatatgaaaaaggtgttggcgcgcttggccagcgcaagattctgattatggtgatttatggcattctgctggcaattacgctgttactgggcaggtctgtacctggggggtttatccctgctcaggataaagaataccttatcagttttgtgcagcttcctgctggcgcatcattgtccagaacagaccgggtactggaaaaaatgaatgaaatagcacgaagtgagccaggagtatcttccacatcttcttatgctggattgtctgtaaacggcaccaccacaagccctggttccggtctgacatttgtcctcctcaagccttttgagcaacggcctggcatcagcgcagatgatgttgccgcctctctgaatgccagatatcagtcacttcatggcgcagattttgcggccgttttcccggcaccacccgttatgggtctgggttccctggggggattcaaattgcagcttgaagacagaggaaatatcggttacgacggaatggccgaagtacttcgacgctttcaggcagaagcagctaaatcacctgtgctgacgccacttttttcaacataccagaataattttccacaaattaatgtcgatattgaccgtaatcgcgccaaacaacttggggtgaacatcagtgatatcaccgagacattacaatcctatcttggctcatattatataaatgatttcaatataataggtcgtgtatatcaggtaagaatgcaggccgacgcagagttcagggcgaccccggaggatatactgaaactacagacccgaaatgccgatggcaatatggtaccgctgtctgccatagcccgtattgagccgacacacggtcctgagttggttacccgttataacggttttacagcggtcgatcttagtggcgctcctgctccaggctattcttcaagtcaggcgatggaagagattgaacgtatagcgatgaaaacacttccacccggcgtagagtatgagtggacagacctgacctaccagcaaattcttgcaggcaacagtgccgtctggatttttccactctgtgtattattggtattcttggtactggctgcccagtatgaaagccttacgctccctttggctgtcattatgattgtcccaatgagtatcctttctgcacttaccggggtgtggctgactcatggggacaataatatctttacgcaaattggatttatcgtcctggtcgggctcgcatctaaaaatgccattcttatcgttgaatttgcccgtgaacttgagctttcaggtaagtctgcctttaacgcggtgaaagaggcatgccgtctcaggctgcgtccaattctgatgacctcactggctttcatcatgggtgtaatccccctgatggtatcgcatggagcaggcgctgagatgcgtcaggcaattgggatatcagtattctttggcatgctcggcgtcaccctttttggcttgtttatgacccccgtgttctacctgttagcccgacaaatatcagggaaaccactgcactcggccactttaccggacgcgcctgaggaacggccgataacagaacaggcttcagactaa

SEQ ID NO: 99011 - DNA, 1170 bp, Enterobacter aerogenes
atgactgtatcgttcaaacttcgcatgttgtgcttaaccggtacactggctgtcatcgggctgttcctttcaaaacagagcgtcatacccggcgcgtatgcacttgagacatcaaactttaaaacggtgcgaactacgtccgcagttgttcatacggtaaacgactgggtcgaattctcgggaaaactggaagccaccgatgaggtcactgtacgttcaaaagttacaggctcgattgtggatgttaagttcagggatggtcagttggtcaggaaaggcgatattttatttattatcgatccagccccttataagactgaactggcccgggctcgtgcagcatacgcgcaggcaaaagcgaagcaggacttggcattgctggatctgtcccggggtaaaaaacttatcgggacccatgctatctcacagcgcgattatgacgttctgaacaatgccgcccgggaatcgaaagcagccagggagattgccgaagctgaggtcgagagcgccaggctcagcgaaagctatacccggatcaccgcaccggtaactggccgtatttccagagcagaactgacagtcggtaatctggtcgcagccggtattgacagtccagttcttgcatccattgttgctcttgatcccttgtatgtcgcttttaatgcggatgaacgaacctatcttaattatatcgacaagctttcaaataaagacaaacctgaagtgctggtaggactggccgatgaaaaagattatccacataaagccattcttcattctgtggataatcatctcagtactgaaaccggcactatcaggatgcgcgcacttcttgataatccatcatcaaggttgcttcccggtttacaggcccgggtcagactccaggcaagcaaatcttatacagcagtattgattgaccagacactgatccgcaccgaccaggacagacgctatgttctggtagtcggaaacaatgacaaagttgaatatcgccccctcgaactgggaaacagacagggggaactgattgttgtgaaaaaaggcctcaataagggtgacagagttatttccggtggggcgcagttggtcagtcccggtgaaacagtcgttgtcagcaaagacgaatccccttcttcaaaatcccgggaaggaaataagtcatcatga

SEQ ID NO: 99012 - DNA, 216 bp, Enterobacter aerogenes
atgaaaatgaaaaacgtggctgtggcctgtgcgctgatggcgggaatgacttttactgcatcttctgctttcgctgcaaaaaatgttgaaccgactaacggtaaaatccacttcaccggctctctcgttaattccgcatgtggtctggcgccagaatccagcccggtgcaggtgaatttcggcgagatcccaacttctcagggctttgttgaataa

SEQ ID NO: 99013 - DNA, 201 bp, Enterobacter aerogenes
atgaagctgttgctacccccgaacttgtttgctatctggatcggtatcctgaagttagtgatgatgaagacgtttatcctgaatacgttgagcaagaagataaatttggtgatattatcccatttgaaattaaatttaatgattcagcatctcaatatgatattttttcatttagagaaacattattgggtggttatataa

SEQ ID NO: 99014 - DNA, 567 bp, Enterobacter aerogenes
atgaatttcgtagagggctgtaaatcagttcaggaagttaaagcggtagcggtggagctactcaaacaaggcaaggggctgacgctttaccgtgacgcctggttgctgggttatgaattaatgctgagggtgtcggatctgcgctctatccgttatgacgacatcaaaggcgatcaccttgtcctgtcccaacagaaaacgggtgaatctgtccgtgtgaggctcaccgataccgctaaacgcatcatagcggcccggagagaggcgaaccctgatcatgtatacctcttacagttggacagccacaggagcaagggaaagcctgtgagccgctccaaattgcatgaggaaattagctacgccggggaaaagctggggctgaatctttcgacccacagcatgaggaagagtaaaccaactatcggatatgacaatggggaggatatagccgtaatcagtaaggcattggggcacaaatcgttatccagtacgctccattacattggggccacacaacgcaaagtagatgatttcagtaataaatattcaatagaagatctgttatga

SEQ ID NO: 99015 - DNA, 2139 bp, Enterobacter aerogenes
atggcaggtggaaacgtgatcattacgtctacagtaaacaagacccgttttacggtagatggggcaagctacaaaaagacggttgaccgtatcaaacaggtggggaaagagtgggacaaagtagcgtccaagatgaaaccgctacgcctcaagtttgaggaaaacgcctacaccaagatccgccggaaacagcaggacgccgccgcaaaagcagcactggcagaagttaaagccaaagcagcagcagaggccaaagcagccaaagcacagatcgcagcggagcgtaagatccagacaatccgcgctaaagctatccgcttcagcacttcagccgctaacgccaacgtgaccccggcccaacgtgctggacacctccaggagtttggacagcttacgcgccagtatcacgccggggctatggcattgcaggaatataacgcccgtgtgtcaaaacttcagcaaaccatgcgccaacaaggccgggtaggcatgaggggagccacaattccagtaaccgccaaagttaacaaactggatacctccatgatcgagggtgcaggcgggacgatcaccattgccgcaactgtggcgctctccggtaagatcatgaccaccggacaggattttgaagccgcgctttctggtctaacagcgatcaccggttccacagataaggccgctaaagagtttgattatctccgtgatcaatccaaccgtttggggctggacctcctgaagacctcaaaggattacacccagtttgccgccgctgttggtgacaaactccctaaagaccagatgcgatccatctttgagggtgccagtgaatggggccttgttactggtgcagacgctgaatcacaaagccgcgctttgaaaagtttgaaccaaatgatgtctaagggaacggtcatgagtgaagaactcaaaggccagcttgctgaggctctcccgggcgctgtgcgtctgttcgttaaggctctcaaccagatgaaagggacaaccaaccttacagaaaaggatctgtttgacctgatgcaacaagggaagctgttctctaaggacatactcccggaagtggctaaacagatgaaagccgcagctcgtaacggcggcgctctggataaggctatgaagtccaaccgggcaagctggcagcgcctgcaaaccagtatgcagaacgctatgaatatcttctttacttctggctttggtaactcactaaccagcgctttcgacgctatcagcaccgctgttaacggctctggtggggcctttgagatgttcgggcatatcgccgggaaaatcgttgagggtgccacagatgcgtttacagagttgcacgacactgtgatcctgaccttccgcattattgagtattacgccgctaagatggggatcactggtgagcagcttaaatcctggggagaaatggcagcatacgccgccggggtgactctgttcgctggctctatctggaagttgggcggggcctttaaatggttgttgaccatgctcaacccgctaaccaaattgctgggggtcatgaaagggatcgccgctattggtggcattgaagccgctacaactggcggatctggtggggaaggtaaagacaagccaaacaaaccgggccggggtccgaaagttggcaaggtaggcggcgcggcggctctctctggcggtcctgttggctggggcattgcgatcggttcggtaggtggggattatgcctgggataaagtcatggacgctaacgacgccatgtatggacaggacaccaccgccggaggcaatctgaagaaagatagcccgctgggtaaactgtgggatttcatccacagcccagaccttccgactaatccagactttgccaaaccaacagataaaacagggtgggtaagctcttactccaatccgggttatgttcctcctgcgccgacgattacagcgccacagcttaaagttgatatggcaggtaatccactgatgacgccgccagcgtggctaaaccagccgcttaacgtgaacgtcaatgtgaaagtgcaggatgggcaggttagggatctggtccgctctgaagttgagaccaacaaccagcaggctttcaacatgctgatgcagggcgggccgaactaa

SEQ ID NO: 99016 - DNA, 375 bp, Enterobacter aerogenes
atggaagcatttaagaacctcctcaatcagttggaaattcagaaggcagaacaacgccaacgggaagcccaagaggcaaccaaacagaacgaactccgcaaggcacaggccgatctgtcactggatgaggctatcgctctgtacgccacccagttggaagcctccaccactgccgtagacagcgcccagaagggccgcgccattaagagccggggaattgctctgtgtcacaaggatcagggattcagcgccaacggtcgcccggtctctctcctgaccaaatccgcagacctgccagcaggtaaacgccgggtaatcattaacaaggcagcagggcgcaccctgaaggccaccaaactggaaggggatgaataa

SEQ ID NO: 99017 - DNA, 522 bp, Enterobacter aerogenes
atgattgccgctctctctgacaagctgactaccagcaagccacgcgccccgatggatgaaaagaagctaacaacggatcagattgtccaaatcaggcgggcctgtgtgatggggcatagtgctatggcgatctgtgcagctttcaaggtgtcccttgcgtatgccctgaagatgaaacgggaatacaaccccgtgaaatatcaaaaggtgcccctgacactaccggaaaaggttgtgatgattcagcagatgaaccaggacggcctcccggatcagatgattggtgagatgttggggattaatatcaagactgtggagactctctcccaggtgacccccctccgctaccttgtggagcagatgcttccatatgatcaggttttggctaacttacgcgcccctcgatatgtggctaacccggtttacaagttggggaccagcatgaccagagtccgcaagattatcagcgcaggacggaaggaactccgccccttgatcatctcctccaaaagagccgcataa

SEQ ID NO: 99018 - DNA, 657 bp, Enterobacter aerogenes
atgaccgaatttctaaataaactctactccaaagactttgtgaaaacgtcccgaaccttgcgccgcttgaaaacgtacaacggcgtaaaagtctctttagagatggttctgacatacgacttgatcgcttcattcaaccgtgatcagcgtatggctaacggtcacattaagcaggggatgccgtccgcttttggtcaggcggaattagctgattttctcatgtgctcactgagaacggcacgcaacgtgatcggcgctttgaaaaaggcaggtctgatcgagtgtgtcggacgtggcccgcatgatgtggatctgttggtatgcctgcctattgtcgaagctaacacggaagaagcagcgcctacgcctaagccgtccgccacacgtccacagcgggccactgcggagcgggaagaggtgcaggagtccaaccacacagcggagcctgtagaagcgcctgagattgtgccagcaacgccagaacctgccgcgccgatcacattgatgacggtctacagtgagagggtggaaatggtggagcaagctgatccccaaccgggggaagtggttcctgtggggatgccagcggcgacgccatacccaagaggcgaagtcaaggagccgtcgagagagtgggatttagacccagctttttga

SEQ ID NO: 99019 - DNA, 186 bp, Enterobacter aerogenes
gtgagtaaaaataaagagttggggatcagcttcgatccctatgtgatggagcagcttttcgcgttggcctccacccgtgaacatggcagcgttcacaccattgttaagaaagcagtcagccagtttttgaaaaccgttaattccgattctgttaaggattcccacaatgaccgaatttctaaataa

SEQ ID NO: 99020 - DNA, 252 bp, Enterobacter aerogenes
atgagcgagtatcagccttatgcagatctgagtgattcccctgtgttgtcagcgtatgcacagcagacgatcaaccagttggaccccaccctgtacgatgacatttacgaaatgttgacgcagctaccgccgtccagaatggtgactattggcaacccggcgatcaccgccccggcgtcatggtggggtgattggttcggccataacctcaccgctgaagacatcgcagaattaaaggagatttgcctgtga

SEQ ID NO: 99021 - DNA, 435 bp, Enterobacter aerogenes
atgagtacacaaaattcttacactgatgttaacgacatggtgaaccgcattgatcagcgtgacattacacgccggactctggagcagtaccggagccgttttaaagcacaaggccggatgaaagaagttgaagcgattacccaagccctggggatgaccagtaatcgcgcctctgccgtattacgtcagtctcagcgcctcgccgggaaaattacagagatggacgcagagaaagcattagagcttaaagcagccgttgcgctgttcgcttgcaagtctacagacttgcaagcaagtgttgtgctcgcgttccgatctctctttgaggctaaaggcgtcccgatggaatacgacgaagtgatggcctttatcatgctgcaagcggcggatcagtttgagcgtatcaccggagagttgcccgttatcgttcactaa

SEQ ID NO: 99022 - DNA, 372 bp, Enterobacter aerogenes
atgaaaacttctgagcgctacccggtaacgcaaggcgacgtaatcgtgaattacgcctccagcctgtttgaccgcaccgaagtaaccgccccaagcctcccggctgatgtctattgtggtgacattctggacagcaaaacttttgccctgttcgactccgccgccgctgacgctggcaagccgatcattaacctttccaatatgtccgccgatggcaagcccaaaacgctggttatcgtggatcgccatgttgtgattaccgattttgctctacgtgctaaagacgccgcgagcaaaaaagccgcactggaagcgctgacagcctccggtgacattcgcctggcagttaacgccgattacttcaaagcataa

SEQ ID NO: 99023 - DNA, 1020 bp, Enterobacter aerogenes
atggctattgattttaaacagtttgaagcgctggatactgttacagctattaaaaacatgccagcaggcaattacctgatcactgatctgggtatcttctccggtgttaactccaccactccaaacgctcaagttctggacatcgtagagagtcaagtctccgaactggaacaggtagcccgctacggcaccgaagttaactccatcaaaatggataagcctctgttgcgtgaccaggagatcccacactacgccaccgaagcggacgtaaaaaccgctgattggcaaggtctgatcagcccggctaacccggatcaggttgcggctatttctgaagtgatcgcgtctaaagctatccgtatgcgtaaccatcacctggaaacggttgaaagtacgctggcccgcgccctgttcaaacaggaagcgaaagcggctaagacagacgacggcgacgtagattttaacgctgtgtttggtactgccccgctggattttgagctggacggatcagcaggcgctaacgtctatgcacagcttgcgaagattcgccgcatgttggttaaagagtacggcgcgagccgatcctatctggatcgcttctattgcttctgctccccggatctatatgacatcctggcgagccacccggaagtaaccagcctgatcaccaacaaagtggcggaagctgcaaaaggcgctctgatcccggttaacacggcgggttatgactccttcagcattggcaacattactttcattctggcggacgatgaccgctacgaaatcgcggaaggttccggcctgttcgttcctaagtttaacggcgctgaccgtaacccgttcaaactggttcacggcccggcttcccgcaatcaggacattgccgcgaaaggcgtgatcagtccgttctaccagaaagtaatgactgaccgttacggcatggtgaccattcaccaggaggcgagcttcatccctctgaacctgcgcccgaactacacgctgaacgtcaagctgaagtaa

SEQ ID NO: 99024 - DNA, 192 bp, Enterobacter aerogenes
atgaaagtttcaattaatatccccggcgctggtcaagtctatgtatctggcacggcggtagtaattaaccgtaaggcgctgtgtaaggagttggggatctgtaatatcacactatgtcgcctagaggcgcaatacgggtttgaacatgctctaagtgtgctgttgtctaaaaatcgtaagctagtaaattaa

SEQ ID NO: 99025 - DNA, 651 bp, Enterobacter aerogenes
atgaaatcacgagagctaaagactattcatgatctgataattacaaattatcaaaagcatgatttaggaaatggccgttatctacatactttccagccagcaacaactgatactacctatcagtttgaagccaacattgaggatgtagtcatcgaaggagaaagatataatattggattcactgagcaaaatggtataaagactattgatacatcatgtttatcaaagtcatctgttctagacaaagactttagctatcaatatgctcgtaatatgtctaaacagaaacatgttgaaaataaaggtaaaaatgattctagggtaagacattctgagtccgatggctactattgggggcggaaatatgcttggcgagaatttggattagctctccctcgagaggtgtttgagcgctacttaatagagtgtattggtcatccttatgtcgaatgtcaggtcataactgaaggatatccacaaggtgacgattctatcgcttttttagatgatggtctagctgatgccattgatgatttaatccaaactgctgtgattgttaataaagggccttattttaaatcaccattatattatggtggtgataaaaaatttacgattaaaggtgtccctgctataaccgacaaaaaatga

SEQ ID NO: 99026 - DNA, 1095 bp, Enterobacter aerogenes
ttggcttctttacaagttttgaatgctatagcagttagaatcacacctcctgagggcgagcagaaggattggtcctacaagcttggtgccctttggccatgtgatcaggatgaggtaatcacattcacaacaaaagtagatgcaagatttcaaagaagcagtaagtcttacgctaagtttcaaaaaccttatccaggaagctctttcccctctaagctaactaattttttagagaaacgaacctcatttgaagtttttgtagatgactttattcaaaagaaattaattatctcagcgaagcaatccagagcaagtaatggtgcaattctggtgtttactcattatcagcttcaacatgaagatgatgaaggtaatatacataaagactttgaaaggcttttagttttaatgctgaaaaatacagatgcattaagatttaaagaaaacttgcaactaaatcctgtcgatattattgatttggataagtttttacagggtgcaagagttgatataatcaggttcatgtcagaagatgacgaagatgatgataaaaacaacctttgctttattcgcggaactggtgatgttaggaaatattttacggaatcaataggtgccgaagatattatttcaaataaaaccagtagcgaacaatgcattaaagctttagaagagttttctcatcaaaaagattttggtcgtgctttacgagaaaaaatagaatctaaggttcaagaattatttaataattgcaaacgtggtcaatctataactttagataagattcaaacgcagattgacgcaataatccctgtagatttagcagagcataaaaatacctttgtcgatttcgtaaatgaaaatggttttgaagttaacgaagaatttgaagtttcagcaagtgataaaaaacaatatgaatggttagatattgaaaccagcattgctaaaatgagtgtaaaaaaacatcagataggtcttcctggctcaaatagacctatcgtttttgacgcagaaacaaatgaagtgaaactgactcaaaaaattgatgatccaataatcattgctcgattaaaagaacttgcaaatgaataa

SEQ ID NO: 99027 - DNA, 1245 bp, Enterobacter aerogenes
atgaataatcaagaaattattaacctcctgcttaaggtcaagcaagaggttataaagattgagtttgataacccataccatgtatgggtttttgataattcctcttattcaatgatagaggatgatattactcgtctgcaagaaattgcctgtctagaattagaaaaaactaaacgagcagaacaaacaaaagtaacgctattattaactacagatatatgctggtattcttctgttgatgactatttcaaagctttaaggttaagaataaaaaacaacaaagaaaacattgatggcttttacatagaaaatctgcaacaagaagaaattgaaagcatttcaaattcatcaaaagcatatatacaatggtgtgagatcttttcgaaaatatcagaccatgtagaatatgacgactccaatgcatggccaagttatatatttgtaatggagggtggtaaatctaagaagataacgacttataatcttccattaaagaacattgaaaaggacttcctaaactcaattgatattagcccatgtgatgtatcaacgctaacaagcgtcgatctacactcatatgaaagaaagttagttttaagatcatcactgattgaactttacaatgattcaaatgataaaatttcattccttagttcaatattacaatcacctaaaaagctttgggatttattttcaataaattatgaaatatatatcaacaaatattccataaacaaaataatacatgaggtcgaaacgcaaaaattagacttcctctcgaagctgaactcacttgttcaggagcatcagactaaatctttatcaattccagccgttctggttagcaccgccataattaaaggctggacaccttcgggtctcttacttatttttatagcgatgcttcttacatgtgctgttgtcattttaggtattcgtaatgcaagaaattcacttgcagatataattgaatcatcgaataaaacaatggttctttttacaaaggaaaacgttgatgaaaatgatgctgcattaactaaaaaaataaaccagattacaacagatgctgttgagaagcttaaaattaaaaagagaagtgctgaaaagaccttaacgatactggaaggtttagttttcttcggtgtatcggtttggacgatgtttgtattgtatcaattcaaagatgacataatttctaaagcattaactataatccaatcagtaaaagacttccttcctaattaa

SEQ ID NO: 99028 - DNA, 438 bp, Enterobacter aerogenes
atggtcgaaagtaatacttttaataagatcgttgtaagtaagcattcccgtaatggaagcgttaacgaagcgaagctctcacacgaccagcttcgctctcattgcgtcagtgtcagattaaatgatgaagagctaacgcttctcaatgagaaacgaggccgtcatcgtaaaggcgagtggcttcgcttatcttcacttaataaacttcctgctgtcgttccagccatcaattttgaagcctggaaaacccttggtgagatttcgcagaagctaaacaagcttgtggctcatcttgatagcaagagctatgaaagccctctgacgcaaactgaactcttcgccgtaaagcgccaggtctcagagcttcgcttgcatttaattaccgctgacctgtggagagcttcccatgaaggggatgcagaagataaagcgaggtaa

SEQ ID NO: 99029 - DNA, 414 bp, Enterobacter aerogenes
atggataaaacaaatattaacttaatggaaaggtatctattactgcttgatcgattcgttgataaactcgctgaatctggtttctcagagcaacgaattatcgaacaatcatatcttttttgtgcaggattttatatcaaataccaaagtggtatcgaaaaaatgaccttctccaacagggaggttgttttaacctttctgctactttcatattatagtcatataaataaactggatgatgatttgatcaacaaagagcgtatgaaaaatgtatgttcttcattgattaactttatagtcagtaatggtagccgaacagagaaagtctatgctaatgagaaaaggaaatatgatgcttcgaccctaaaaagatcgttatccatcaaagagaagaaaagaaaatatggattgtaa

SEQ ID NO: 99030 - DNA, 399 bp, Enterobacter aerogenes
atggctaagcatataaatggttatcatgagaagaagattgtagatgttattaacacatggtctatagatgaaaaactaacctgggacgctttgtgcgacaggttagtaaggattattgggaaaagaccatcaagacaatccttaagtagtcatgtaaggattgcagaaagcttcagtgtgaaaaaagccactatcaaatctggtgcattacacactgtaaaacctgctaatttaaaagtggcttctcaacgaattagaagacttgaagcagaaaatgaagctttgaaggcattaaatgaacgctatttagaacagttcaaagtgtggctttataatgctcaccttaaacaaataacgattgaagaacttaataatccattacctgcaaaatacctttaa

SEQ ID NO: 99031 - DNA, 1404 bp, Enterobacter aerogenes
atgttgcatgtgcattcattcaataaatctaagacgaaacactcaacattatcaatgttgaagattgtagaattcgttttactgaaaatcaatatgcaagctaatgtaagctattgcaacaattcagtttttgatgaatgcataagaatagcctctgaaaagtattctaaagcacatgcatttgctattgggaaagaacttgagaaattgagttcatttttaagtgataataggatgactaattcatcttatttattttgggtaaatccaattagatataggattactcagtcttggactggttatgattcttcacttgaaggccatcctagattgcctgatatcaaatcagttattgcgattgctgagattttttcaaagagggatgaacaattatctttaagagacatatttactacatctgtgcttgctttacttatgtgcgcaccgagtaggatatcagaaattttagctttgccagcggattgtgaaattacagaatgtgatggaaagggcattcaaagatacggtttgagatttttttcagcaaaagggtatgaaggtaatataaaatggattccaactctaatgatacctgtagctaaaaaggcaattaccagattaaaagaattatcaagtcaagcgaggttattggctgctgaaattcagaaaaatcactctaattcaacgatgggaacccttaaagagaatatacctcaagatttcccttggtatgatagagagaagaaaattgaatattctaatgcgctttgcttgttaactgaaggacagttaaatcaaaacaaaaagaaaatgttagataagttattcagacctacaatgagtttttttaaaactgacattgttgattctgattatataaaaggacattttaatatctttaaaagacatggttatataaatgaagatggtagcccatatttgctgagaacacatcaactgaggcatcttctcaacacatttgctcaaataaatggtatggatgaatttagtattgctcgctggtctggacgtaagtttatttctcaaaatgtttcttatgaccacagatcgcatcttcaaatgtctaaagcaataagagaacaaaagttatcagtgtgtgttaatgagcacagaaaaaaggatattccagtggtggatcttgacgagtttgattcacttagtagtggtgcagtacttgtatcaaaacatggctactgcaagcactcatatgcgtttaagccgtgtgaacattatccgattgagaattctggtttagataacgaaacgatttcaaacattcacgataaaattttaaaaagaacactgtatgataaaaatgatgggaacataaatgctgatagatggtatgaattccataagagaataaaaaaaggagaataa

SEQ ID NO: 99032 - DNA, 2184 bp, Enterobacter aerogenes
atgactgacatatttaacatcaaagttaaaaaaactctgctggcgttaattgtttgtttgatttttattccgctatctcgattaatttctccgcaaacccttatcgacggaaaacaaatttatctggcatggctgccattaagcgtaatgtacgcaaccatttgtatttttggccgttacgccgttgcccccttgattgttgcgtttgcaattactaatacatttgtaatagatctaacttatacacaggccgctatcctgttattttgtcagttattttccgtctttttcaccttcgctatcatgcgctcgttgtcggggaaaaaatggcgtagcggaaggcctgccaagcgccatatcggtcgccgtatcttctggggcggcttctttgcccccattctgcttaagctgacgatgtatctggcggggcgcttcttcgccttcccgcttgccgtctccagctacttcagtaccgcgtcgatcatctattccgttattgatatccaggcgttgatatgcgccgccttaatctttactaccgctttctattacccgatgagaatgatggtttgcccacgttaccggcgggtgttttggttgcgtcattgtcaaccgtggctggtgaaaaaaagaagagcctttaccatatattggtttatggcattaatcacaatcatgctggtgctttgcgcgccttttgattcagatttaattgctggatatctggtgccgattatttttattctctacttcatcggtatcggccggctggggcatgaattaattcgcattacctgggctatttcggcattctttttagtggcctataacaaaaattttctccagggcgttcaatcggggtactccttgtcatttgtcctgtcggtgttaatttcattcacgatttgtttgttttacatgacggatatttattcgcgtagcgagagaattaaacagcgctggcgcgatcgggctgaagaagatccgttaaccgggttacccaatctgcgggcgctggaagggcatttgcgccaatcgcctcgggttgttattagcagcctgcgtatcgaaaacctggacttccttagccgtcactacggcatgatgatgcgtgtagagtgcaaacggcaaatagcccgccgtctgcagccgctcctggatcaccacgataaaatttatcagctcccgggtagcgagttattgctggtgatagaagggccggaaccggcggcacggttaaaccacatcgtctcgatgcttaaccacgctaaatttaactggcataaccaggatctggatttagagtttggcgcggcgtggggtagttacagcggcattgagaccgaattacaccccatgcttggccagcttagctggttatcggagcaggctggcgccgtgcagcgggtgctggcgttagatatcgcgcaggaagaggtttccgatcaaacgaccgaacaggtacggatgctgacgaaaataaaacaagcgctgaacgagcgtagcctcctgctgtatgcgcagccgattcagaacgcagaaggggagggctattacgaaatcctcacccgtatgcgttgcggcgagacgattatcacgccggatcgttttattccgcttattgcgcagttcaacctcagccagcgtttcgatatgctggttctggaaacgctgttcagccagatcgatcaccatcctggccgacgcttctccgtcaatttgctgccgtatacgctgatgcaaaaggatagcgccgctcagattatcgcactgtttaagcgttatcgcgtatcgcctgcgtatattacgattgagataaccgaggagcaggcgttctcgaatgcggataccagcatgcataatattcagctgctgagtgagttcggttgcgctatcgccattgatgacttcggtaccggttacgcgaactatgagcgtctgaagagcctgcaggcggatatcgtaaaaattgacggctgcttcgtgcacgaaatcgagagcgaccagcttgatgcgattatcgtcaaatccataatcgaaatcgcgcgggcgaaacagcttacggtagtcgcagagtacgtcgagacagaggcgcaaaaggcgatgctgttggcgctgggcgtcgattatttacagggttacctgattggcaaaccgcagccgttaagcgaattaaaggcgtaa

SEQ ID NO: 99033 - DNA, 624 bp, Enterobacter aerogenes
  misc_feature (575)..(584): n is a, c, g, or t
atgtctgaggttatcaggaacgatatctttcattttgcttcaaaaaagaatgtgcccacagggttctatcggttatgcaaacaaaaaccagtgaaccctttattctttttgcccaatttgctggtagttgctgaaagcaataatgatgccattctaccatgctttgattactctgttattagcactgaattatttgagtcaattgaagatggagatattggggtaattaacaatggcaatatgatccgcgttattctgtcccgcagagccaatcataatactgtcttagtaacggaacgctgcaataacttgtgtctcttttgttcgcagccaccaaagaaatcaaatgatgactggctacttacccaatcagctcttgctatcgcttcatttgggttgaatggagtagttggggtcagcggtggtgaacctttgctgtatggagatgatttccttaacttcattgattttatcatcgagaattcaccagatactgctttgcatgttttaacaaatggacgcaaatttgctgataccaactttactcatgaaatggcaaagcgaagtaaaaagannnnnnnnnnttggtataccgctctactcatcaagaccacttgtgcatga

SEQ ID NO: 99034 - DNA, 450 bp, Enterobacter aerogenes
atgaaaagtaataatttggctttaccgtttttggctcgattcgctaccgagagaacagagggggaaaacattcccggttggtactcgtatgagcaagatctttgggtagttgaagaggacagtaaagaaatcccaataatctctaaatatactcttacacagacagtaactaaaactaaagtaaggcaagaaagcgatgatgattcatcagtttctatgcttgaattaaccactaaaacagaggctcaactagaaagggatgattccgatttaagtatgaaccacctattagagttaatgaccaaaacagatacaatccaagaacgagacgatgataactggtgtgcaggaaatattctggagttatctattaaaacgtttgtttcagtagaaagagatgaggatttctctatgcatacttatgatcaccaaagggaaggtttaatttaa

SEQ ID NO: 99035 - DNA, 963 bp, Enterobacter aerogenes
atgatattgttggtgactaataagcgcgatataactatggattatatcgtggttgagttaaaaaaacgaggcatcaagtacttccgtcttaatacagaagacttgcctagatcatactgttctatgtcagattcatcatttatggattggagtatatctattaatggaaatacaataaaaggtatcgatgttaaagccgcctactttcgtagacctgggaatcccgaagttcctgcctcaataactgatcctggtattgctgattacattcagggagaatggaatagtttccttaagagtctttattcgcgacttgattctttttggttttgctcgcctactaatataattttagctgaagataaaccaaagcaactggtcgttgccaaacgtttgggttttaatattccagagtcaaccatcactaattcatttgaagaaataaaaagttgtagcaatagctttcaaatgatcgctaagcctttacgacaagctctatttataaataatgatgctgaaagtatcatttttaccaacagattaggtcaactagatgagaccgattcgagttcactttctttggtacctattatagttcagcatgagataataaaaaagtttgatgttagagtaacagtagttgggaaaagagttttttctgttgcaatttactcccaaagccataaagaaacagaggtagactggcgcaaggggtctcgaattgacttaaaacataaacctttagagctacctacatcattgagttctaagtgtatagatctagtcgaatcacttaatcttcgatttggggcaatagattttatttgcgacgaagatgatgttttttggtttttagaaattaatcctaacggtcaatgggcatggatagaaaaccagacaggtcttcctattgctagttctatagtcgatgaacttatgaggatcggtagatatgagttttga

SEQ ID NO: 99036 - DNA, 570 bp, Enterobacter aerogenes; identical to SEQ ID NO: 91951

SEQ ID NO: 99037 - DNA, 1719 bp, Enterobacter aerogenes; identical to SEQ ID NO: 97712

SEQ ID NO: 99038 - DNA, 735 bp, Enterobacter aerogenes
atgaatgagttggctcttttcgcaggcgctggcggaggaatacttggcggaaacctccttggttggagaacagtttgcgcagttgaacgtgatgcctacgccgcacaagttctcgcgcaacgacaaaatgatggaattctcaagcctttcccgatttggtctaacgtgtgcagttttgacgggaaaccatggagaggaattattgacatcgtttctggcgggtttccgtgccaagacatcagcgcaaatggtcacggtgccggcattgatggcagacgctcaggactgtggtctgaaatggcgcgaatcgtcagtgaggtacgacctaaattcgtcttcgtggaaaactctccacgactcaggggaaaaggtcttgccgtggtcatcagtgaccttgccgaaatggggtatggctgcgagtggtttcgtctttcggcatcgaactgtggagcgccccatgaaagagacaggatgtggattgtggcctacagcgaaggcaacgatacgcggagactgtccaagcgagcggctgcgcagaacaccagacttgccgagtgcgataaagatgcgtccgttgccggatgggtcgcagccacgacaggatggacaactgaacccggaatgggtcgagtggttcatgggttggcccatcgggtggaccgaattaaagcccttggcaatggacaggttccgcgagtggcggcaacagcattctctttgctctgtggaaaatga

SEQ ID NO: 99039 - DNA, 279 bp, Enterobacter aerogenes
atgggtgatgcattaggtctgattgaaaccaaaggtctggtggcctgcattgaagccgcggacgcgatgtgtaaagccgccaacgtcgagcttatcggctatgaaaacgtcggctccggcctggtcaccgcgatggtgaaaggcgacgtcggcgcggtcaacgcggcggtcgactccggcgtggaagcggcgaaacgcatcggcgaagtcgtcagctctcgcgtcattgcgcgtccacataacgacatcgaaaaaatcgcggcgcagcacaaagcatga

SEQ ID NO: 99040 - DNA, 216 bp, Enterobacter aerogenes
atgaaaaaccaatcttccacacaaaccgcaattcctacaactggctatatccgccgatatcgtttggctgaaatgttggggatgagcttatccactctggatcgtaaagtccgtaacgggactttgccaaagcctacaaaactaggcgaaaaaatcacggcatttgatgctgtggagatcaatcaatggttggccgaacgccgtcattctgcgtaa

SEQ ID NO: 99041 - DNA, 1599 bp, Enterobacter aerogenes
atgtctacagggaaatcactacttgcactggcactaagcgcactgctgccagccggcgccgcgttggctgcggccaacgacacgctggtctactgttcggaagcctcgccggaatcctttaacccgcaaatcgccagctccggtccttcattcgttgccagctcacaggtgctctataaccgcctgataacctttgatccgcttaaaaacacaccgattccgtcgctggcgaccgaatggaaagtgtccccggatggtaaaacctggacctttacgctgcgtaagggcgtgcagttcaacagcaataaatactttaagccgacccgcgatttcaatgcagatgatgtgctgttctcggtgctgcgccagcaggatccgcagcatccttatcacaacgtgtcgcaaggcaattatgaatatttccacgacgttggtcttgataagctgattaaagaagtgaagaagatcgatgattaccacgttcagtttgtgctgagcgagcccaatgcggcgtttctcgccgattgggggatggacttcgcttcgattctttctgctgaatatgccgatgcgatgttgaaaaaagggacgccggaatacgtcgatagctggcctattggtaccggcccctatgcgctgcagcagtacaaagtggattcacaaatccgctatatcgccaatccgcattattgggaaggtgaggtgccgactaaacatctgatcttctccatcacgccgaacgttgagactcgtctggctaagctgcagaccaacgaatgccagatcattcccgcgccatcgccggtacagttcccggtgattaaagggaataaagatctggcgttacacgcggtggaggcgttgaacgtggggtatctggcgtttaatacgcaaaagaaaccgtttgataacgtgctggtacgtcaggcgctgaactacgccaccgacaagcaggcgattgtgaaagcggtcttcctggattccggcaacgtggcgaaatcgccgatcccggccaatatgctcggttacaaaaaggatctgccggattacgactacaatccgcagaaagcgaaagcgttacttaagcaggccgggttggagaagggcgcagaagtgaccctgtggtcgatgccggtacagcgcccgtataacccgaactcgaagcgtgtcgctgaaatgattcagaacgactggagcaaagtcggcattaaagcgaaaatcgtcagctatgagtggggcgaatacctttccggtatgcgcaagggcgagcatgatagcgcgctgtttggctggatgtccgataacggcgatccggacaacttcgctggtacgctgctcagctgtgataatatcaaaaccggctccaacgtagcgcgctggtgcgataagtcctatgacgcgctggtgaaaaaagcgcttctggtgagcgatccgcaggcccgcgacaaactctaccaacaggctcaggaaattttctatcagcaggcgccgtggatcacgctggcgacgggtaaaactttctacgccacccgcagcaacgtcagcggctatagcgtgagtctgatgggaagcgatttttccaaagctaagctgaattga

SEQ ID NO: 99042 - DNA, 522 bp, Enterobacter aerogenes
atgaacagtaaggcgttgccgttaattgttgttgtgataactctttctgggtgctctgggccaggacaggcaaggcacactcaatgccaggaacttaaggaaaatgcttacggtgagagttggggggctgccttatccggtggcgtagggcagataagagcagacattgacaaggctagatatgagcgctgtgaggagatgtttgatctaattcagtaccgtgctcaactgcaacaagagcaagctgaagcggctgcacaagctcaggagcgacaaaagcttttggtggaaagagcgaatagtccggaaatgcaagcaaagttaaagtctgcctcgttgggagatttagtgaaatgtgaaaaggctttgcaaaacaaagatgatactcatgctgtcgatgtgaaagcaatggtttcatacgtttgtgagaaggaggtcgacaggagagtggatgctggtttggttagccgtagcaaggtaaatacaatgcttaatcaggcaggtaatcaagagtcgttataa

SEQ ID NO: 99043 - DNA, 267 bp, Enterobacter aerogenes
atgaaaattttttgcctattgtgtgcgatttttcttatggagccagtctacgcaagttgtgaatctggtcactggattcaaactaagaatgatgatgggacgttacttactctagaagatggatcggtttggcgtgttattgatggtggtcaggttgactctcaactatggcttgaagttgacgacgtcctgctttgtgatgatggaactatgattaatacgagtgagcaaaacgagcaagtgtcggtggaacttctttctcgctaa

SEQ ID NO: 99044 - DNA, 1512 bp, Enterobacter aerogenes
atgaaaaaaaaacctttgttctatctaccttggttactatgtatttttttagcttttgtaagtgttggaactgcgctgtgctatctacaaatgcaaaataacctacaaaagaatatgcgcacgcgattaaacaaagcagtcactattcttgataaagtgttgaccgaggccagtcaagtttcaagaaatgcagaaaaatttatgggaagggaatgcaccgatgaagtactaacagtacttcgtggaatagtagccattcacccctatattcgttcagttggaatcgtgaaagatcatgctttctactgttcaacaattattggcaatcgttatttccccctcaaactagcagcttacacaaaacaaaacctcatattacttaaaggaaatcaattaactccatatgaatcattaattgtatacaacactcaggatacccaaggcaatgcagtgcgagttactataaatggtttttatttctttagagttttaaaaaacattagtatggatacaccgcttcaacttcaaataggtgagcttattcttgatagcaatgggaaagtcacaagtgcgtctaaaggaaattcattaattgaaagcacctctagcaaattcgagtataaagtattcgctgaatttccagtgcaaccactctatataacatttgtgaattatgaatggaaaagcattctcattgtcttatttatatcaatattatcaacatatttaattagtaaacacctctattataggttaacaacggaatttatgttgaaaaatggattaaaacataaagagttgaaagcattcatacaacctattattaacggcgttaataataatattatcggaggagagattcttgttcgctgggaacatccaagcctaggatttattccgcctgatgaatttattcctttagccgaacgttctcttttaattaaggatataacaaggctatgttttgaacaagtcattgaaagtctgaatcaaaacaagctaaaattacccggagagttatatatgtgttttaacataagcgcccttaattttattgacgatgatattgtcatcttatgctctcgttttttagagaaacttcgtcaacttaagattagcttagttttggagattactgagcgtgaacttatcgaagacacattacaaataaaatgcattattgagaagttaagaatgctcggtgttaagttttctcttgatgactttggtacgggccacgcaaattatagttatctaaaaaagtttgcacctgactttcttaagatagataaaatgtttactgcagaaattgaaaaaaaatcagtttcgatacaagtcgtgaagaacatgatagatttggcagcaagtttcaactgtaaaatcatagctgaggggattgaaaataccaaacaattacaatcacttaaaatgctaggcatctctttattccaaggttattattttggcaaaccagaatctttggaagattacacacaacgcttccgctattag

SEQ ID NO: 99045 - DNA, 195 bp, Enterobacter aerogenes
atgatgaccttctatcattgctatctcagacaaaaaaaggcttactgttctaaaaaacttccgatgtccctttccatggaaacaactaagacaaggattttttatgtcaagaaaactagctcctggttactgtatcgtcgaacagccgggctctatatctcttcaggctgggttgttattccgaaaccgcaatag

SEQ ID NO: 99046 - DNA, 1185 bp, Enterobacter aerogenes
atgaagttaacagcccgtcaagttgatactgctaaaccgaaagaaaagccttacaagttatctgatggcggtggtctctaccttgaggtagcgaccagcggctcacgttactggcgtttgaagtaccgttacgctggtaaagaaaaacgcctggcctttggtgtatatccagaagtctccttagctgaagcgcgtgataaacgtgaagctgccaaaaaggtactggcggcgggtaacgatcctggtgaagtaaagaaagcggagaaaatcgctcagaagctaggctttgaaaacacttttgaagcaattgcgagagaatggcatcaggtgagagctgaccgttggtcgttgcgctatcgtgaagaaatcattgatacgttcgagaaagatgtttttccctacattggcaagcgtcccattgcagagataaaaccgatggagttacttgaaactctgcgccgaatggaaaaacgtggagcactagaaaagatgcgcaaagtcaggcaacgctgtggtgaagtattccgtcatgcgattgtgaccggacgtgctgaatacaatcctgcccccgatctcgctactgccctcgctacacctaagaaaacacattttccctttctgaccgctgaagaactaccgcacttcctcaaagatctagctgggtacactggtagcattattaccaagacggcaacccaaatcatcatgcttacaggtgtacgaactcaggagttgcgtttcgcccgttgggaagatatcaactttgaaaagcgactctgggagataccagctgaagtaatgaagatgaaacgaccgcatatcgtacctatgtcggatcaggtagtagcactctttgaatcactaaaacctattactgggctatatccacttgtattcattggacgcaatgatcgcactaagccgatctcaaaggaaagcattaatcaggtgatcgagttattaggatacaaaggaagggtgacggggcatggttttcggcacacaatgagtaccatactacacgaagaaggttttgactctgcgtggattgaaactcaacttgctcatgtggacaagaatgcgattcgtggagcttacaaccatgcgcagtatctggatggaaggaaagagatgatgcagtggtatgcagactatattacccacttgcttagaacatcattttaa

SEQ ID NO: 99047 - DNA, 1089 bp, Enterobacter aerogenes
atggtcgtggagattaagtcagcagccacaatacgcccagagatgattgagttgcgtcggaaaatgttgggtatgagccagaaggatttggctcagattatcgccatttctcaaggaaccttgtctaagattgagcaaggccttaagccggccactgatgagcaaattgatagcatcgcaaaagcgctcaactgccccattgagtttttcatgatgtctgaaaggctttatggcggacccataagtgcaaatcccatgtatcgtaaaaaagcgtcagtcggtatgaaagtactggacaagcttgttgcggaagtaaatgtacgcatagcccatctcagaaaacttttgcagttcgttgattttgaacctgaatatgaactcccgtactatgatcctgacgattatgaagacaatattgagcaaattgcgcgtaacgttcgtacagcatggcacatcccacgcggaccaataaaaaatctagtcgaagtgttagaaagggcaggagtcattatcatcgactgtgatatggaagatacgagtctttccggccttagttataacctagctggcctgccgccactgatttttataaacaaaaaccagccaatggaccgctaccgatttaccttagctcatgagctgggacatttagtcatgcatcgtgctcctactcctgaaatggaagaggaggcaaacacttttgctgcagaattacttatgcccgcttccgatatttataatgatttaagaaatgtaagtattgaaaaggctgccgcacttaaaccattctggcgaacctcaatggctgcgttgttttacagagctaaaacattaaaagctattacggcaggccaaagtgattggatctggaggcagatgtccatcaaacgttacaaggttgatgagcctgtaaaactcgatataaatggggaaaaacccactttactgaatgcaattattgatcatgcgaaagaagaactgggttatgatcagaatgaacttgcatctatattcaacctatttttacccgaagttaaccagttgtactcactgagtacacaaaatcagcatttacgtttagtaaattaa

SEQ ID NO: 99048 - DNA, 627 bp, Enterobacter aerogenes
atgtctttaatcaacaaagaagaagcacattcagtctgtcaaccctactaccacaccctaacttcagttttcgacaatgtttggaaaaattggcttcaaaacgatgtcgcacgacggttgattgataagcgtgttcgttcagctgttctccgcaatgacgcattgtttttccttaaagacagtattgaaacttctaatcttaaagggatcaaatatgtaaaaatgccatatcaggtaggctttctgattcaggatcgatattttgtaaggattaagaaaggtgataagagccttcgttcttccaattaccctactcaaagagccttggattttcataatcctgaaatggacatgtttggaggattagttcgtttagagctactctacatacttagtgacgatggtgtaggaattgataaaattgttctcacgcagcgcaatggtaagtttgttgcgtgggcaattgatttaacagatgaaaatctgtacgaaatgcctatatctaagcttgaattgaacataccccaaccacagcctgttaagacggtttccccagcaaaaagtgttgtgaaaccaagacgggctagaaagacagaaccgaaggtagaaaatggtcgtggagattaa

SEQ ID NO: 99049 - DNA, 174 bp, Enterobacter aerogenes
atgaagcgtagtagaacggaagtagggcgctggcgcatgcttagacaagtgagtcgccgtaaatcgcgctggctggaagcccaatcgcgccgcaacatgcgcattctctctatcaggaagagcctggtcaaacggcagcgtcatgctttgctgttcaccttctctgaattttga

SEQ ID NO: 99050 - DNA, 738 bp, Enterobacter aerogenes
gtgagtggttcattgccttacctgcaatattcggatactgatgggttacaacctaggctcagagaagagttgaaaaatttacggaaaaaagagtatttaacgtactggtctcgctttctgatacgtagaatttcactttatgcttttccgttcctcatgttcttcacttttttcttttgtttgagtttgacgaagacagttggggtagagaaagtgaataatatgcttggaaccttgagcatatccttcggtggttgtctgctaattgggcttattatttcttttgtcgtgttactcttgcagtggtggtgctttaacagtaaatacagtccgcaggatactaatggagttgttgggtctcgtaagttaatttataaattatttgctcattttatatttatcatttcatgcgtgcttttatttgtgtttatttattgcaccaataataatgtattttatggttttatcgtgtttcttgttttgacattattaccattgctaattgaccgtacattgggggtaacacgtcaaaatgaacgtctcaaaatttatgtcagaaggttagagcgcctcgatgaattaaatattttacgtgagaaaatgaacattagattcgaagaatctcattttagcgaatatattaagcttgttgatgaagccgatcacagtaaaaacctggatacggttagcgatacatcctattttatgaccttgattgaaaataagttaaaagcgtaa

SEQ ID NO: 99051 - DNA, 2703 bp, Enterobacter aerogenes
atgttaacccggtcgttgagtgaacatgcaacagggtgtttcttcaccgacgagcgcctgtcaaagcgcttttgggcgatcctgctatcgccgccggatgattttacgacgtggtcgtcattgcaggaggagtgctaccaactgctcgttgagagtattgataaccgttatccgcgcacatatcggttgaccgacgtgcgccagctaatggggaatatctgtgataatggcttgttgaccagcccggcactgccttggctggatgtcattgcagaacaactgctgctacgtaatggtgatttgctctactaccgcgagaataaggtacaagactatgtgcggatagcggcagaactggacccggctctgcttgtgggctggcgtcttggcgactggctacaacaaagtcctcctccgcgattgtcagacatcacccgggtggtgatggcgcagaatccgttcttcgcaccgcctgccagcgcgggcaaaccttttgcggaggggcacgtccatctgggcggggtgacggcgggagataccatcctggatggttatctttttgaagatcttgaactgccaaaaagcaacaatgcatcgctgtgggcacttgaagagcgcgataatttaacgccgctgttggttcgggcaaagtcactgctttccttattactctccgatcggtttgaaacggttttcaagaagtatgcaaccttgagtaacccgatgacgaaaagcctgaatctcccggactggagaatcctcgctaaaaagaaccgaggaacagaaaacatcaatcccggctggctgttaggccagctggcgcatgcctctgaccgaaagcatccttcacgctggctgtggcttcagctttatctttgccacacttaccagctgaaagacgcccatccgcttgagcgcacggccatactctgcttttggcttacggttaatgcgcttcgacgtcgcattattatggacgggcaggggcttacgcgttttaccgaacgctatttcggtggtgcgctgcgcgcgggcaagaaaactgacagcagcaatatgcgttatctgtttgctggcaaagacgatatggccgaagtgaaggcatccccgactgcttttggccatgaaatggtggcaggtttttcctcgtcgctgctcaagacccttggtgtaccgctcgtttctccaccgtatgtttttggtgaacatgagattaagccagacgaacgcgcgctgcgctacattgaagtgcttgagcgctggcagttttgtgggcatttttcacgctctaaaacggcaggccgcggtaagcgaccaaaggctgatttgcaggccaactggaaggaggcagagcgattgctgcagaagctttacagccacaatggctggaatcatccgatatttttaggagggaaacgcaacccgcactttcattttcagccgtcgaactggtttcggggtctggatattgcaggggatgaaaatgccctgaaaattgcaggttttgcaccgatgctacgatggctgcgcagcgggctttatccggtgcccgatgggcttcgcgccagtacgggctttcatttcagcatccatgccggggaggattatgcgcatccagcgtcggggttgcgtcatatcgatgaaacggtgcgcttttgtgagatgcgagagggggaccgattgggccatgcgctcgcgttgggaattgaacctgcgctctgggcgaagcggcatggagagatgatacttccgctggatgagcatttagataatcttgtctggcaatggcattatgccacggttttgtcgggttcattgccacttgcacaggcggtattaccgctgcttgagcggcgcattgcacgttttgtcgcgcgttgtgattggtgcaaggagagactacctcaaatagattgtagcgtggcggataaacgagctaacggtgatgaaccatctctaaaaaatatcacgcctgatacactctaccgggcttggcttctgcggcgtaattgctcgtatcgtctccgacaactccatggtggggcgccgttaacctcgcaggagaaatgcgcactaccagactggtcaacgttaagtgataaagacaatgtggcggcgcagctttatcagcaacgacactccagactgcttgacgatctccctccacaactggtggttgtgcgggtcgcggatgaatggagtacacaggagttgattggattgggaacccccgaaaaactgcgtcagcaggtaagcggtggtcaggatatcctccaggatattgatacgccagtagagctggaatttgtgtatgcgttgcaggattatttgctcgatcgttacgatcgcaaagggttaattatcgaaaccaacccgacgtcaaacgtctatatcgctcggttaaaaaaacatgtagaacatccaatttttcgctggaatccaccggatgaagaactcttaaaaccaggcgctgaatttaatcgccatggtttacgtagagggcctgtaagggttctggtcaatactgacgatcccgggattatgccaacgacattacggacagaatttttactgttgcgagaggctgctattgaacgcggcataagccgaacgatggctgaatattggctggaaaggctgcgtctgtacggtttagagcagtttcagcgtaatcatttaaatgtatttgaagttattgaatag

SEQ ID NO: 99052 - DNA, 2715 bp, Enterobacter aerogenes
gtgaacacgatatacataccattagacagtggagagtctgcggtcctcaaggatccagataccttacttcctcgtaaaatttacgaacagcttgcccagttcattgaaaaggctgttaaggatgttgatgaagtaccgaaaaattcagaatcgtttaacgaaacgcgcagtcataaggcaatatcgattgacggtgaaagaggtacgggtaaaacatcggtactagtgaatttaagagattacctggaaagtaatcataaagagtttgctggagatattcatattctcgatcccatcgacccgactctgcttgaagatggtgaatcgctgtttttacatatcattgttgctgcagtacttcaggataaaaaaattaaagaggcgcaaagtaaagaccttgataaatcgagactctttatccaaaaacttgaaaatttagccaatggccttgaatccattgacctgcaacacagtcagcgagggatggataaaatccgttccctctatggcagcaagcatctggcaaattgcgttgaagcatttttaaaatccacgctagatttaattgggagaaaattattaatactgccgattgatgatgtggacacttcgcttaaccgggcgtttgaaaatctggaaatattgcgtcgttatcttacatctccttacgtattgccgattgtgagtggcgatcgtcgcctgtatgacgaagtatgctggcgagattttcatggacggttgaataaagactcatcttatgaacgtaagaagtcttatgatatagccaaggaattggcaattgagtaccaacgtaaaatattaccactgccgcgtagattaagtatgcccgccgtgagtgattattggcagcaagacggtatggatgttaccttggataaagacggtatcccgttgcgcaactttatggcttggctgaagatatttatcaccggcccggtgaacggtcttgagggtagcgatttaccgctaccgatcccatcgattcgtgccctaacgcagtttataaatcactgtggtgatttaataatagaacttccaccagagcttaaaagtatggatactcctcttactgttcgccgttggtggcagatgcctgatgttccacgcccagtacttgaagcttttgcgttgaaacaccgggagctcagtaaagaagctaagcgtgagtatgctgatgcctataaagtcttcaatgaaaaatatctagcatggaattatcaacattctccagtaggaatgaaaaataacgaaaacggtaaattagttgatgatatgtgttggatcaacaagttgctgagttattttcagttcgaaccaaaagctggagcagtctatttaacccttaaggctcagctaaattgggctgaatggaaaaatagtaagaatcgtaacaattcgatatttgataccgtacttttccagcccttgcttcaggatcgccctgaatacgtcatttttaatgcaggagaaagcttgaccgattgggagtcgcaattatctaaaagcttaccagaaggctggctttcggtaatcaagggaaaaatgacaattttgccttatcctattgcagaaacaggtattaactcggggttgagatggaagtattgggaggacgttgagagcaataacgctagtgaagaattgaatgataaggcaatttttcttattagtgctttaacacaaaggaatttttatacaaatgcaaagcagtcgattgttcttaatattggtcgaatttttgaaattatcattgccagcttgatctcagatctggatttatcagatctgcaacgaatcttacaacgctcaccattttattctgccagcgctcttgcgccaactaaaaaattaaaaattaatgaggctgagggtgaagattctggagggaatgtggatgatctcgaaaaagaagaatcctatgatcgtgaagatagattagaaaattcattggagtgtttgtatgaagatattaaactatggcgaaaagaaaataatgttgatagattaaaaatatcgccttggatggtatataaggtttttaacaaagtatacagtcaggtcgcaagtaatgctattgaccaaaagggtatgcaggatattactaaggcaattaatattgtaggtcgagtattttattcaacttggtcggcatttggtagttttgaaaaaggcgagttgttcgggttaccagacgtggtagtaacgactaatattaactcctcaaaaaatttctatcaacatgctaatttccgtaccaacctcggaccatttacccctgaacagaatctacagcaaggaccgtcaagtcggagtgctatgaatcgacaagcttttggtcagatgagtagaacagtcagttatgttctgagttcacatcctctcaaaagatggatcgatgaagtattattagcagatttaaaacagccatcaaaaaatcaggatgatacgagaaaaataataaatcagagaaaactaacgaaagctcggcgattcattattgacagattaggcatcgatgagaatgaaaagttaacaaaaaaaatcattaaagagcggctaacggcattgtacaaacctctaaaagaagccgatcaatttatcaattctgtaatcagtgagttctctaatagcgatccagcagtgagaattctgttagaggcatacagtgaaattaacctaagtggtgacaaataa

SEQ ID NO: 99053 - DNA, 1347 bp, Enterobacter aerogenes
atgactgatacctttcaatttaaatctggtttagtgatggcgtccccttttcttattgcatttggatgtaacgctacagcggaaacgacggcttggagtccgactgtgctaggttatgaaccccccacaccgggtttatttggcgattggggtgggatgcgaacaacgctggccgataatgggtttaattatgccttaatttattctaccgaaagtgcttataatgctgacggtggctttaattctgataaacattttgctttcaccgatcaaactgcattgctttttaatcaagatcttgaacaattaaccggtattagcgatgcaaaaattgaaggcctgattactaaccgcaaccatgatgacaatttaacgacagagagagttcaggaccctcgggcacgcttcaatgatttaacccaagaagtatggggaggagggtcgataacccgattgggttaccttaccttcagccgcaccttcgatgatcgaaaattgaaatggcgcattggtcagatgaactaccaacagacctttgatcagagtattccatgtgattttcaggtcctttcgttatgtggtggcaagtccgcatatgcgcagacctggagtacatggaacatccattcatggggaacaacgtttgcctatgctctgacacctgaactcacgattaagactggcgtgctcgaacaaaaccccagcgcgtctgatagatctcgggcatggtcatttaatgcgaacggcagcaaaggcgttttattgcctcttgaagcagaatataaaacaattgtgaatggactgtctggggtgtataacgcaggtgtcttatatacaaattctccacagtacgacctttatacaccagtaggtaagacaactaaggtttacgataatacatggtttttctggggaggattcaaccaacaaataacgcagaagccaggcgatcgggaacaggggatgagtatatcggccagcatgagtctcgcggaccaacgtacaaatccttaccacatagttgcctcagcagaaatgcgttatcgcggtctttttgatgctcgcccacaggattatcttggattaggtgttagttggtttgatatgagtaatcatctcgcacacagtgcacgtgaatcgaataacataaataacatcacggattattataatccactttatcaacctgtagctggtaaagccgtcaattttgatctttattatcgcttgagaccagtctcatggctggatattcaaccagatatacagtattggattaatccaggtgggattaaagaaaccaaaaatgctctcgtgattggacttaaaacagcagtaagattctaa

SEQ ID NO: 99054 - DNA, 1329 bp, Enterobacter aerogenes
atgagttatgtacagaattcattagtgactaatgcattattattgctgtgcagtgttgctagcggaaattctgcgctggctgagactctgaaatcaagtgcgcaacaggttgataagacgatgaatacgacttctgctaaagataaaatcatttctgacaatgcgtcaaacattgtgtttgtcggaacatatggagatgaacatcaacccggtggaatatattctctacggattagtgagacagggaaacaaattgaacaactggggcatttggcaaatcctaagttatccggatatttgatctatgatgccaaaacgacaacattgtattccgttgacgaacgcaagaatgacggtcgaggcccggtagagccagccgcgagtgtgatggccttttcagtgaatctggaaaatggtcacttgaaacaactgaatgagcagcgtgctccaggcccacggccgacctatctaagccttgatagccagaatcgaagattgtttactgccaaccatggtgattttgaacatgtggagaaggtggtattcaaagacgagaaatggacgtcagagtatgtctatgatgattctaccgtcattatgtatggcttaaataaagatggttctattgcagggattaatgaccttgttgttctacagggacatgggaaagatccgaaccgttcaaaacaggctgggggacacgcacaagcaagcccgcatgcgcacagtgcagttatttctcctgatggtaatcatctgttagtttgcgataaagggacagatcaggttctggtttattctgttggtgataaattgacactagttaacagttatcagtttccggaagaatctgcacctcgtcatttggtgtttgcagacaatcagcggctatatctcgatcttgaaatatcctctgaactggcatctatggagttcaatccacaaactggcagtttgaaactactcgataaaatttcaacattggattctggtttccacggccttaacgaacctgctgaaataagacttcatcctaaccatcgatttgtatatgtaaataatcgtggtgaggatacgatcgcgtggtacagcattggtggcaaagggaaactaatgcgtcttgggtcagtgaaactcgcaaaatcgattcacccggggctcgcatcacgtagttttgcttttgaacctaatggccgttatatgatttcagcagatcgtccagataataaaattaaagtttatagtgttaatagtgacaatggggcattaacctttatttcagaatttaccgttccgcaacctgcatttttgacattcgcaactaaataa

SEQ ID NO: 99055 - DNA, 1110 bp, Enterobacter aerogenes
atgaaacgtggtgtatccctatatagttaccagcagtctcaattctttaaggagtcaaaccttgagtcgcagctcaatgaagttgcgaataatttgtatggtgctgatggtattgaactcatcgatgaaatgtcgatcaaatatcctgtacctgataaggcattcatgcagcgctggtatcgcctgattgacattcatggccttaagcctgttgctatggatgttagtatggacgtgttgcagtttcgcacacacgttatgaaccatgatgaatgtgctgagcgtcttagaagtgatatcaaacttgctaaaatgctgggcttcagcattgttcgcgtattgtcgattgttcctttggatgtaatggttaaagcactgccactggctgaagcacttgatattcgtatcggtaaagagatacatcagcctatgtcgttagaaggccgtcaggttagtgaaatcattgaatttagtgagaaaaatcatactcgccatttaggtattgttcctgattttggtatcttcggtacacgtccttcagaagcacagttaggatggtttgagcgtcggggggctaaccctgaagcctcaaatgcggcagttaaacttgcagggttggtaaagaccgatccccaaacgttcaatgtggcgaaccaaactgccgggaatgtccgcgctgcctttggccgctttattgcgaccggcgaatgtgaggacgaaatgaaagtttgtttcaaggcggtgaaaactcttgcagaagagtttattaaacaacctaaacctctggattatacggtggttggggaaggattgacattgtcgaacacttcagtcgagacgttgcgcgaaatctgtcctcatatcacgcatgttcatgccaagttcaacaacatgtccgaaataccagataagccgggccagtatcaggatattgcgattgactacgtatctgcaatcgacgctctgcgtcgtggtggttacgagggatatctcaactcggaatatgaaggtcaacgttatttccaggatcgcggtcgagaattcatgatggatgaatttgagcaggtccgtcgacaccaagaaatgcttcgccgtctaatcacggcttga

SEQ ID NO: 99056 - DNA, 453 bp, Enterobacter aerogenes
atgttcgataattatcttattcgcccgggaagtctaagaaatgagaaggtcaatggtgaagtcattgggttctctttagctgtaaggcatgcaaactatcgtggctgctatatctctttacataatggctattacttgtctatcgatggcgttgaatacccaaactctgtgcagacatttgaaatcaatggcaaaggacctcgcagttatgaagaattatctctcgctgtatatgaacattgggattatggcgatgatggtattttgcatgtagcactccctgggggattaaaaccgggcaagcacaccgttcttttccagcaatcggtccttgcggcttatggatatttacctacagacgaaacgtgggttaagactccacctgtgccaggaaatggggcaggatctgacaaaactccgcatattgtgaagttcgaaatgattgttgaataa

SEQ ID NO: 99057 - DNA, 1272 bp, Enterobacter aerogenes
atgccaagttacttagtcgaagataattcgaaatcagtagacccatgcgtaagcaaagagaaacctgtgggtaatgaagcgatgacaaagccaatgtatatatttagcaggcttagtattctgatgctgctacaatttgttgtttttggatcctggtttgcaacgatgggcttagttttgtttacctataagctcggctccattatcggtatggcttatacactctgtgccattgccgctattatttcacctttagtatttggtgctgtaggtgatcgattcatttcatctgaaaaaatattgggttttttgcacattttaggtggtattgttcaatttatgatccctgcgttggttgtatcgggaaacagcaacgtaattttaatcttcatctttatttatatgattttcttccaaccaactcagggattggttaattcactttccttccagcatcttggtagtaaaagtgatttatatccctatcttcgactgttcgcaacgggagggtgggcagttggaggatttattgttgggatccttggttattcttctactgtaggaatattttatgtggcaggaatttctagcattgtattgggtggttattctttcacgctgccacgaacttacccaagtgtcaaagataaaaaattcaatgtattagatgcgttaggatttcgctctcttcagctatttaagaatagaaattttgcaatattaatgctttgtgcattattaacgtcaatatcattgggtgtatataacacatatgcctcaacttttatcggtgcattaggtatacctggtgttgcttctgtcatggctttagggcaaatatcagaagtggcatttattgtgttagtgccttttgttattaaacgcattggcatgaaatgggcattacttattggtatggcaatgtggggaattcgctttatcatgtttatccttgccgcgaaaggccatcactggaccgcaatcataggagtgggattacatggactttgcaacgattttttcttaattatcagtgctatgtatcttgatagacttgcgccacctgagctaaaggtacaagcacaaagctggctgatcattgcgatatctggttttggggctgcgtttggttctcttatctcaggatacgtgtactccactacagtcaaccctgaacaggagtactcatggattacactatggtcagttccaattagcattgctgtattaacgactattatttggcttatattgtttaatgaagataaataa

SEQ ID NO: 99058 - DNA, 1344 bp, Enterobacter aerogenes
atgaacaatgacataataaagtttattgagtcaaggaaatttagcaggtttgatgcaaacttggttatcttgggtgtgtttttaattacatttactggatacgctgcacctgcttatggttcaataattcctatgcttttcaaagaatggactggcttggattgggatcaacttggatatgtgggtagtttgtcagaatttggatcgttgttcggcgctctcgtgtggagtgtcatatcaagacgatttggtataaaacgagtactaattataagtgtaatgtttttctgcgtaggtacatttagtcaagccttctccccaacaatagaagtttttgccatattaagatttatcgcaggatttggatttgggggcgtaatccctcttgttatatctctgttatctgaatacgcaccgaaaacaagcaaaagtaaatcagttgctactgcattatgtggaaatcaatttggagcaatcattgcttcttttgttgcaatatatgttacgactcaagtaggacaatggagacccgttttttggttaggcataatacctgtattattgttaccatatataataaaaacaatgcctgaaagtgcccatttcatgctaaaaaacaaagatgtggcagggttaaaaaatgtactgtacagaattgacaaagactatagcgctaacatagatattgagagtgccgttaataatttcacaatagaaatagattctaacaaggttcattataaagatttgtttggcagaaaatatgcacttatttcattcttagcttgtgttattgccatcatggggcttttgtttattaatggtgtaattgtgtggctcccgggcgttatgacaaatgcaggatatgctcttggttctagtattgctttcacaatttttttatgtgcaggggcaatagcaggtgcaatttattggggttctgtagcagacaaaaagggatttgccattctaatgccgagtatttactttattggttctgtttgtctgattctgatgggggttaaatccacaattgttgtactatatgtattaattacccttgttggttttttcttgtttgcagctcattcgctcgttaatgcgtttatcgctcagcattatccacatgatttgagaacggtcgcaatcggcttaccaaattctttgggtagaattggtggattacttggccccacattaggcggactgttaatggcaaatcaagtctcagttatgggatggtttatcgtttttgctggaacaggactgattgcagccatctcgttcgttttaattaatatacaaactcgaaggttaatgaaccttcaaactggctgtgtttaa

SEQ ID NO: 99059 - DNA, 282 bp, Enterobacter aerogenes
atgaaatttcaacctgcaacaaacatgcgggcggcgaagctatacctatcccccgtggctgtcttgcaaatgctagttacacagctgctggaacagcattatggctttacgcaaaacgaaatacctttttgtgatgaaattgttatacaggaacatattgatgccgatatcactctggctaatgccgttaactttctggtggaaaagtacgaactggcccctatcgatcatagagggtttagctggaacaaacaccatatctcacaattattgatattatga

SEQ ID NO: 99060 - DNA, 480 bp, Enterobacter aerogenes
atggaacaacaacttccgctgtttgtccgtgaattggcccccacagaccagcagacggtcaggagggcgctgctcctgctggagcgacagttacgtgaacccggggcgtcatttacctccagtcacaccgtccgtgactggctacgtctgcagctgtccacactggagcgtgaagaattcatcgcgcttttcctcgataaccagcaccggctgattgcgcacgacacgctgtttaccggcaccatcaaccatacgcaggtacatccacgagaggtggtgaagactgcgctgaaacataacgctgtcgccattcttgtggcgcactgccacccgtcgggtctcgctgaacccagcgacgcagacagacgaatcaccgaacgcctaaaacaggcgctggacctggttgatattcgcctgctggaccatctggtggtcggcgggatggatattgtctcttttgccgaacgcggctggctttaa

SEQ ID NO: 99061 - DNA, 483 bp, Enterobacter aerogenes
atgaataacaaactcaccctgaccagcacagtaactgaatcactcttctcgccgcacaccgatgctggcggcatcgtgtgcacgccggtgcccgatgagcagcgtgttgccttctggcctggacacttcggcagcatcccgcagtggataatcctcgaaccgaccgtcttcgcgtggatggaccgtttctgcaaagattaccacggtggtatctggaatttttacaccctcagcaacggcggggcatttatggcacccgaagccagcggtgacgatgacgggaaatgggcactgtttaacaacatgaacggaaacggcgcagaaatgagtgctgatgccaccggtattgcagtctgcctgatgacgtacagccaccatgccatgcgcaccgaatgcgatggcatgactgagcactattaccagttgcggggctacgcgctgaaccacgcggagtgtaatgccattatgcacatcatcgactga

SEQ ID NO: 99062 - DNA, 927 bp, Enterobacter aerogenes
atgaacaggtatgtcgaagtgaggtccatcagagagggcgtctatatcctttggcgtctgggtaatactgaaaaagcccgccagtttgcctcagggggccagagagacctcattcgatgcaatggggctatcaacagaattattgagcaggcattaacggaaaagaataataacccgagtatcattcgacgggttataaggttacaggaaaaatatgaacagcaacgcattaatgaaaatatagcatcatgggttaatcatgataaaaatgcatgtatttatttttggctctacctgtttactcgatttacccatagcagtatatctgtagaagatattcgtcgaattatcagaaatgataatgaccggcataattacaggctgtacagagatgcgttaccccttcagatacccgatactgctgagcagtgttttatggcgggattatatatcctcgatttacttcctcttccaccggaagtaatccggaatgaagtcgataaaatcagaaaaggatactacagagtaaaggacagccttcgtgatgatttcgcctggattgcagatgctgaccagggaaatgtcgaatgggtctgggaacagttaaagaaacaccgtgattttttaaaagatacaaatctcacagagttcagtcagcatttattgtctcagttgataccctttctttattatttatgggatgagcggagcgacacaaagcaattatttcttaatacgttgcgcaaacgctatgctaacatgaagcatcgtaagaaggttgctgataaggcaccggttaatattcgtatatctaaaaatgcaaaagacacactggtaaaactggagaagcgctttaaccgaaacagagcggatgtgattgaatcgcttatagaaagagcctgggctgagatgaatcagaaaaactaa

SEQ ID NO: 99063 - DNA, 546 bp, Enterobacter aerogenes
atgcgtcattttttgacaacttaccgggactcaatcctcgcacttacagggatcatcattgccattatctcacttgggttcgctatctggcagggcagagaggaaatcaggcacaatcatatttctgtcgaaccgaggataaatgcctatttctccaacgatgggcgaaaaaatcagtggggaatttatgccatcaacaacggtatgggaacggcctttgttaacagaatggtcgtgatggtcgatggtaaacccgtggagcccgttgacaacaatatcttcctcggagcagttctggcactcggccttcacgctaaatgttttgtgattggtggtccgcgtccgaatgattccttcaaggttggagaagaaatatttctggtggaagcaagaggttcagaaaaaaactgtgctgaagaccgactacgactgaagtgggcttcacaaaatccacaccagctggactttgtgctgggtatggaatctatctacggcgataagtttcgttatacctattcgttgaatcgccaggacaaactggattaa

SEQ ID NO: 99064 - DNA, 597 bp, Enterobacter aerogenes
atggcttaccacaacatcaccgataccaatcttaactacgtccagcaccgcacgctacaacgttaccagcgtcatcatctctccgaattatttgcacgctattccaaattgctcatgttccgggttgatttctactaccgggtagacagcaatgcctggtgccacgctgataaacattccacgacggcggatatgattctgttactccagcggtgtaacacgatgacagggcttgtcgggtttacctgggtacttgaatataccgaacagcatggctatcacatccacgctgcgttttatctcaacggtcagaagcatcggaagatatggccgacctttaaaaccctgcaggccctctgggttgagataacaagagaggaaggctgtgcttaccgctgtacgcctcagaaatattacaaagtgcagggcgagcgggtgacgtcgcatagcgatatgaaaggccgtaagggcatgctgtacattctgagctacctgagcaagcaggatcagaagggcgagaaagtggtttgccagttgagtgacattcccgctcctgcggtgggtggcagacgtcgcaggtgtgccatcagcgaataa

SEQ ID NO: 99065 - DNA, 429 bp, Enterobacter aerogenes
atgcgaattctgaaatgttatctggcgaacaacatccgtaatcagtttgttaatgctaaagaagccgctaaggccggtgatgatacagggtactggacatgcgccagttgcggctgtgaattacacctgcttacaggcgaagcaggagaagccccctggtttgaacacatacggcattccattccccaccaacgacttatgaaatgcgcatgggtggatcctgaggaaaaagcacgggcccgggaaaagaagctccgtcaggtggcgtattccgttgacaaaaatgtcagaccacctcaggaatggcattgtgtgctgtgtgataccacatatcaggggaataagtactgcagaatctgtaaatccgggctctacagtacggagccgatactaagggacagtcgcacaagatctgaggccgagaagtag

SEQ ID NO: 99066 - DNA, 1020 bp, Enterobacter aerogenes
atgaaaaagtatgcaatttggaataataagggtgggacaggtaaaactagtctatcttttcaagctatatgccgttatgcagaaaccaatccgctgcaaagaatcctcgttattgacgtttgccctcaagccaacctctcggaattattcttaggaggtttaataggaaatgggagtgttaatctgctcactcgtcacgatttagccagccgttgtacattaggtggttatttccaaatgagacttccgacgccatatcaaaaaccaaacttcgactctcatgactacctaactaatccaaaactgtttaacgataacatcccaagcaacatctctctgatttgcggagatcctcttcttgagcttcaggcaaatgcaatcaataccctagctaaccagcagattcctgggactaacgcatgggtaagcatcatagactggattaacgaccttgtaagcggacttgatggtgaatacgatgctttgtttgtggattgcaaccctagcttttcaatctatacgcaaatagcattagctgccgttgaaaaactaatccttcctgtaatggcggacgactcatcacgaagggctattcagaacgcattctctttgatctatggattaaaattaccatcagacatatacgcgtcatacgcatttgcaaataaactgaacacggtaaacaggccattaccaaaagttcatatgattgccaaaaatcgcctaacgcagtatatggggccagcctcagcttatgctgctgtgctaaattccatagacaatgacattcaacaattattggtaagcaaccctgagatttttgacttcaccacagtagatgacggtgtcgtaaacattaaagatttccagacaacaggagtagtagctttcgccaagggctgtccattttccatactacctactggaagcgtcagggttatgaataggagggttaaagttaatggaccttataaacagtcatgcctagaggctatcgacaagatggttgacaagctgtaa

SEQ ID NO: 99067 - DNA, 621 bp, Enterobacter aerogenes
atgaataacactccaaatctgcagacactttcagacaccgaaaatgccactcccctcaccgccacgttgctgcccgatgagcagcgcagcagcttctggccgcagcactttggtgccatcccgcagtggataaccctcgagccgtatattcccgctgtcagtgaagagaatattctcagcacctttgagcaactacatcagagtaaaacggaggtgttcgagcgggggatcattaatgtgtttaagggactaagctgggattacaagagcaacagcccctgcaagttcgggaagaagatcatcgttgatggtctggtacaatatgaccgttggggatttcacttccgtcatgggcgcagacgtgagcagttagcggatttagatcgtatgctgaatctgctggatggtaaacctgttccggagaatcgcaacgatctttccgtcaggctggatgctcatatctgcaaacagcacgtttccgttttcgaagacgagtacgtggagattcgctacttccagaaggggtcgggacacattatctttaagcgttcggatttggttgagaagatgaacgaaatagttgcccgctattttcctgcaaccctaccacctcgtacctga

SEQ ID NO: 99068 - DNA, 819 bp, Enterobacter aerogenes
atgcgattagccagccgctttggccacacgaaccagatccgtcgtgaccgtccgctgacccacgaagaattacaccagcatgttcccagcgtctttggtgaagacaagcacaattccaggagcgaaaagtacacctatatccccacgattaccctgctcgaaaacctgcaacgtgaaggttttcagcccttcttcgcctgccagtcgcgtgtacgtgaccccggacgccgggagcatacaaagcatatgctgcgcctgcgtcgcgccgggcagataaacggccagcaggtaccggaaatcatcatcctcaacagccatgatggtgcatcgagttttcagctgctgccgggcatattccgcagcgtctgcaccaattccctggtctgtgggcagtcattcggcgaaattcgcgtaccccaccggggaaacgtggtggagagagttattgaaggcgcctatgaggtactgggaatatttgaccaggtggaagaaaagcgcgaggccatgcagtcgctgcagctcccgccaccggcacagcaggcgctggcgaaggctgcgctgacgtatcgctttggcgaagagcatcagccggtcaccgaagcacaggcgctctctccccgtcgctggcaggatgagaaaaatgacctctggacggtctttaaccgcctgcaggagaacctgagcaagggtgggctggccgggcgctcagcacagggtaagcgcagccgcacccgcgctgtcaacggtatcgacggtgacctaaaactgaaccgggccttgtgggtgatggcggaagaactgcagcaggcgctgagctga

SEQ ID NO: 99069 - DNA, 252 bp, Enterobacter aerogenes
atgagaaatcatcaggttccctcattgccgcaagggacgttcacccgcgctcaggctgaagctatagccgccgcatacatcaatattgctatcgaagatgaccagggcacccattttcgtctggttatccgcgataccgacaacatgcttatctggcgcgactggaattttgccccggaggctggcgtgatgctcaaccgctatattgccagcaacggtatcccggttccccctgcagctgacgacaattaa

SEQ ID NO: 99070 - DNA, 672 bp, Enterobacter aerogenes
atggaaaataatgatgagattgacgttgagcatgacgatgagatgcctgctgaggaacacaacccccgcagtattcaggcaatgatgggctggctctatgacaaagccgtcagcgggattgccgggatcgagtcggctgaaaccctggcagaacgctatctcaccgatgcagagggtgatgtgacaaaggccgctcatgcgatgatccgctgggagagcgtcaaagcgggcagtaccggttttttatccggtgtgggcggggtggtggcgatgcccgtcacgctgccgctgaacatcaccagcgtactgtttctccagacccgactggtggcagctatcgcctgcctcggcaaacgcagtctggctgacgaacgtatccgggcactcgccgggctgtgcctgtgcggtaacgctgccaaagcgctgttgcaggaagtggcgttacaggcgatggagaactggacccgccccttcacactgaggattgtggagaaaaccctggtgctgatggccgcccgtgccggtatgcgcaccggtggtcagtttattcgtctggtgccactggccggcggtgtggtcagcggggcggtagatgtcaccaccacccgcacgattggccgtattgcctgcaccacgtttctaccaccttatccggggcaacggaaatcatga

SEQ ID NO: 99071 - DNA, 1182 bp, Enterobacter aerogenes
atgaaaaaataccgtccacatcagaaaactttgctggctgttgcgctcagcatggcggcgtttaatgcctctgccgcatggaccgtcaatggtaccttctgccagtcgtacagcgatgacggccaagttctgctaagggttaagccgtcaacgattggtattattgagaataagccgcagtgcggcggtcgtggcactactgaacttgccggtagtcatttcaggattaatagcacttcttatccatccagtgtgatgtgtaacagccagtcccaataccaggcagtgcagacaaccgtggcaacccgtgatattcagtcagttattcatttattgaaagaaaacaaaaaagtcagcatgagcacgtttggttcctcttttaccttcagtaccgctgattttgccagcgcgtgcggctcagtgattaatcagaaggtgaccgatttcgatccgcagtcagaatacaaacgggacatggccaggatgggttacaagcaggatgaaaacggccagtggcataaacaatccaggcaggcatattcacgcgaagctgacccggaaatagctgccagttacaatccaaaagcgggcgttgctgaaggttccggaaaagatgggttccatggagacggagccagtaaaaatctttatggcccgggtagccaggcacaaaaagatgcagaagcggcaaacgaagcccgccacctcgcggcacaacatcgtgtgtcgaaaacaaccccaaaaataacagaaccagagaagcagacaactcagcagtctgccgatttcccggtgaatgcgttctgcaccctgggtaacgggaaaaatgtgggggtctatgccgccgcagggcaggattatcgctacacctacacggataaaaacgataaacccgagctggagttaacggaagggctcttcggtgtaaaagcctttcactatcacacaccgctgggcatgggatcggccagttacatccgctttaacaaaggtgtctatgactatattctgctgagtaaagacacggggcatgaagagtttcagggtattcgggtgtacaaaaatggagacctgatatcgacccatgaatgcaaaacccgtctgatgctcgatacccgccagcttcctcaggacggtcacgttgacaacgacaaaatgggtgaacacttcatcctgaactga

SEQ ID NO: 99072 - DNA, 168 bp, Enterobacter aerogenes
atgaaacgatgtgcaagatgtaacaagagaaggggcgtcatcagccgcctgtttgggcttgataaggaatactgcgacgagtgcttatttgatactgagcaggaaatcagggaaaaacgcattctccccgtcaggcgtcagaaagatgacagcgaagggaaagtgtag

SEQ ID NO: 99073 - DNA, 945 bp, Enterobacter aerogenes
atgcagcctgaaattgatgtcagcattattatcccggttttcaatgcacagaccagcatcggccatctgttacatggactcctcagcgagctaacactcagcattgaggtgattgttgtggatgacggctctaccgacgaaacgtcgaccatactcaacgccatcactgatgagcggctgattcttgttcaccaggaaaatcagggtgtatatgccgcacgtaacaccgcgctggcggttcatggcggtgagtgggtggtctttctggatgcggatgaccggattgaagaaggttttctccgggagagactgaagagcgcacgggagagccaggccgatgttgcccttttcaatggctggcatagcgacaaaagtggcttacagcgaaggccggttcatcacaaacagccctgtggtcaggcgctcaacgggcatgcgtggatacagcattgcgtggcgcagaaagagtggccgcactacctgtggctgcagatgattcgctcatcttacatcaggaagaataatctgcgctttcaggagggtaaaagccataaggacatcctctggacgattaacctcgccgctgcaaacggcctgttttatttctccgacaggaaggactatttctacattacaaacccggtatccattacccaccgtcaggactactacgatatccgtgcacacagctacattgacgttatcagcgacattctcgcgctctcatccctgccacagcaccatgcaatcagtacatccctgagaaggcatgcgctggttgagtgccgtcattttctcgggctttaccgccgtaaaattaccaacaggcaggcaacgcgatcgctgttcagggagcgaatcagcttccggcagctgattgcgggtgtcagcagtctgagcgacgtcttttttctgctgaaattcgttgtgaaaatttaccggtga

SEQ ID NO: 99074 - DNA, 876 bp, Enterobacter aerogenes
atgagctccggaccactgacatcaagacgacaatttctgaacgacatccaggctgaacagcattcggacgcgttgagatcaggtaaggtgtggctggcaacccagcggatgctgaagcgaacaggacgtgttttcgtatcggataagactgatccgacagcaccgggatctgtctttgattttaatgatgttcgggatttatacctcctgcaactggcggcaagcgggataaaaaacgccgcaggattttcctcctgggttgaaatctctccggttcataaacggagtacccttcactcatccctgggggctcaatatatgattatcccacgctctgtacggagaaaagtggatgcctacagacaaataaatgcagcgaaacatatgccagtacaggagtttaaagggagcctgtatgctgcattaagcagggcgtttggttcaaaaacgacagcaaatgagaaactccgtcagctgccattgatgccggaagaaatcagaaaggtaacagatcctgatattaaagtttatggcatgacaggagaaaaaatttccccgtcgtttatcctttttacgctcgaatgtaagcgacttggatacagtacagaacatgatcttttatgggacttgttccggataatcaaagataaacatatgctgagctcgttaggcgacagcctgttctttacctttctgtatcctgatgacggggatttcttttcctgctttattcgcgagcatcaggagcagtttccctctttgcaggcaaaaagggacgctattagatcatttgtacaggccgttcatactcgttatctttttactgccaataaacgtaattatctcaaacgtaaaaaaaagaaatggtcagagtaa

SEQ ID NO: 99075 - DNA, 771 bp, Enterobacter aerogenes
atgcgtcgacctgaaaataatcaacagcgaccaaaccaggctcatgccgaagcaaaccattcacttagttttattccggcagatcaaagtcgcctgctggactgggtcgactcagaacgcatcacgttctggtgctggctatttatcaggagtgcttcatgcgcatttttaggtaagcagatagctgacctgcaggatagcgatattccttataagttttttgaagtcagcagcaatccgttaacgcatgatgagcgtctggttgctgtgaaaaaatactttgagaagatggagaaaaaatcgagccgggctacagcttatgaggtcatgcttgaaatgcaggatgagtggttatttattgctgataaaacaaaagatatgtcgtggcttccacgtaaagagtccgtagtttgctgggcatgggactacatcagaaagctatcctatttcagcaacaaaggcatctcatcctggtttcagccacgcaatgtaaccgaaaaaagaatggcgatcatcgctgcgtttgacgagttattcccggaagaatatatacacaggcttgacatcattaagtacaggaatcatttaataacgaatctgaaggctgcgtatgataaaaaaatgggcagtaaaagcgataaactcaggacacagattagcgtaaaaattagcaaacatgcaaaacaacggctcgatacccttatgaaggaaagaggtgccacacaacaatccattatcgaacaattgctgctgaacgggaggctcgactga

SEQ ID NO: 99076 - DNA, 636 bp, Enterobacter aerogenes
atgtttgattcagaattacttgatcatcgccatggttcattaaacgccaattatcttaagaaaatagaaaatgttctccagtacgctctcaatgaacatccccggacattagccgtacgtgttgatttacgtttatcgccatcctggtcactgaatgatacgttaacatgtcatccgaatttacaggctgaccttttaagccgttttgtttgttcagtaaaagccaaaatccggcattacaggaaaatgctgctgaaagaaggaaagaaagcacatgcctgtacccctcgttatttctgggtaaaggagagtgactctgctgaatttccgcattaccacctggtgatgtttttcaataaagacctattccgggggctgggccggtttgattcggaggagaataatctcgccagcatgatccggcaggcatggctgagtgcgctggatctgaaaggatacgatgagtatcagtccctggttcatttccctaaaaatggtgtttatatccttgatcgtaacgcgcctgacttcgttaagaactttaatagcctggtgtttcgtctcagttatctcgccaaagaaaacaccaaagtctacagcccgaatgagcgctcaatgggggccagccagaagtag

SEQ ID NO: 99077 - DNA, 234 bp, Enterobacter aerogenes
atgaataccaaaaccagcgcagcagctgcaacaacgttactgaatgcagacgatccacttatcgatatgcacttcatcaccgcttacacaaacatgaccgacaagtggttttacaaactgattgctgagaaccagttccctaaacccatcaagttgggtcgtagtagtcgctggcgtaaaagtgaagtggaagcctggatgcaggaaagaatgactgaatcccgctcgtcctga

SEQ ID NO: 99078 - DNA, 240 bp, Enterobacter aerogenes
atgaaacaaaaggccgctaaatacgccctgaatgagtttggctatctggttaatgttaaagactttcgatttccgccagcaggaaagctttactgcttctattgtacccatccggtggtgctggtgcctgctcaggataacagtgacgcacacttccagcatgtgctcacgatgtcaggtcgggatgaaatcattgcctgccccaccctggagtcgtatcagactaagcaagcccgctaa

SEQ ID NO: 99079 - DNA, 561 bp, Enterobacter aerogenes
atgagtcattacctgtccaccacaactgccgggagtttggctgatgtggctcacgttcgtgcctttctgcagcaggccgttgatcattatccgcgacttgccgcgttttgttttacactgagattgccgtgccgcgagaatcttgcggattatcagtcattaatgttgcgttttcataccgaagtctggcagcgcaccgacgagtattcgcgtaaacgtcagcagacccgccgtcattcaccaccgacggtcttacgctggatatggggggcaaccagtgctccggtttgtcgcatggcgttgatgatgaatcttgacacgttaggaggggggaatacttcacagcttaacgacagcgcgttgcaggatatgagcgaaatcatatgcgatgcagggcagacggtcagtgggatccgttatgatgctgtgacaaatatggcatcgttatccatcagtcggtctggccgtggctcattctcatccccattcaaacaactgaaagcatggatacaggccatggacgcgccagttaccatggtcagaactggaatagcaggttaa

SEQ ID NO: 99080 - DNA, 189 bp, Enterobacter aerogenes
atgttttccctgtatctgttctggctggccgaaaagctggggcgtaccccctacagtgtggcctgtaagatagcggctctccgggacatgccagaagagtggaaagatcagtaccgcaaggtttcggatgatattcgcaagtcaggcctgagcatcagcgattatgttcagcataacggccagaattaa

SEQ ID NO: 99081 - DNA, 444 bp, Enterobacter aerogenes
atggaaattgaattagataaaagctttagagaaaggattttccacgcagtcatttttgaagtcacggccaatattattatcgcgctgtcactcgcctggctgatgaacgtgtcggtactccagtcaggctcactgtccgtgatatccgcgctgaccgctacggcctggaattttgtgtttaacaaactctttgactcccttcagaaaaaataccggtttgaaagaacatttctggttcgcgcactccatgcggcctgttttgaagttggacttatcatcacgttaattcctgtggcaatggtgatgctgaatttaacggtaacggaagctttttttgttgagatcggtcttgtactgtttttcctgccgtacacgatgctgtttaactggatctacgactacctgcgctggacatttgttggacgtaaacggtctgctatgtag

SEQ ID NO: 99082 - DNA, 729 bp, Enterobacter aerogenes
atgaaaaaaatgtatatttttctgactgccgccatctgcagcgttctcagtgtatcaacaacatatgctaaagaaaataaaggatttctgaatgcggatacttccccagacagccttgcaattttgcctccaccaccgactgagaactctgttgcctttctgcaggataaagctgactacgagacggggcgggttttaaaaaacaaagaaagaaccgaactcgcagccaaggatgccaattataaaaactttggccaggcattttctgaagcgttcgggatggtgatttccgctgagcgtacaccggtactttatctgctgctcagtgaagttttgcaggacagtcacgattatgcaatgcgcagcgcaaaagatcactatatgcgagttcgcccctttgttctttataaaaatcctacttgtaccccggagaaggatgacaaaatggcaaaaacaggatcctatccttcgggccacgcttcattcggttgggctgcagcgctggtattagctgaaataaatccagcccgcgaaacggaaattcttaaacgaggtatggatttcggagagagccgggttgtctgcggtgcgcactggcagagtgatgtcgacagcggtcgaattatgggggccgcagtagtggctgcgctgcatgcaaatccccgtttcgccaatacgctttctgaagccaagaaagaatttgcggcgctgagtgcgaaaagcgagtga

SEQ ID NO: 99083 - DNA, 213 bp, Enterobacter aerogenes
atggattataccgtccagcagaataccctcgaccttgatatgcccgtttttttagcttcgtcgatcatgctgcgcagcgcctcaatcgacaatggtctggattcattctacctgtgcaccattgcgtggcagttagggcgcagatatagaggatcgctatccccagtgaacaggatcgaagtgcagctgttcgtcacgttcgctcagcagtaa

SEQ ID NO: 99084 - DNA, 189 bp, Enterobacter aerogenes
atgtgtggacgtttttcccagtcgatgacccgcgaaaattacctgtcactgattgctgatgaagctgatcgggatattacttatgacccggtaccaatcggccgctacaacgttgccccgggtacaagggtattactgctgagcgaacgtgacgaacagctgcacttcgatcctgttcactggggatag

SEQ ID NO: 99085 - DNA, 207 bp, Enterobacter aerogenes
atgacaaaatcagcaaccgtaagtaagaagtcgcgtaaacaacattctccggagttccgcagcgaggccctgaagctcgctgagcgcattggcgtggccgccgccgtccgggagctcggcctttatgaatctcagctctacgcctggcgcagtaaaatacagcagcagaaatctgactacctaaaaaacaagcttaacgtgggataa

SEQ ID NO: 99086 - DNA, 756 bp, Enterobacter aerogenes
atgtctaatcgagacaaaactggagaaccacctgagtcgatttggtttcgctgtgcaaaatgggttgctggaacagattttcctgatcagagtttgcactgggggaagctcatgtattcatgcgtgggcctggtaaaaataaatgttaatggggatacatacctttctactcctgagttcgcagtctggttgccaccacaaaccagtcatcagtccttagctttgacaaatattgaatatgtaatcattcactttcatgaaaaattatgcagacatttatcttctgaggttaaaacccttaaaataaatggaataattagagaaataattaaagatttctcccggagatctgttgggtacccttcaagtcaggctgataaaaacctcgcaaatgtcttgggtgagcaactagccctaagtgacagttttgactgttttcttccacttagcgacgatgaaataataaaaaaaataacacaaaaaatgattaaccaacctgatgctgtttatacacttaagagttggagtgataaaataggattaagtgaaagaacgctttcaaggcgattccttttatccactggcattaactttaacgagtggagtataaggagaaaagtattattggctataatcctccttcaagaaggaaaatcggttaagtatgtatcttcatccttgggctaccacgatccttccgcttttatagccatgttcaggaagcggatggggatttctcctggacaactcgattag

SEQ ID NO: 99087 - DNA, 774 bp, Enterobacter aerogenes
atgttcaataaaatcatagatttatctgttccacttatgacaggcatagcctcagatcctccagcatttctacctgaaattaattatgtgaccaacagtgaaggagcctcccaactggctgctagcttccccggtttaaccacaaatgagctgcctagacatgaaggctgggctgttgagtttgtcaaaatgagcacccatgcaggcacacatatggatgcgccatatcactatcattcacatatggatgatggcaccccttcgcttacgattgaccaaatcccattagagtggtgtgtggggccgggcgttaaacttgacttcagacatttcccggatggctatgttgtcacttcagctgacattgttgcagagcttgcaagaattaatcatgagcttaaaccaaatgatatcgttttggttaatacatctgctggcagcaagtatgggaaggatgacttcttagacagtggttgcggaatggggcgagaagccacactgttcctgacatcgcgtggtgtaaaagtcgttggtactgatggatggagctgggatgcgccgttttctcgcacgcaaaaaaaatatgaacaaactaaagatgcttcactgatatgggaagggcattttgcaggcagtgtattaccctactgccagatcgaaaaacttactaatctggatcttcttccatctacaggatttactgtgatcagtctcccagtaaaagtagcagctgcttctgctggctgggcacgtcctgttgctttgattaattaa

SEQ ID NO: 99088 - DNA, 225 bp, Enterobacter aerogenes
atggcagagagagaggctacaattcttaaattcgtagaggagtgtgtggctaaggtgaaagtttctgataagattttcaataaaattcgcgaattttatgatgacacacaaatcgcggaattaacgctgattattggtcactatatgatgacagcgcgattccttgaaaccttagagataccgcttgattcagcggctacttcatgggatgcaatgtctgtttaa

SEQ ID NO: 99089 - DNA, 735 bp, Enterobacter aerogenes
atgcatcaggactggtcgccggaacagatcgccggttggctgaaacgctgttatccggctaatcaggaaatgcatgtgtcacacgaaacgatttataaaacactttttatacaaacccgtggagcattaaaaaaagagctgcagcaatgcctcagaagcgggagagcagtgcgtagatccagaacgtcatcacttaaagggaaaggattagggtcaatcccgaacacgatacctatcagcgaaaggccaccagaggcggctgacagagccattccaggtcactgggaaggtgacttgattcagggctcgaaaaattcctatatcatcacccacgtagaacgtcattcccattttgttatgctggcgaagatcagagacaacaagaccataacggttatatctgcactcatcagacaagcccgggaattacctgctgagctttataaaacattaacttgggatcgtggcgctgaaatgaccagccacactcgatttactgtagcgacaaacattcagatttatttttgtgatcctcaatctccctggcaacgtggctcaaatgaaaatacgaacagattgctcagacaatattttccaaaaggaactgacttatcggttcacagccagcagagacttaacagtgttgccagacagctcaacgaaaggccgagaaaaacgctagactatgaatcacccgcagaacggttcaataagtgtgttgcgtccatcagttga

SEQ ID NO: 99090 - DNA, 1341 bp, Enterobacter aerogenes
atgaaagtgattaaatcagtggcgaaacactcaataaaaggattcctgcccgggatgttatttcttgctcttcagccatatgcggctcaggctgcagatgccttcagtactggctccccatggatgctgggcggctggggaggagtacgttcagacttacagcagaacggcgtcagtttccaggctggctataccatggaatcagcatccaatctggctggcggatatcacacctccaccaccgcacgttacagcgatcagtgggcgttcggggttaacctcgatctggaaaaactgctgaactggcaggatgcggaattccagatgaccatcacggaccgtaacgggcaaaacctgtcagatcaaattgccgatccccgcaccggcatgctgtcatccgttcaggaagtctatggtcgtgggcagacctggcggctgacgcagttctggctgagaaaaggactttttggcgatgtgctcgatctgaaagccggccgcgtcaccgtcggcgaagattttgataactttgacagcaagttccagaatctggcattcggcagcgggcaggcaggcaactggcgcggcgatcactggtacaactggccggtctcccagtggggcggacgtgtacgtctgaatattacgccggaagtgtttatgcaggtgggcttctataatcagaatccttataactacgatcgcggggatggtttccgcctcgaattcagcccgacagaagggaacctggttccggtagagctgggctggcagccgaaactgggcagtgataaattgccgggtaattaccgacttggttattactactcttccgtcaacgataatgtgtatggctcatggcataacggtggctttaatgataccgctcatgcctacggcggttatatcctggcacagcaacaactgagcgctcagggtggcagtaccgatcgcggaattacattaacccttcaggcggtgatgaacgatcacaaaacctcaaaaacagataattatcagtctatcgccgtcacctggaaaggcccgtttgacgccagaccacaggatgaaatcggtgtgggtgccgcacgtattcatgttaactctgcctatacccgcatgctacgccaggaaaatgctttcaacggcgagacagactacaacagtccgacttatctgcccgtccaggaaggagcagaatataactatgaactttattacaatgtgcaggcgactgactggctacagatccgcccgaatctgcagtatgtttccgcgccgggcgcagtaagtgaagtggatgatgctttcattggtggcatcagcgcgaacatcgtcttctga

SEQ ID NO: 99091 - DNA, 612 bp, Enterobacter aerogenes
atgagcagactggaaaaaatacacctcgtggtacagatagccgcgcagatcaccacgatagctgctgctattgcggtgggtgcatgggctttttattccacgttttatgtgaaaaaagaacagctcgtcacggaatacaccctgaaggagttagctcagaagacgatccgtgagcctcatatccaggccagaatcgatgccaccattcagccactcgatccagacggcagtctgctgcaggtgaaagtcacgctttccaatcccggcagtctggaaggtaaggttctgctggatgatgccgcattgacgctggttccggtcagtttttctgaaggttctcccatttaccagtcgcccgtcagcctgatgtccggtcgctacgcaggcccgctgcagcgcctggttctgcccttcgtgaatatcggagctggcgaaaattacgagttgatgttcatctatcgtatcaacaccccgggaacgtatctgatccgtttcctggcgctgaatgataccggccgtcaggagaaacaacatttcgaatccgggcaggttccgtaccggtactccgttggagcagatcagtatgtcgttatccgacagaaaggacgataa

SEQ ID NO: 99092 - DNA, 222 bp, Enterobacter aerogenes
atgagcgttaggcccccaacgatcactggggcgggtctggatagtttcatgcttccgttgattggccacatcgtaccgccagcgcaggccgtatcggtttgcggtttcaacatcgacggtgatcgtggcgtcccgtttctgaatgacctgctccatgggagcttatccatcatcaccctaaattccgcacaggcagccttcagggcgtcgatttggtcctga

SEQ ID NO: 99093 - DNA, 1023 bp, Enterobacter aerogenes
atgtttaatcttctaagaatcgaacccgcttttacggatgatgaatatggttttacccaatctttgcttgcttatattaacggagacagcaatttcatcactgagaaggaaaaactcggtgtaatacttgaacatgcatacgatcgccactctgcgagcgatcagaaaattgttcaacatgctctttttcttatttatcaaagcgtacttgctcacccattatcaacgccagctgccagacaatatgatccagctattcttgaaattaaaaatgccattgaacaaaaatggcttgagagtgaattttctggtctggttatccctccagaagttgattccgtaaaacattacggcgattatttaaaatcagtctggcaaacgcataatgcatctcatcatcaggtttttgaatttcttgaaaaagatgccacaacgaaacaactctattacttctttaaaagcgacagcgcattaaatttgattttttttgacctcgttgcctatacattgattggttctcaacctgaaaccaggggaactatcagtgaaaacctctgggatgaaatcggccatggggataatgtatttacgcatgtcaatctatataaagatgttcttgcccgacaggatattacattgccgggaaaccactatatagatatgtatggcgttgaagcattagcaggccacaacgcattcatgattggctccgtcaaccgcaaacattactacaaattgctgggtgtcatggctatgacggaagtacttgatcctccgcaatacgaaaaactggtgaaagggtgtatccgtcttggactggttgacagggatgtaaaatattataccgagcacatcactattgatattaaacatggtgatgactggctttataatgttatcgatgtgattgcgaataaatatccagaaacacgcaaagaattttatattggcagtttactcaggttgcgcacagcagaacgctattacgatcaactgatgaataacctggattcgatagtctga

SEQ ID NO: 99094 - DNA, 912 bp, Enterobacter aerogenes
ttggcgtatttactactggcacttgctgccattttctggggagggaattatgtcgtcggacatattctggttcagtatgttgatccttacggacttagcctgatacgttgggctggaacgacactactgatgctcgcgttttactggaagatcttttctcgtgatttttccacactaagacaaaacattggcatcaatacactactttcattcctaggtcaggttagttttcccttaagtctttatataggattacagtacaccacctcactcaacgctgctatttatatttctggcactccctgtatggtgcttttaatcaattactttattttccatgaacggatttcagcccggaatgttgctggtgtaattgccagtacggttggtgttatctaccttgcattttccagcgccagtggtaacggcagtatgaaagcttttggctggggggatgtattgacgattatatccgcccttagctgggcgttttactgtgcttttttgcggctaaaaaatacatcggtgaaaaatacgtcttttgtagctttcagttcactgattggtactattatcctggttcccatgttctgtctgcatgctgcactgtcgcccagttatcatggcataatttatactgccagcccttcagtgattatcgggatcctttacttaatcatctttccgtcgtggttatcctatgttttctggagtaaaggggtttcattgattggtacaacacgcagcgaaatttatactcatctgataccggtttccggtggtcttatggggatcctctttcttggcaatacgctcaggacataccacatcataacgctgatactgatcgtcttcggtattatctgttgttctggtaataaaagtgtaagcgcaagccgccagcccgattga

SEQ ID NO: 99095 - DNA, 249 bp, Enterobacter aerogenes
atgcaactcaaaatgcaattaacaaagcaggggataaaaaatgaagaaagtaacactctctcagctcagactaggagccatatatggaactgtgtcttttttgctttaggtcttattcttcgctttagcattacgtatttacacactaaaggatttgatgttagtcacaatgacattgttaaaacatttgtcatgagttgtattgcaggtgttggtgcaagtattcgtcctatgtgtttgcaaaaatag

SEQ ID NO: 99096 - DNA, 2391 bp, Enterobacter aerogenes
gtgaacctcattgcggcgcaggatacacagcttaccagcggtagtaacaaaagcagcggcggcagtattggcgtcggcgtgggggtgggctccggcggcgccggtatcagcatctcggcaaatgccaacagcagcaaagggcatgagaaaggtaacggcacctggcagaatgaaacgacggtggatgccggtcatcaggtcaccatcgccagtgggcgagataccacgctggccggcgcgcaggtcagcggccatcaggtgacggcagatgtcggccgtgacctgacgataaccagcctgcaggacagcgaccactacgacagcacgcagaacagcgtcagtggtggcctgggttacaccttcggcgccggatcgttctcgggcagcctgaatgtcagccgcgataagatgaacagcgactacgattcggtgcaggagcagagcgggttgtttgccggtcagggcggttttgatgtgacggtgggcaaccacacccagctgaatggcggggtgattgcttccacaggtagcgcagataaaaacagcctcgataccggcacgctgggtttcagtgatatccacaaccaggcggattataaaacgcagcatcagggcggcggtatcagcaccggcggcagcatcggctcgcagttcgccggtaacatggccagcgccctgctggcggggggtggcaacagcgggcatgcggaaggctcgactcaggccgctgtggctgacggcatcatcaccattcgcgacaaggataatcagaagcaggatgtggctgacctgagtcgcgacacggagcatgccaacggcagtatcgggccgatatttgacaaggagaaggagcagcggcgcctgcaggaagtgcagctgataggtgagactggcagccaggcggcagatattgcgcgcacgcagggagagatagcaaaacagaaggcgatgaaagacccggcagccctgacggcggtggaagcgaagctgaaagcagagggaaacagcagtccgacggcagaacagattgcggagcaggcgggtcgtacggcgatgcaggattatggtaccggcagtgacctgcagcggggtatccaggcagccacggcggcgctgcagggactggcgggcgggaacatcgccggagcgctggcgggggcatcggcgccggagctggcaaatattatcggacatcaggctggtcttaaggatgatgatattgcggcgaaaaccatagcccacgcgatattgggtggtgcggtcgcggcactacagggagggaatgcggcggcaggagcagccggagccgcgacaggtgaactggttgcgaaagccattctggaaacgatgtatccgggcaggcaggccagcgacctgagtgaaagcgataaacagctcgtcagtaatctggcgaccatcgcctcgggatttgcgggcaatatagtcgggggggactcgcagagcgcaacaacgggtgcacagtctggtaagaacgcggttgagaataacttcctgagttcaaaagaagcccggcagcttgataaagaaatgcaagattgtaagaagtcgggcggagattgtaataaggttgtcgagaaatatatcgatatcagcaacaaaaaaagtaaagagcttcaggaagcctgtacaggaggtggtgttagatgtgttagctggcaggaactgatacagggtgcgactaatgttgctaatgatgctaatccacatcaaatccggttggatgaaaaactgaaggatccaagtgccgcagcattggtaaattatcttaatggagtcgatcttaaattcttgcaggataatattacgcagggtgatcgtatattgtctgtagtcatggatccgacttcctggccagtggcgataatgggaggtaaagccattattactaatactgttaacaatactaaggagcagcttattgctgtgggggttggtgctgggctgagtgctggtattcaatatgggacaacaggaaaagtgagtttgtcagacttaattggctctggtgtgatcggggcgattactgctggtaaaggttatgaccctgtaatgacatggaacgcagtaggtggctattatcaggccgaaattaaaggtgatgatccatttatggctgcgttagtgagtaaggctggggcttcagctggttatactgcgggaaatgttctaaaagttcaggctgataaaatatttaatccgatatcaaaacaatatgaatgggtaccgactggtgtctggacaataaccaaaccagtgccacaaagttctgtaccttcaattagtgctaatgctatcgactcttttacctctggagtagtgggggatagtttgaacaaagctatttctggaggtaaaaatgaatctaaataa

SEQ ID NO: 99097 - DNA, 249 bp, Enterobacter aerogenes
gtgtctaaaaccattgaaccactacaggcgggatttaccgacgggataccgataaagatacggatgatgccggactgcatcatcatcaccgcccagaacacccgcgaactgtacggctgcgccgaggggctgagcgtggtctccgtcaaccggccgaagatgaaacagtggcttaagaccttccccggcgcgctgaacgacaccggcgatctgccggtgatcaagcgcgggaacgggcattttgggtag

SEQ ID NO: 99098 - DNA, 375 bp, Enterobacter aerogenes
atgactttatttgatgagtgtaaagaagcccttagcgctgattttgatgtgcttgaaggtcagcgcgagaaagaggctattaatattttgcatcaatttccatttgctaatggaaatatattatgggcagatcttaagtattcggattatgaggatatcaacgctcttatatcagataatcataacaaaaatgacgatgtgttcgtttttgtagatgatattagcattcctatttttagaactaagctgattttgattgctgagaatatttatgacgttacagctttatcgccgaagttatttgtttttaacaatgaattaatattacagcctttgtttccaactgaaataatccgtttaggtatgaagagttag

SEQ ID NO: 99099 - DNA, 741 bp, Enterobacter aerogenes
ttggcgggcgatcaggctcgtgcaacagtaaaacaggccgctgaatccctgaaaaatgaggtcagggataaactgggtgaaggtacaacttcttctatcgccaacggtattatcaatgcccttgcgaatacgggcgatgcggcattaggttcagcggattatgctgctgatgcggcgatggcgctggcctcgtgtgcggtcggcgacagctactgtaataaagcgctgagcgacctgtccgggaagaatcaggccgtggctgatagcgttaaggcgctgatgcagagtgaaacctggtcagcggttgcggatacggttaaacaggcggccggagtaaatcagacggcgctggaagccacggggggaatgctggcaggtattatcttgccgggtaagaaagtacccgccgcagcaaatcgaattgaaacgatacttaaatctgagaaaagttgggaaagtgcacgaaataaggcattgggtattgttggtaatttaggggcagactctaaacctgtaattgggcggttagaagtaagtgcagggaatggaaaagtaattggacgtcaatctagtgatggtaaagttggctggcgtgttgattatgatcctgaaaagggaacgcacattaatatatgggattactctcaaggaaaagggccgggaaaagcagtcaagcaagtcataccatttgaaggtaatgaaaaatcgtttgaaaccatattgaaacagttgaataggtag

SEQ ID NO: 99100 - DNA, 273 bp, Enterobacter aerogenes
atgaagctgatgaaaccactaaaaaacaataaaagtgtcaatgtgaacaacctcgtagtgctaatagtacgttgtatggtatgcattttttttatggcaatgatgggctgttttcttggcagattgatagtgttctttaaaactaacgttttatttttcgattgggcaaaggatgctttttattccttgaaagtaggtgtttctgcgggtgcgttggcaggagtaggtatttggacaaaagccaagttacaagagcacaaaaacaaaaaataa

SEQ ID NO: 99101 - DNA, 9852 bp, Enterobacter aerogenes
atgtctcagccctctgttcgtttctcatcgcgtctgctgagttacctggttagcgcgttgctggtctggcagccactgctgcccgcgatcggtgcggccatcgccccgcaggggggcgcgacaatggacaaggctgccaacggcgtaccggtggtgaacatcactaccccgaacggggccgggatttcgcataaccagtttaaggactacaacgtcgggaaagaagggcttattctcaataacgccacgggtaagctgaatcagacccaactcggcggacttatccagaacaatcctaacctgagggtcgggcaggaagcgaaaggcattattaatgaggtgaccggcggcaaccgctcacagctcaatggttataccgaagtggccgggaaagcggcgaacgtgatggttgctaacccgtatggcattacctgtaacggctgcggctttatcaacaccccgcagaccacgctgaccaccggcaaaccggtatttgatgcaaacggaaacctacaggcgctggatgtcaaaaagggcagtattacgattgaggggcaagggattgatgccagcggcggtgatgcgctgtcgattattgctcgtgctacggaagtcaacgccgccattcacgcaaaagatcttaaggtcattgccggggctaaccacgtggatcacaacggggccgtcacgccgatagccggggaaggaaatgcgccggtggtggctgtcgataccggggcgttgggtgggatgtatgccaaccggattcatctgatgtccaccgagaaaggcgttggggtaaatctcggcgacctcaatgcccgccagggtgatatcaccctcgatgccagtggcaaacttaccgtccataacagccttaccagcggggcactgtccgctaagggtggaagcctcgccctgacgggcgaccacaaatccagcaacagtatgtcgctgaacagccagggcgacattatcctgagcaacggcacgctgaacagcgacggcgacctggtactgaccgccaatggtgcgatttcgcacaccagcgaaaagctgaccgccggacgtgatgcaacgcttaccgcgaaaaacatcagccaggatgccgccagccagattaacgccgcccgccatatcgaggctaaagccagcgatacactgaaaacgcaagggcagatgatagccgggcaaaacctgacggtaagcagtaacaccctgacgcaggacggcaggctgctggcacataaccgtgctcagctgaatgccggcacgctgaataaccgcggctttgttcagggcgcttccctgagcgtgggcagctctacgctccgcaacgccggttcgctgctgagcggtagcgatctgaccgtcaatactcacaattttacccaaagcggcagcagcggcgcgaagggcaaagcggacatcaccgccagcgggaagctgaccaatacaggctcgctggtgagcgacgatgttctggtgctgaaggcgcaggatgtcgcgcagaacggcgtgctgtccggcggtaaagggctgacgatcaatgtgcagaccctgacctccggcaaaaattcggtgacgcacagcgacgccgccatgacgctgaataccagaacagtgacgctggacggggaaaccagcgcgggtggcgatcttcagcttcagggcgacaggctcacgactgcggcgagcgcacagcttcagagcggcaataatctcagcctcagcgcgcgggaagcggcgcttgcgggtacgcaggcggcactaaaaaacatgacagtgaacgctcgtgaaaaactcacccacagtggcaaaagcagtgcggcatcgctcagcctcagcgcgccagaactgaccaaccgcggcgtgcttgtggcttccaccctgaacacgcagtcgcaaactctgaccaacagcgggttgctccagggtgccagtgcattgctgattaacacacaaaaactggacaaccagcagaacagcaccctctacagtgccgcaaaactgacgctggatattccggacatccacaacagtggacttatcatcagcgacaagggtttaacgctaagcacggactctctcagcaatccgggcaaaatcattgctgacacgttgaacgttaaagcgaccacgctgaacggcgacggcctgttgcagggaaccggggcgctgatgcttgccggtgatacgctctcgcaggggagcaacgggcgctggctgacggcgggcgacctctttctcagcggtaaaacgctgaataccgccgggaccacgcaggggcagaacctcaccgctcaggcggccagctggaccaacaacggctccctgctggcaaccggcaatcttaacgctacgctgggcgcctctctgctcaacaatggcgacctgatgagccagggtgatttcgggctgaacgtgcccgtgctgactaaccacggcagcatcctctcatcaggcgaattgtcgctcgccggaacaacctttaccagcgatggctcgcttcagggcaatacgctttcgctgcggcagaacagcatcgacaacagaggggcggttatcggcctgaatggcctgaccttgaacagcaccggtcggcttaccaacagcggagacctgctgagccagaaatcgctgacgctgaacgcaggagacgtgaccaaccgcggtcggcttcaggggcagaacatcgccctggacggcagcagcctgaccaacagcggtgcgattcagagtgcgctggatttagccctgaccctgagcggcgacgttatcgccgccaccggcagcaaaatcaccgccctgggcgatgcccgcctgaccggcaaagcgctgagcaaccagggattaatcagtgcgaaaacgctggaggtggaaggggattcgctcagcaacgacggtgaaatcagcggtgttaacggcctgagcgtcacgctgcatagcggcctgcagcagcagggcaaactgctgactggcggtaagctggcgctgaaagccggtaacatcagcaacagcgggcagcttcagggggctgatacccaactcagcgccagcacactgatcaacagcggtcgcattcagggcgatagcgctctgacgctcactctgctgaacgcactcaccaaccagacgaacggcgttatcctcagccaggatgcgctcagcatcactgcgccatcgctcaccaatgacggcacgattcagggcaacggtaaaaccacgctcagcgtggcaacgcaggcccgcaacgacggcaaaattctctccggcggtggcctggtattcaccacgccggactacagcggcagcggcttgctacaggccacgaacctggtgctgaacgtggcgaagtttgccagcagcggcaccgtgctggcggcgaaccagacgacgctcacaggtaacagtttgaccaacagcggtaccttccaggccgcacagctgaacgtaaacgcgcagttcgtcaacaacggcggcacgctgctgggtaatcaggggctgagcatcaacgccagcaccatcaataatgagaatggcaaactgttcagcggcggtgacctgctggccgaaacggtctccctcagcggcgcgggccagattgtggcgctcggtaacctgacgctgaagctggtcaacagctggacgtcacaggggattgtggcctcgaacaaacagctttctgtcagtacccggggggatatcaccaacaatgccaccctgcagggtgacggcattaccctggacgcggcgggtaagctgacgaataacggccagcttacggcaggcggtggtaccacttcgctttccggcagccagattgccatgaacgccagcggcactctgcaggcgggtggggacgtcagtctgaccagccggggcagtatcatcctcgacggttttaccggcacggcgggcaatctgctcctgaacgcgacaggttcgatcgtcaacactgccctgctgtatgcgggtaataatctcgccctttacgccaacagcatccagaacctgcatggcgatatgctgacaggcaataacctggtgatgcagaaagacgccagcggcgcggcgaatgccgaagtgattaatagctccggtagcatcgaaaccgttaacggggatatcactattaacacggctgatctgctgaatacccgcgacggactgaaggtggacaccacataccaggagtttatgccgactgaccagtcgcagctgaacgtctcctttgcctctatggggaaagagaacctggggatcgcctctgattccctatgtaatggcgggaacagcggacactgcacgacctattactggctggtaccgaccttcacctcggatgaaaaaacggtactggtcaaccagcgcgaaactactgttaccgcgaacggcggtgcggcccgcattgcctccgggggcaacctgacggtgaatgccaggacgctgacaaatgaatccagctacctgctggcaaacggcgatatcagtctctccggccagacactcaacaacacatcggcggaagccggcaagtggtccacctgggaaaagtttgtctggagttgcaaaccacgttgcaccacgaagtatgacccgtttccgacggggcagacggtagaggggtggctgaaggcgatgaagaaggataaggattcgggtattgcctataacctggcggacagctggaccgactacacctctgacaaccagcagtaccgggcggttattcaggcgggtggtaatgtcagtgcgcatttcaccagtaatatcagtaataccgacaccaccgcccacggcggtgaaatcagcaacaccatcagcgcaccggatctgaatacgccatcgatgcagaacatcggtggcagtgtcggtcagcagtcgctggatgaggctggtacgcttaccatcaccacgccggactggcagagcccggaggccggccagtccattggcggaggcacaaatctcgcccccggcggtatggatggcaactacccactgcctcccggtaataatggctactttgtgccgtcgaccgatccggacagtccgtatctcatcaccgttaacccaaaactcgacggtctgggtcagctcgatccgtcgttgtttggcgacctgtacaacctgctcggcatgaacccgggcatggccccacgtgagacgggtagccagtataccgatatcagtcagttcctcggttcttcgtacatgcttggtcgcctcaacctgaatccggacaaggattaccgcttccttggcgacgcggcgtttgatacccgctatgcgtcaaactatgtactgaaccagaccgggcagcgctacatcaatgggctggggtcagacctcgaccagatgcgttacctgatggacaacgccgccagcgcgcaacgctcgctcggtctgacgtttggcgtggcgttgaccgccgaacaggtggcggcgctcgaccacagtattctctggtatgaaaccgccacgattaacggacagacggtgatggtgccaaaagtctatctgtcgccaaaagatgtgacggtgcagagcggtagcgtgattagcggcaataacgtgcagttagcgggcggtaacgttaccaacagcggcagtgctctgctggcgcagaatggccttaccatcgacagcagcaacagcattaacaacctcaacgcgggtctcatccgggctggcggcgggctggacctgagcgcgctggccgatattaacaatatcggctccgtcatcagcggtaagacggtacagctggaaagcaccgatggcagcatcaacaacatcacccgtacgcagctgtggagcgtgggcggtgacagccgtcgcgaaagcgtccacataagtggcaccgatgtcggacaaaccgcctccatcagcgccagcgatggtctttatatggcagcggcgaacgacatcaatatcaccggcgcgaaagtaaacgcgggcggtgacctcgccatggatgccggcaatagcatcaatatcgccgctaaccagataaccgacagcagcagccgatcaggtgtttggggccagaaaaacaccagtacatcctccacctcaaatcagggtagcagcattacggcgggcggtaacgcggtaatgcaggcgggcaacgatctgaacgtgacggcgagcgctatcaatgcgggtaaaaccgcgcagctggtggcggaaaatgatctgaacctgaacgcggctgacagcgggcagaccagccgcacgggcggcagtgaaagtcatcagggcagcgccgacagaacaacgatttcagcgggcgacaacgtaacgctggttgccggacgggacgtgaccagccaggcggcaggcatcgcggcggaagggaatgtcgggatccaggccgggcgcgacgttaatctgctggcggaagagtccgtgaccggcagcagctcacactcgaaaaagaaaaccgttatcgatgaatccgtgcgccagcaggggaccgaaatcgccagctccggcaacaccaccatcgtcgccggacgcgacgtcaacgccgaagcggcgcaggtgaccgccagcggggatatcggcgtggcggcaggccgcgatgtgaacctgaccacggcgacggaaagtgattaccactacagggaagagacaaagaccaaaaaagggtttcttagcaagaaaacgactcacaccatcgaggaagacagtgcgacccgtgaagcaggtaccttgctttccggcgacagcgtcaccgtgcaggcgggcaacaacctgctggtgaaaggctcctccgtagtgggcgataacagcgtggcgctcgacgcaggtaataacgtcgatatcgtggccgcgaccaacacggatacctcctggcgctttaaggaagagaaaaaatccggcctgatgggtaccgggggtatcgggatcagtatcggcagtagcaagactacccacgatttacgcgaggcgggcaccacgcaaagccagagcttcagcaccgtcggatctacgggcggtaacgtggttatcgctgccggaaaccaggcgcacatcggcggcgcagacctgattgccggtaaggacatgagtctcagcggcagcagcgtcatcatcgacccgggccacgacaaacgtacccgcgatgaaaccttcgagcagaagaaaagtgggctgacgctggcgctttcgggcactgtcggcagcgcgattaataatgcggttacggcggcacaggataccaaagaggaaagtgacggacggctcaaagcgcttcaggccactaaaactgtgctctccggtgtgcaggccggacaggcggctgacctgacggccgacccgaacgcgatgggcgtcagcctctcgctgaccacgcagaaatccaaatcgcagcagcacgctgagagcgatacgataacgggcagcacgctgaatgcaggcaacaatctctccattaccgcgaatggaaaaggcaagggcccgaacagcggcgatatcgttattgccggaagccaggtgaaagcgggcggcgacacgctgctggacgccaggcatgacgtcattctcagtggggctgctaacactcaacagtccagcggcaagaacagcagcagcggcggcggtgtcggcgtaagtattggtgcaggtaaaggcgccggtatcagcgtgtttgccaatgtcaacgcagccaatggcaaagataaaggtaacggtaccgactggactgaaaccaccatcgacagcggcaagaccgtcaccattaagagcgggaatgacaccgtgctcaatggggcacaggttagcggcaataaaattgtcgccaatgtggggcacgacctgctgatgagcagccagcaggacagcaacaaatacgacagcaagcagagcagcgtggcggcgggcggcagcttcaccttcggcagcatgacgggctccggctatatctctgcctcccaggacaagatgaagagccgctttgactctgttgccgaacaaaccgggatgttcgccggtgatggcggctttgatatcaccgcggacaaccatacccaactggatggcgcagtgattgcctccacggccacggcggacaaaaacagcctcgataccggtacgctgggcttcagcgacctgcacaacgaagcggacttcaaaacccagcattcgggtatcagcatcagcggcgcgggcagcttcggcgaccagttcaagggcaatatgccgggtgggatgattgcggcggcgggcaacagtgggcatgccgaaggcacgactcaggccgctgtggctgacgccaccatcaccattcgcgacaaggataatcagaagcaggatgtggcgaacctgagccgcgacaccaaacatgccaacgacagcatcagcccgatcttcgacaaggagaaggagcagaaccgtctgaaggaaatcgggatgatcagcgatatcggcggtcagatggcggatatcgcgcggacgcagggggagctgaatgcgctgaaggctgcgcaggataaatacgggcctgttcctgcggatgcgacggaagaacagcggcaggcatatctggcaaaactgcgtgatacgccggaatacaaaaaggaacaggaaaagtatggcaccggcagcgacattcagcgcgacatccaggcagcaactgcagcgcttcaggggctcgcgggcggtaatttagcgggtgcactggcgggggcttcagcaccggagctggcgcatctgctgaaatcgacagaagataaccctgcggtcaatgccataacacacgcgatccttggtggcgcggttgctgcgcttcagggaaatagtgcggcagcgggtgcgattggtgcagggggcggagagctggcggcacgcgctatcgccaatatgctctaccctaatgtagataaactttctgaagaacagaagcagacagtcagtgcgctggcgagcatatctgcgggtatggctggagggatcgctacagggaatacagctggggccgcgacgggtgccggtgccggtaagaatgcggttgagaataatttccttggtgcgacatcttcagacaaactcgacaaagccattgagaaaattaagaacggtgataagtcattagctacagccaatgagcttattaagctggaaaatgctgacaaacgcagtgatgcactggtttctaaatttactaaagacccttcacagatgagcagtactgagcgggctgaactggccgggtatcttcgtatttatgcttctgaaatggaaaaaacctacggccccgcggtagcacaacagctggttaccgggctgctctctggccaggattacatgaaacgtaaccctgactctgaagccatgtctaaagctcagagaatcatgaacacctggggctatcataagtcgaatgccagcattggtgatgcgccgctaatgttcggaagcagtgtgctggggcttactgtgaaaggtatggtagctaacgcagcaattggtgttggagttaactcagctgctcagcttgcaggaaaagatcctttcagttatgtggatgcaataatggctggggtgacagctgcagcgacaacaggaaaaggtgttatcatctcaacacctatcaatatgggcggtgcggcaattggtagcagtattaagggggaagatccgacaaactctgttattggaactggactaggttcagtttttggtggcggtgtcggaaaggtcatatcagggtctatggggtctactgtcaaagaaggcacatccgatattattagcaatattgggggctcaattactagcgaggctgttggtaatgttacaaaaggaacgctagatgaagctgatgaaaccactaaaaaacaataa

SEQ ID NO: 99102 - DNA, 1662 bp, Enterobacter aerogenes
atgaagcccctgtacccggcaatcatgttgctggcattcagccagaccgcccatgctgtttttttatccccggcagatcgcgatagcattgaacaacaacagcaacagttactgcgtcagaaccaacagcagcgcgaatctctggagcgggcggttccggttccgcgaacaacgttaccctccgcttcagatgcaacaaaaggcccctgttttatcattaaccgggttgttcttgatggttcaacgctgattaatctgcgccagcaacaatcgttattcgcgtcctggcaaggtcagtgcctggatatgagccgtatccaacaacttaccgatgcggtctcggactggtatatcagccgcgggtatattaccagccgtgcgtttctggttgaacaggatttgcgccatggcgctctccatctggccgtacttgaaggtcgtctgcagaaaatcaccctggagggcgcgtcaggccatgagctgaaaatgaccttttccgggctggaaggcaatattctgaacctgcgtgatattgagcaagggatggagcagattaatcgaacccgcgccacgccggtacagatagaaattttgcccggagataagcagggctggtcgattgtacaactgacggctacgccggaattcccgctttcagcttccgtgagctttgataacagcggtcagaaaagtacggggaccgggcaaattaatgccggactaacgggaaataatctgcttgggctggcagaccgctggtttgtcagcggcggacgcagtagcgcattttcagattcaaaagacgcgcagaattttgcggcaggcgtcagcgtaccgtacggctacacgctatttgattacagctatagctggaataactatctcagcaccattgataaccatggctggctctggcgttccagtggcgatacggagacgcaccgcgttaacgtctctcatgtcctttttcgcaatggcgatatcaaaacgggcgtttccgccggactcagttaccgcattaaccataactaccttgatgatgtgttgctgaagagcagcagccgcaaactgagcgtattgctgttcggcattaaccacacgcaaaaaatagccggtggtgttgccacccttaacccaacactttcccgtggaatgccttggtttggcgccgagcgtgacgggactaaaaacggagacctgccaaaagcgcagttccgcaagtggagccttagcgccagtttccagcgaccggtggctgaaaatctgtggtggttgagcagtttttacgggcagtggtcaccggaccgcctgtacggcagcgaacgactgacgctggggggtgagagttccgtgcgcggttttaaagagcagtatatttcaggcgacaacggcgggtactggcgtaacgaactcaattacctcctctttaccttgcccgggatcggtcaggttagcgcccttgctgcgcttgacggtggctggctgcacgctgatcggctcgatccgtatgcctccgggacactgtggggaacggctgcgggtctctccacggcgaatcgttggctgaccacctcacttacagcaggtattccgttggcgtatccggactggcttggtcccgatcatctcaatatctactatcgtgttgccgttgcgttttaa

SEQ ID NO: 99103 - DNA, 525 bp, Enterobacter aerogenes
atgagcgagctgcatcttgatccaggctgtattaaagccctgctcatgcaggattttactcattgtgtgccggaatccataaccggttgccctgccaacaaacctgttttgttgcatgacaaaccagagcgaccaaagcgtgaacataagggcaaaatcgcggtggcagaaagcgatatgcgctggtgttcagacggcttcgagtacggctgcgacaatggcgaaaaactgcgaataacgttcgcgctggactgttgcgactctgaggccatagactgggcagcaagcacaggagactatgatagttcgatcgtgcaggatgtgatgctgaggtcgatggaaaagcgcttcggcaacaggttgcctgacacagcggtgcagcggctgacggataacggtcagtgtatagccgctctccaggatatgccagatgagtggaaagaccagtaccgcaaggattcggacgatattcgcaagccaggcctgagcatcagcgattatgttcagcataacaggctgaattaa

SEQ ID NO: 99104 - DNA, 573 bp, Enterobacter aerogenes
atgcctttcctgttacaaacaccgtcggccctgatttggcgaaggaatgatgtcttaggccatcttctcgttcagcgcgcggactcggttattatcacagaagtgagtcgggttttaaactcagtaatgctgtatcaacagcttatcagcaatgttcagtggccgttgcctcactacaatggttcaaaactgctgattctattgcagccaaaatctgctccaggtaaagcgtgttatattgctgcgttctccttcatagttctctttattaatcgtctgatttcccatgtgcggctatcaccgcgttacggccgggaaatgttctcccgtactgcaagtgaattgctgcgcctctctcatggcaacctgagtcacgcctcgttgccaaaccgacttagctttcaagatatgtcgataacggaatctgcgatgagtcgggtagtatattgctctctgttgcgtaatattttgcttaccggttcgcaactttgtcctttacgaagctggctttttattataattggaatcgatacttgttcactcgtaaaaaatcagcggactgttgataaataa

SEQ ID NO: 99105 - DNA, 1140 bp, Enterobacter aerogenes
atgtacaggatatacttatatcttattctcgccgcatcggtttccgcactggcgacagatatgatcgttccagcgctgcccttgttacaaaaagcgtttaataccgattattcagctatacagttaaccattagtggttttctggtgatatacgcggctagtcagttactgtcaggatttctcggtgaaaggctgggtaaattacgaatactgacggccagctttttgctcttcctggcgggaagtctcctctgctttatgtccgacagcttagagatgttgttggccggcagggcattacaggctctgggtgccggcgccgggccggttctgtccaaagccatcgccaaagagacgttttccacattaacactcaagcgcgcgctttccgatatttcttccgccagtgcagtcgtccctctcattgcgccactggctggcgccgcaatcctcggctatctgagctggaacacgatattccttgtcatggccctgtttagcgtcgtcacccttctgctctctccgcgtcgcctcgtgcatcatgacgtggctacagtatcctcatcttccggttttatcgccccggcatttattcagggaacgctgctggtttcgctgatcctgagttcgctgttttgctatatctcactgtcgccggccatctttatgcagcagcttgggctaagcaccatacactactcgctgctgttctctgcttccgtattattttttattattggtaatcagctcgcaaaattcgagcgaataattaatccgtggtttttgtttggcattaatgcactgtcggtcttaccctttattatcggtagccactcgctgatattgtgcatcgccggatcgatggttttcaacctcacgcttggcgcctattacccgagcgcgaacttcatcgccctgcaaatcaaagggacaaaaacaggtattgcggcttctgtcaccggatttattcaaacggtgagtgccggtgccatcagctatttcgccgtaaaactgacggataccggtatgggttttgacagaaccctcggcatgagcacgttaacactggcaattttatctcttctggtagtcactacaatgaaggtaacacaatggaaaactggcaaaaaaggaaaatag

SEQ ID NO: 99106 - DNA, 1230 bp, Enterobacter aerogenes
atggaaaactggcaaaaaaggaaaatagacaggtcattaaaatatcagaccagggtattttccgaacatattaacgaactggtcgcagtaaaaagggaaggtaaggtcattaccctagacgatggcaaaaaaatggtggaatttgtctcatgctcttaccttgggctggagacccacccggcgctgaaaaaagcggttgtcgatgccattgaacgttttggagttcaggtttctgtcgcaagaacgcgggttaaagtcgatctctttccgcagctggaagcgcgtctgaacgaaatcatgcatggggctcataccctcacgttcaacgcggtgactccctgccatatcgcggtgctgccgctgctggcatccggggcgttgccgcattttacgttcagtaaaaaaccgtactttattatggagaagaccgcgcacgcgacgttgcagatcaaccgcggactcttacagcagtttggcgaagtcgtcagaattgatttccaggacaagacgcggattgaagaggcttttcgctatgcggccagccagggactgacaccgatctcggtatcagatagcgtaggctcaatgggtggtgtcgcccctgtcgcacatatcgtccgcctggtgcatcagtatgacggcttcgcctatattgacgatgcgcacggcacctcgatctacggggattatggttcgggatatgtcatgtcatgcctcaaccatctgcttgacgagcgtattattatcgccggatcgctgtccaaagcttttggctcacacggcggatttatcgcctgtcgggaagctgagaccatcaactttattaaaacctacggtactacctacgcctttggaggaccaccgtcattaccggggattgccgcatgcgtcgccgcagccgatctccacctggacggcaccgtcacagcccgtcaggagaagctacagaacgtcattcgttattttgacgaagtgttcggcgggatcgagatagtaaacagggggacaacaatgccgattcgggggatcctgataggtaacgaagacctcgccattacgatgtgcaaaaaactgcacgatcgcggcttcgccacgacagtggcgatgtatccaaccgttgaggaaggacacgccattctgcgttgcgcattgtcagcgcttcatgagagcgggcaaatcgacgacttccataaaaacttcagcgaatcactggctgaagctacaaaataa

SEQ ID NO: 99107 - DNA, 1161 bp, Enterobacter aerogenes
atggtggcgaccattatcggtggaggcatgttcgcgttgccggttgctttcgtccacgtgtggttcataaagggccttctgatcctgtcggtaacaggcatattgatgctgatcacagggttgatcctcgttgacattacgatgcgctttccttctggagctagttttcataccttcacccataccctgctcggacctgttgccagcgttttcattggcgtggctttctgtttcgtactctatttactaacctacgcgtacatatcaggcgcagcatcaatattgtgggatctccttcctcccgatattgcaggccgcagctggctgccaatcattttgttgtcgctaacgacctcgctgattctgtgggcaggtggcagattgcccggtatcctcctctccggccttatcgccgccaaattcaccctttttctcctgctgttcgccggtgccgcaggaggcgtaaaagtgctcagattattcgacttccccggcagccccccgctacagtattatctaccgatcgtaccggtctgcgttatcgcttttggatttcatggcagcgttccctctctgacaagaatgtaccggggggataatcatcgtgcggtcctccgctctctctattacggtttcgccatttcgttaactgtctacgccttctggctgacgctcacgatgggcgcgctcacgcctcaggctatccggaatgtcagcgatgaaggcgggaatattggcgcctttattacggccctcaatatccaccggaccacctcagctaccagtctgatactggtcgcatttggctgtattgccgttttagcttcactgatgtcggcttcaatcggcttaagtgattatcttgaggatacactgaacaaaattaactgtcagtgctcacgcccgctggcaatatttctgacttattttcctcctgcattggcctgtattattgctccgcaaggttttttgtctgccttgtcctatgcaggtatatcactggtattatggagtattatactccccccttatttactcatcaaagccaggcgttccactctacctctggtatacaacttcccgggaaataatttcctcctgaaaataattattgtgatcggagtcatagtctggctattaattatttactcttttctttaa

SEQ ID NO: 99108 - DNA, 177 bp, Enterobacter aerogenes
atgtcttttattacactacgtaccgggggctgtcgcgcagtcatctttgataataagtctagtctgcccgactgtcagtgccgcaccatccgtgactcaggatattcacgttcaaaaggggctccgtttggggagcggaatctatggttactcccgtttttgcaacaccgattttga

SEQ ID NO: 99109 - DNA, 195 bp, Enterobacter aerogenes
atgcgggctctgcagcgcgttcgtgaatcattcgttcagtttaagattaaaacaaccaatcagatgcatgcttttccgctggaatttggtatcagtgtgccgcacggcactgccgttattagccggctgagcactattctcgaggatagtgacttacctcaatatctcagccagttattactgaaattacaatag

SEQ ID NO: 99110 - DNA, 255 bp, Enterobacter aerogenes
atggaaaacattgcgctcattggtatcgagctgggtaaaaatttcttccatattcattgccaggatcgccacggcaaagctgtttatcgtaaaaagtataccagaccaaagctgatcgaatttctggcaacatgcccggccacgactatcgcaatggaagcctgcggcggctctcattttatggcgcgaagattaaccgagtttggccaatattccaaagctgatatcaccacaatttgtccgcccattcgttaa

SEQ ID NO: 99111 - DNA, 984 bp, Enterobacter aerogenes
atgaaaattgccgcctccattacccttttgaacgcttgcccatttgtgagtctggcggcagtaccggtgaccttttccgaaactgtcctggatgccgcagggccaaaaggccctttgaaaggtacgttactcaccccgaattcaaaaccaaccgctgttgttcttatcattcctggctccgggccgaccgatcaggatggaaacaacccgcttggtgtgaatgcttcgccttaccgacttcttgctgaaggactggctgccaaaggctttgcgacgcttcgtatcgacaaacgtggaatgttcgctagcgcaatggccgtagaggatgccaatgcggtgacgattgctgattatgttgacgacgttcgatcctgggtagacgtgcttagacgtcacatgcacactccctgtatttgggttttaggacacagcgaagggggcgtagtcgcacttgcttcggctcaggaagaggatgtgggcggcgtggttcttatcgcaacgcccgggaggccgatgggccaggtgttgagggggcaacttaacgctaatccggaaaacgaaatgctattaaagcaggcactgtcgataattgatgctcttgagcatcggcggcgagtcgatattacgaatatgcacccagcactgcaaagtctctttaatcctgcggttcaggggtttttgatcaatgcgttttcatataatccgggtcatctcatttcgagtatttccagacccgtgttagtgctacaagggctacgcgatcttcaggtggaagaaacggatgcaagactgcttaaggccgcgaaccctcaagcgtccctggttatactgcccaatatgaaccatgttatgaaagaggtggctttggacgatcgcagggcgaatatcgcgacatacgctgaaccctcgctccccttagctcccggtttaatcgactcgattgagcatttcctgatccacaactcaccttttcccgaaaagtaa

SEQ ID NO: 99112 - DNA, 1257 bp, Enterobacter aerogenes
atggcgctcactgacgctaaaatccgtgcagctaaaccggatgaaaaaccttataaacttgccgacagcggcaacatgtttttgctcgttcaccctaacggctcgcgctactggcgactgcgttaccggtttctgggcaaagaaaaaacgctcgctctgggcgtctacccagaagtctcgttatcagaagcaagggaaaaacgcgatacggcgaggaagctgatagctgagggaactgacccgtgcgaacataaacggatcaaaaagtctgtgcctgaaacagctcagacattcgaaggcatcgcaaggcagtggcataagagcaacaaaaaatggtcagattcacacagtgagaaaatactgaaaagcctcgaaactcatgtgtttccctttattggctcacgtgacattaccaccctcagaactcccgatttacttgttccagtaaaggcagccgaagccaaagagatctatgagattgcagcgcgccttcagcagcgtatcactgcaatcatgcgctatgctgcccagtcaggcattatcacctataaccctgccgttgatatggctggcgctttaacgacggtgaaacgccagcaccgccctgccctcgccttaaatcgcatttcagagctacttgaacgactggatgcatacagagggcaacctctcacccgactggcaactaaacttaccctactcatcttcatccgttccagtgaactacgctttgccaggtggtctgagatcgacttcaagaaagccatgtggaccattcctcctgagcggaaacctattgagggggtaaagtattcccatcgtggctcaaaaatgcgtacagagcatctggtaccactctcaactcaggcactggatattctgcagcagatccacaccatcagcggtgaatatgagttgattttcactggcgaccataatccctggaaacccatgagtgaaaatacggtgaataacgcattacgcctgatgggctacgatacaaagatcgatgtctgtggtcacggcttccgggcaatggcctgtagttcgttgattgagtcaggattatggtcgagagatgcagtggagcgccagatgagccatcaggaacgaaatggcgtacgtgcggcttatatccataaagcggagtttctggatgaacgcagactgatgctgcagtggtgggctgattttctggatgcaaatgaggaaaaaacagtgagcccgtttgacttcgcaaaactccattctcgatag

SEQ ID NO: 99113 - DNA, 216 bp, Enterobacter aerogenes
atggacatcatcgataccgcagcagagattgaagagcttcaacgtaacgctgccctttccgctcgccgcataaatcacaacgccgtatcagctgagcattgtagtgaatgcggagagaatatcccggcgccgcggcgcgctgccgttcctggctgccagacatgcgcggaatgtcaggcagacttagagctgattatgaagcagagaggtaagtga

SEQ ID NO: 99114 - DNA, 471 bp, Enterobacter aerogenes
atgggtttccatatatcacaatcgattacggatgcggcaaccattttaaccatcataagttttttcatgacattatgggttatcagaacgactaatttcttgaaaaaaaaattcaaaaacaaaggcaggctccctgaaattaagactgaaatttctcaaactaccaataaaatatttagcatattaacaagccgtgaacttgataataactggattgagtttaatcgaaggttttctatggaggttaagacttgctacccaataattgataatttgctaagtaaagttgaaaacgaccaaaaaaatgcggttataaacattttagatttgattgctccaaaaactcgcttcttcggaagacgaaaagtaataagaattagcgataaagataaagcgtgggatatataccaagatttatcttcattaacagtacatttagatcaaataatgaaagacatgaggtgggattaa

SEQ ID NO: 99115 - DNA, 375 bp, Enterobacter aerogenes
atgtttaaagacaatgatttaaataagctttatgtcaaattaagcagggaaacatcggaagataaacttgtatggaaaattgtactttcaaaagattttatcgcgcttactgaggcgaacgaggatcgtatcggcgcggtttatacttgcgattacaaagggaaaaaacttgctatctacctgagaaaatataaacatttctttgatgatgtggagtgggcatggaccgaagaaccccaacttgcgatagtcactgataattatgaagttctttggaaaagcaggtattgcgactccactttaataaatttatatgagattgtttcacggcaaggttcgggtttcaatgatttaattgatgacctaatcccataa

SEQ ID NO: 99116 - DNA, 384 bp, Enterobacter aerogenes
atgagcaataataagcctcaaaaaaatatagtaaccgtaggtaaaatggtaaatggtaaggccggattgatagcccctgccggagtcgatattaatactgattttcatgttggggagatgcacaacgttgaatatgcagcatactatgttgagacgttagaatcacaaataagggctctattcccggatggcatccctaatgaaaatttaaaagaagtagtgggccatatatacaaaaaccaagaaataagtgatgacacaaaaataaaagcaattaacgaagcaaaagaaaactatgaaagcggggcccttgacaaatggttatccagaggagataaaatatcttcaatagttagcaatataataaatttatttaactattaa

SEQ ID NO: 99117 - DNA, 180 bp, Enterobacter aerogenes
atgagtgaagataattatttatgtccggaatgggcaaagaaaggggccaatatccctcacgactggaagaaatacgtaagtgaggaagtcatggcgatttgggaagactttagcgtaaaccagcgcatggcattgggtagatgctttgaggacatagctagtcttgaagaatgggattga

SEQ ID NO: 99118 - DNA, 525 bp, Enterobacter aerogenes
atggataaggcgcatttttcaacgctgctgagtatgaaagagatgaacatgcgttttgtatcgctcacatcccataccgaccagcttagcgctgttcttgtaattcacatggtttgtgagaaaattttagaaacttggattgaggcaagcagccacaatactaattttttcaataactctcttaacttaaacttccataacaagcttgttattgcaaaaaacttctcgtttccaaacgagtgctttcagtttatgaaaaaacttaacgcgatacgcaacaagttcgcacatcagattgataaaacagaaatgtctgaagaagagataaactctctttatagttcattatcagactttattgccagagagcctgaattcgatcctaaaacttcatcaattgaatctcaaaaaaaaagatacaaatatagtgacaataataacataaaactattattgatgtttactgccatgtatctatcggtcatgtatttcgcgggattacgtcagctttacatccctttatga

SEQ ID NO: 99119 - DNA, 198 bp, Enterobacter aerogenes
atgcatgctgccacctttgcgggtggcattaaattccacggggatactatgacgatttcgtacaatggccgcagagcggcaaagttctttttggcaattataattggtgcatgcttgcagaaattctttcccgatgacctggtattgttattactgtcatttgttccttttggaataaaattaaaatggccgcattaa

SEQ ID NO: 99120 - DNA, 123 bp, Enterobacter aerogenes
atgtctaaacttaccgaacaggagaaagccctgtttgccggcgtcacaggacggggggggggggcggcttcatacttcagtccctgctggcagaaccctgaacgggacaacagattttcataa

SEQ ID NO: 99121 - DNA, 618 bp, Enterobacter aerogenes
atgacggttaacgattccctcctcgcattctctctcgctgcactgatacttaccctaactcccggcctcgataccgcacttattctgcgcaccgcttgtgccgagggcggtaaaaaggcatttcacgctgcgcttggcattgatgccggctgttttgtatggggtgcgctgatcgcgttaggtcttggtgctcttctggcggtttcagagatggcatacactgttctcaaagtttgtggcgcggtctacctgagctggctaggcttacaactgctgatacgtccccgatcatctttcagtgatggtgatgacaacagttctcaggggaactggtttatcagagggatgctggggaatgtgctcaatcctaaaatgggtattttctatgtctcttttttgccgcagttcatacctgccggtcactctcctttgatatggacttttatcctggtcagcatccacgttgcgattgggactatatggtcactcacactcattctatccacgcaatttgcgtcagccgtattgaagaaaagccacgttgtccaaatgatggatagagcaacaggcggcttgtttctatgcttcgcggctaaacttgcatttagcacgagataa

SEQ ID NO: 99122 - DNA, 321 bp, Enterobacter aerogenes
atgaatactcaacctgcaacaactccgcaggcggcgaagccatgtctgtcgcccctggctgtctggaaaatgttactgacaatcctgctagaccagcactatggtctcacgctaaacgacacgccgttcagtgatgaaactgttattcagaaacacattgaggcaggtattaccttggctgatgccataaattttctggttgaacgctatgaactagttcgtattgaccaaaaaggcttctctgtgcaagatcaagaaccttggttaacttctatggatgtccaccgagcacgatttaaactcaacgtggaacgtttataa

SEQ ID NO: 99123 - DNA, 327 bp, Enterobacter aerogenes
atgtcattaataccagcccatgaatggggactacaaagagaaattgttccacggtttggtgccagattagttcaggaaggcaaccggctgcattatctggctgacagggctagtttgatgggcaatttcagcgatacggaatgtttcaaattgaatgacgcatttccacactttatcagccagatggaatcgatgctgaccactggtgaactgatcccctgtcaccaacactgtgtcactctctaccacaacggttttacctgcgaagctgacacccttggcagttgcggctacgtgtacatcgctgtttaccctactcaacgctaa

SEQ ID NO: 99124 - DNA, 471 bp, Enterobacter aerogenes
atgtctgcgcccaatttattcccggaatttcctgtaaacgagcaacgtgttatacaacgcgcactgcgattgctggagaagtatcagcgtcaacccagtgaatcatttactagcaccagcgttactaaagcctggcttcaactcaggatggcacaccttgagcgtgaagctttcatcgtgatgtatctcgacaatcagcactgtttgctggaacgcgaaacactgtttaccggcacactgagccataccgaggtacatccccgcgaagtggtgaaatcggcactgaagcataatgctgctgcggtaattctggcgcacaaccatccttctggtacgacagaaatcagccagcaagataaacacattactcagcggatcgtgaaagcgctggcgctggtggaagtacgcgtgctggatcatctcgtagtcgggaatgagacaatttcatttgctgagctgggattactttaa

SEQ ID NO: 99125 - DNA, 822 bp, Enterobacter aerogenes
atgacccgattagccagccgctttggtgcggtcaatttagtgcgccgtgatcgcccgttaacccacgatgaactggcacattacgttccgagtgtcttcagtgaagaaaagcatgaatcccgcagtgagcgttacacatacatccctactattaccctcctcgataaccttcaacgcgagggttttcaaccgttctttgcctgccagacccgagtgcgagatctgagtaaacgagagcacaccaaacatatgctgcgcctgcgtcgcgaagggcaaattaccggcaaacaggtgccagaaattattctgcttaatagccacgacggttcaagctcataccagatgctaccaggtttatttagatcggtttgccaaaatggacttatttgcggtgaaagttttggggaagtgcgtgtgccgcataaaggcaacgtagtggagaaagtcattgaaggggcttacgaaatactgggcatttttgaccgagtagaagagaagcgcgatgccatgcagtcacttatgttaccgccacctgctcagcacgccattgcgaaagcggcattaacctatcgttttggtgaagagcatcaaccagtcacggaatcacagatactttccccgcgccgatggcaggatgaaagtaacgatctttggactacctaccaacgcattcaggaaaacctgattaaaggtgggctatcgggacgaaccatcaaaggtaaacgcgctcatacacgcgcagtgaaaggtatcgacggtgatgtgaagctcaatcgagcactgtgggttatggctgagaatatgctgcaatttgcttcatga

SEQ ID NO: 99126 - DNA, 1011 bp, Enterobacter aerogenes
atgaaaatgatcatacctcttaaaactacgatactgacagtgatgttaggtgcctcaacttttaatgcttccgcagcatggcaagtaagtgggactttttgtcagtcttacactgatgatggacgagtacttgttcgcgtaagacccgcaacaataggtttgattgagcagcaaccgcaatgcaacggacgaggctctaccgaattggctggcagtaactttagtgtcaatggttcgtcttatccctccagcgtgatgtgtaacgcccaatcgaactatcaggcagtgcaaaccaccacggcgacaaaagatatccaaaacataatcagcatgctgcaagataaccaatcggtcagcatcaataccttcggttcacgttctgaagttaatactgctgattttgcacaagcttgttcatccatcattaaccagaaagtggccgacttcgatccccagaaaacctatcaacaggacatggcaaagatgggctataaacaggatgaaaacggccaatggcataaacaatcaaaacaggcatattcacgcgaagcagatcctgaaatagccgccaactatgatcccaaagcgggggttgctgaaaattcaggaaaaggagggttctatggagacggagccaataaaaatctttatggtccgggtagccaggcacaaaaggatgctgaagctgcaaacgaagcacgccgccttgcagcacaaaatcatatgtcaaaaagcgctactggaattacagaaccagagatgcaggcagcattagcggcagcgaaaaaggcttatgctgctaattacgatcaagaaaccctcgcatcagctgactttggatcatacaaacaagcaccttctgtaccagatccggcagataaaacacaaaaattgcgtgtcgtggagtatgaggtctttaatccaggctacaaaacttatgacaaagtgcgtgtcaccctaaacgcatcaggtgcagtgactggcacacaggttcagtacgaaggtcagtaa

SEQ ID NO: 99127 - DNA, 690 bp, Enterobacter aerogenes
atgtccgtcaacgagcaagactcacgttacgaccgactggcgatcagattatcggtcattattagccgcctgcttgcgggagaaacactctcactcaaatctctggtggatgaatttggtgtctctgaacgcactctacaacgtgacttcaatcagaggctaatccatctggatattctggatgaaaatggacgataccgtttgaatgattgccaaccacccgatcattcatcgggcgcattctcgtttatacgtactacaggtattgctcggataatcccagtgcaagacaggcaactaatgaacctgctaatgaacgagtccgggacttcaccctgcctgatctggcatgcccccctgaaatcccatgtcgcattacccgagttcttctcccgtcttgtgcaggctatcagccagaaacgacaaatcactgtgttggttgaagggcagcgtcatgaagcattggagccttatcgtcttattcactatgtggaggaatggtatctggtggtgtgtcagtcgggaaaaatccgtgtgtttgctctgaccagtattggtgctgtcacgcttgatgaggtgcgctttaagcgtcgcgaagatatttcatacctaactgctggtgaaggttttattgcggcactaccgcattttcctcttatcagtgatgttattgacacatttcgctattag

SEQ ID NO: 99128 - DNA, 894 bp, Enterobacter aerogenes
atgtccaaacactctaattcacatgatgcggtaaacgcattccaagcctgtcttagcttcctaccctcttcttcaaccgaacgcatcctgaagcagttaaagcaatctatcgactacgagcctgtaattggaattatgggtaaaacaggtgcaggtaaaagcagcctttgcaacgcactattccaggagcaaacttgtctgactagcgagcttatggcgtgtacccgagaaccacaacgcttggtcctcactgtgggcgaacgcagcataaccctggtcgatcttcctggcgttggtgagactcctgagttcgatgctgagtatatggcgctctatcatcgtttgtttgttgaactggacctagttatttgggtattacgggctgatgatcgcgcccgggcaatagatattacaacacaccgattgctactttctaatggcgcagatccatcacgtttcttatttgtgataactcaggctgaatgtattcctccgttaccaactaactctgaatgccaggatcggccttctccaacacagtgcctttcgttggccaccatcagcgcccaaattgcgggtcagtttccatcttcttatccggtaatagcagtttctgctcatactggctacaacttgacggtccttgtagagcttatggtgcatgcattaccgatacaggctagcagcgccttttatcggcaattgaaaccagagcacctgactaaagagagcaacgatgctgtacgccagcggtttggtgagatggcaggaaatgcatttgatacggtgataaacccggactctttcccgtcaggctggaccagctttttgagaaaactgcgccaaaaattagtgcagcttgccaccgtgttatgggacagattttttggctaa

SEQ ID NO: 99129 - DNA, 1284 bp, Enterobacter aerogenes
atggccatctgtgtccgtaaaaactgcactacgtctgtttggggtaataataaagagagatctaaacgtctctgtaaacgacattatgccgcatatgtccaaaaccggatagctaaagaagctaaagcattatcagtttgttattattgtggcctgtccctcgcaaagatgagaaacaaaaaatactgttgcaaagcacaccgccagctgggttccagaaaaattttagggaagatcataacggatattattggattttcttactgggggcatattcaacatcatattaagcgaagcccaatagaactggcttcaattaatggagtgcatgacattactggtttataccaactgtaccaatgtaaaacgaagcatcaaaggagctatgttttagcactcgaacaatggggagtatcgaaggagaaattaaaaattaaacctataccacttctaaggttagaaatttgccatttctatccggtgaatagtggtggtgaaaatacacctgataatgtgatcattgccccattacgtatcaatcgcatgttaaaagatacaattccgtatcaaggtaggctttttcccggattgaaagtgttaagaaaaaaaatgccactgaatggaagcctttacgatggtctagttgcacgatttggaaaaaaggttgtagacgaagagctttcatcaattggcaaactaaagcacttccatggtaattacgccaaacagccggagtttgggggaatgcatcatgaatttcccctactaatgctgttaatttcggaattattacgcttagggcaccatgacattgttaaatttcttcaagctattcggcgggactatgagagtcttcttccagtatatgttgaattagtggctattatcatgttttatgcgattttaactggtgatcgtgaccgtttcctaatgcgtttcatgagaattcagcgttggttcgacgacacggctttatccacaaggcatccatttcgggcatggggcagggacaactacgaaagatgcatgtacctactcctaaggcgatatctacggctgttttttggctcagctattgagagtccccgagaaattgtcgatctctacaatagttttttctcacttcaggttgttgacgtcggggagctaggcgaaatcgtaagcttttcctatttcaaaggaagacagagcaaagtgaataccttttttatcattccagagtatgtgcttgacacactgcctaggtcaggggacgttttcgggattggttcaacacttagctga

SEQ ID NO: 99130 - DNA, 402 bp, Enterobacter aerogenes
atggaaaagtcagaaaaaacagaaaacaacaataaaaacaaacagataaatgaaatttataagtatgctcggtgctttcgccgtcgccaaccttttagattaaattattttcctgagcatctgtctctagatgctctctctcaagccgcgatggagggggctgcaagcttgatcccgggaaaaatacatactgataccatttcgcatgattacgataatattgatttcttaatcgatatgaagtacatcgtaagcaattcaggtctgacaaataagttcttctacgctcaaataaaaaaaggcctatttccatcaccaattaagctagggcgctcttcccggtggaaactgagtgagtatgaacaatggattgagcaaagagcaaataatagaggccaatag

SEQ ID NO: 99131 - DNA, 261 bp, Enterobacter aerogenes
atgaaatcagctaaattaggctcaaccccaggaattaatcatattgaactggcagacagtcaggaaccggtgtactcagaatacggggaaatacgtgtcagaatcatcagtaactcacttaactatcacgatctcaatgtagctagcggtgttcttccttccagccctggtcgccttctgatgtctgacggtgcgggtgttgtagaagaggtcggagaaggtgttgtaaatagacccgttttagctccatgcattttttga

SEQ ID NO: 99132 - DNA, 573 bp, Enterobacter aerogenes
atgaacaattgcgctgaaaatgaagcgttaaagacgaactctgatgttaacaatgtcacgcttattcgtagagtgttgcagcaggcgactgatcattacccacgactgattgcgctggggtttaccctacattatgggaattgccactcctgcgacaacgtacaacaaggtaatgcccagttgctacgttttcacgctgaagcctattgcagaattggcgattattcaaagatacgtattgaagcgggtaaaccgtcacagcctactcttcttcgctggttgtgggaggcagaaagtaccttgtcatgtcggatgatgatgctattcaattttgatgtctgcagtcttccccgatatgactcttctgcatcatatggaattcaggaagtaatgtcgttgctggtggctgcatggcgtgaagtagaactggacggggagttaacggaaataaaggtacatcgggtagagagaacgaagccagcagatttcgataagcgctatgctgagttacgagatacggcaatgcaaatggcctcgccagttgcttttgccaagagttttccgacaacatag

SEQ ID NO: 99133 - DNA, 222 bp, Enterobacter aerogenes
atgaaacaacaaccgactaaatgcgcggtcgatgaatgggggaatctggtcaatgcagaagattttcgctatccctcattctggaaactgtactgcttctactgcaagagtccggtagtactggttcttgccccgaacgggcaagtatcgcattttctgcatgatgaaacctttatggtatcagccgatttcatggcatgcccgaacgtggaatgttcctaa

SEQ ID NO: 99134 - DNA, 1098 bp, Enterobacter aerogenes
gtgagtgatagcgataatgagaattattatctaaaaaggattggtaaacttggcgctgaagaattagcaaggccagaagaatctccttatgagggagggaaccgctttaccagtcctgagagcaaatttagtgtcgattctttggcagaagacgagtctgcgcaggcagccgaggattgtgatattgaagacaggacaggagaaacggcctcaggcaatccgatatctgaaagcagcaaaaacgccactggggctgatgaagctattaagcgtttgatgcaaaatatacaggctggggaaaaacgcaatgttaaaagtaaaagtcttcatggtggagattcttcatgtctacaagacgtcgatttaaagtggttgaagggggcggttaattcacgtgccattttttggttttgggcgtatatacgaaaagcctctgcgcgggagctttgtttacctgaaaacactgcggggttaattccggaatgggatcgaaaagaggaaaacttatactcttttttcagactccctggtaatccaactagttcagctgaaagaagccgggtgattattaccttcatgaatgaactttcttgttccctcagtccagaacaaagtaagaaaacattcgattatattcgtggtatctggcttgtttttaatagtcaggttcaaagccccaaatggttaaagaaaaatgataacgaagccattgagtgggcgtggtcatatttgtcaaggaaaaaggatataaaaagaaatattctgtcatggttcaaaccagcagatcttaatgagcgatatattggtctaatgggcgcgattgattgctgggccatcccgaacaaattggatgtgggaaattatagaaaatttctggatgacaaagatgcacttgtaaaaaatatgagggattcctttaagcaacgaaaaagaaggtctggaaaaaatgatttgacaatctctgccaaagccagcagggaattatctgagttagcagtggcacttgataaaaaagagattaaagttattgaaaaacttattcatgatgagtatctaagatataaaagcaagctttttgattacaaaaatccatcctaa

SEQ ID NO: 99135 - DNA, 231 bp, Enterobacter aerogenes
gtgcataccgaacctgctttatccctacccgacggtccgtttacccgccaccaggaaacatccctcacagagctatataagaacgtcgctatcgaagacgaccaggggacacattttcgtctggtcgtacgctataacggcacgatggtctggcgggcatggaacttcgagccagaagccggacggttacttaactgttacatcacttcttacggtattcgtaaaccctga

SEQ ID NO: 99136 - DNA, 441 bp, Enterobacter aerogenes
atgaatattgcactccctgatacttctcttgtccctgcccccataaccgccacgttcatccctgatgagcaacgtctcagcttctggctccagcatttcagcacggttcctcagtggatattactggagccacgtgtctttagccggatggacgcgttatgcgcggactacaccggtggcatctggaatttcttcacgctcagtaacggtggagcctttattgccccggacggtgacgaaacatggtcgttgtttaacgtccttaacggtaatagcgccatcctcggtaatgaagcggcaggcatcgccgtttgtctgctggcctggaacaaccacgcctggcatacgggcagtgacgtgatgtgtgaccacttttatcgcctgcgtgattacgcccttcagcaccctgaatgcagcgccattttgcagattattgactga

SEQ ID NO: 99137 - DNA, 477 bp, Enterobacter aerogenes
atgactggcgaattaacagcgtcaccggcagtgccggtgacaacccgtcgtacggttcagcgtgcactctcattactggagaaacatcttcgtgagccgggtgcattgtttacgtccactgcggcggttcgagactggctgcgtctgaaaatgaccggcctggagcgcgaggtatttatagtgctgtacctggataaccagcaccgtctgctggaatgcgaaacactgttcagcggtaccattaacagtacggaggtgcatccacgtgaggtggtgaaatcggccctgcgccataacgcggcagccgtgcttctggcacacaaccatccttccggcgaagcggagcccagcctggctgacaagcagattaccgacagactgatgaaggcactgtcgctggttgaagtcagggtgctggaccactgcattgtcggggggatgacggtgagttcatttgcagaacgtggctggctataa

SEQ ID NO: 99138 - DNA, 333 bp, Enterobacter aerogenes
atgtcgtcaactgacatacagcagtggggattacgtcataacatctcaccgtgctttggtgcaaggctcgtcctggagaggagccgcctgcactttctggcagaccgtgccagttttaacggtcagtttaccgaagagcaggcgctgcgaatcgaccgggcatttcccctaatgatgaaaaaactggaactgatgctctccaccggtgagctcaatccgcgccacccgcattgtgtcactcttcaacataatgggctgacctgtgaggccgatactcttgggagttgtggctacgtctatctctcaatttatccaacccggctgtcaacataa

SEQ ID NO: 99139 - DNA, 237 bp, Enterobacter aerogenes
atgtctgtccctatagtacgcatgaatagcttatggtgggaatcgggaaacattgccgtcagggaagaagaggattcgctggtcatcagcgagcctttatccactttcccgccagaccacctgtttttgaaatctggacctggtttgaagcgagtaatgacggtttcgcggttgcctgaaactttacgggttaaccgctacatggcattcaatgaaacttatttaaatgaggattaa

SEQ ID NO: 99140 - DNA, 921 bp, Enterobacter aerogenes
atgagcagtaagccaaccgcatcaatgctggaacgacgccacccgcaaacgcgccatatcgatacgctcgccaccctcgatatgctgaccctgctgcagcaggataacaaacagatagccgttgccatcgatgcctgcctgccgcagattacccggctggtggataacgccgcggcgaccctgagccggggaggacggctggtgatcgttggcgccggggcatccgggcaggcggcgttgcaaacggttaatgactattcccctgaagccaatcactcactggtggcgatgatcgccggtggcgaagggagcgcgctgcaggccgccgagcgggcggctaacgattatgacgcgggcttacgggatatgcagctattgtccctgagcgctaacgatatgctgctggcgctcaccgtcagcggcaaaacgccgtgggtgtggggagccatgcgtcacgcctggtcgctggggacgccgattgcgatcctgacgcagcagcctgatagcgaagccgcgcagctggcggatattatgattgcgccgcagaccgggccggaagcggtggcgggttatggcaatccgaaagcgcaactggcgcagcggcagatcctcaccctgttaaccaccggccttgcggtacgcagcggcaaagtgttcggcaacctgcgcgttgatctacaggcaaccagcccgcgctgggaggagcggcaaatcgccatggtgatggccgccgcagagtgtacgcgcgcgcaagctaaagccgcgttggccagttgcaatcagcattgtcggacggcgattctgatgctaatgacggggctcgatgcctggcaggcgcgggatctgctcagcgaaaacaacaaccatttgcgtgtcgccctggctgaagcgcaagagaaaacgctcagtaacgttaattaa

SEQ ID NO: 99141 - DNA, 534 bp, Enterobacter aerogenes
atggacacaaaagaggctcttacaggtccagaaatgggtgccgttgtacttagcaattacagaatgttatcagcggaaagtgatagaggggcagtactacttgcttcaagtatcattgagagagggctgagcgaattaatttgtgcctaccttttagaaagtgataataaaaaggacgagctatttactggtccggccgcacctttaggtacactcgaatcgaagatagctatggcttacagattgggcctaattcgtagatttgttcgtgattacctagatatattccgaagaatgcgcaatgactttgcgcataatatcgagcgatatagttttgatgatccaagtgtcactaacaggttgaatgaaatatacaggatcaggaaagtggagtctgaatatctagatcagctatttgttgacaccaaaaaggaggcaacagtaagagataagtttcttatgtttttctccttggatatggctgcaatacagagaattagcctcacagttgagaggatagctccccttgattaa

SEQ ID NO: 99142 - DNA, 477 bp, Enterobacter aerogenes
atgtctaagatcgtcgatactgacgaagcatggtctttcttcgaacgtctggaggattcttacttccgcccagcaccgattaccagcataccgctttcctacgaggcggcgttagaagaccttctggcaaaggtaaaggaaaatcgaattatcgctgaacagcgtgaccgtgccgttaaagagaagcgctggatctctgaaaagcgggaagtaacggcgatgactaccgcttctattgctgtgcgtgaaaaaaataaattagctgaacgccttggtgaaggtaaaaaatacgccgctattattcctgtagagaagaaactcggccaaaaattcaaatggcaacctcttcgcaagtggtgccgtgagaatggagttgaacctcatgaggtagatgatccacgtttcgggacggtaaagtcttggccgcgtgatgcatggctagctgtacatggagtagacctgcgcaagctgttttaa

SEQ ID NO: 99143 - DNA, 261 bp, Enterobacter aerogenes
atggcggagaacgcaaaagaagaaatctccggcattatatttaagagaacatttgaagaaattaataaaaaagcccgtatggggcacaaagaattctgcattgaactcaatgatttagaactagaacacctcacattagctgactttaatgcatcccttgagaagacacttacgcgcctaaatgaactcggttatgtagttccagaaaaatcagttgatggagggggatttctggtaagaatacctgacaataaaaattaa

SEQ ID NO: 99144 - DNA, 273 bp, Enterobacter aerogenes
atggcaaaaccagaagagccgtatcgtaagttaattgtagagagtttttacccagccagtacgtcaggcaggaagggtaaagttcatatcaggccgattccagggcaatgggctagcccctcacttgctgttgagtgttctaaaaagttgtcaaatgtgaatgtttatccaattggcagccaatttgaaattaccgccaagcttaccgatagggaggatggcggagagtatatttacagctcattccgatgggaatttaaacacatcaaatag

SEQ ID NO: 99145 - DNA, 258 bp, Enterobacter aerogenes
gtgagcatattaaataaagttattgaattcttatccccatcagtccccgaagcttgtagggaagaaaactttgcatctgtcataaagaatattgagattctttcgaaggattcatctgaactgaaatctcttcagaaagagcgtggagacggaaagattacagacgaagcgtttatagccactgctgtggcgattataactcaggagcttcttgagcttagacgtgacagagacaaggctgatgcccaggcgatctaa

SEQ ID NO: 99146 - DNA, 261 bp, Enterobacter aerogenes
atgaatacgttaactggcttcatagtttttttaattatcgctctggtatttggatacttatgtcatattacggcggagcgaaaactttcaaaggcaagggctgagctcaaagcggcggaggaaagggggaaaccatactcaaaagaagttgcaagttatatgatgggacagcctggtataattgcaatcttctttgcattcatcagcttcctttcatttattgcgtcactttataatctggtttattggttttttccataa

SEQ ID NO: 99147 - DNA, 141 bp, Enterobacter aerogenes
atgagcccgtacgtagttgaactcatccgcgaacgctggcaaaagctccgccttttccggtgccgcggaacagtaatgaccgattatcaaatattgaaaaactttgtccgcatttatcagtctctgggagaaatagcatga

SEQ ID NO: 99148 - DNA, 177 bp, Enterobacter aerogenes
atgccggaccgccgccgccgtgatctggacaacctgcaaaaagcggctttcgatgcactcactaaatccggtttctggctcgacgatcaacaagttgattattacagcgtgaaaagaatgccggttgtgaaaggtggacggcttgaactgaccatcactgagctggaggaagcatga

SEQ ID NO: 99149 - DNA, 546 bp, Enterobacter aerogenes
atgctaaaaacagaagaaaaagcacgtagggatggggataaacaaactttggaacaagcaaataaacatacttcagaacgtgaacgagttattaataatagaactgatgaggagattcaaaatgagtccgaagcacgaaaaatcggggacatacaaaccttgcaaagtgctaatcgttacactgattataaagtagaaagtcaaaatcaagagtctttacaacagtcaatgaactataccgacaaacgttttcaacaatcaaaaaattacacggataataaattcaaacaactaacggggaaaataaaccgtgcagaaaagcgcttgaacgcaggtatagcgggcgtgacagcaatagcttccatcccataccttactgaaaataatttttcctatggggttggtataggtaattatcagaacggaaatgctttagctgctggagtacaatatagaataagccaaaataataatgtcaggcttaatatctcatgggactcatctagcaattctgctattggcgtggggttctctgggggttggtga

SEQ ID NO: 99150 - DNA, 804 bp, Enterobacter aerogenes
atggctggtttacatgcaactaaaccgtgcgcaattgatgtgccagcacttgctgaagcggcgctctggtacgagttagagttaacaccaaagccggggttagttgataaaatcaataacggttcccatcgcgatatggactacgcgctgtttatccgtagtatcatggctattacgccgtggttttcgcgcttttatgaactcggtagttcgtatgcagacaccccctgcgacgaacagttacgggtcctccgcccgatgggaatggcttgtgaacaagcgatgtatgccgcgacgaatgggattaacacgcacaaaggtggtatatttgcccttggtttgctgtgctttgccgccgggcgtgtgaaaaagatctcttcagaaagtctatgttgtgaagtgagtaacatctgtaatgggcttgtttcccgggagctggcggcacgcagcggaatggcgacggcaggtgagcggcagtttcaacagtatggtttaaccggtgcgcgtggagaagcagaaagcggatttgctacggtacgtaatgccctgtcacaatggaaaggaatttcccttcatgagttgttgttacacttgatggctatcaatcaggacagcaacttggtgtcgcgtggcggcattgaaggactacgctacgtacaggactatgcacaaaaactactggccaacggttgggatcatgaggagctgattagaatggataatatgttggttaaacgaaatttaagtcctggtggcagtgcggatttattgtctgtaggatgggtgttgtctgaaataaaatag

SEQ ID NO: 99151 - DNA, 192 bp, Enterobacter aerogenes
atgcttgggcattattcgcaaccggtaatctccctaactctggttacgccgggagatatcaaagacaacctgtgctatcgcaacaccgtgggggtggtgcggcagatgtgcgatcagcagcagtggaaaaaccgctggcaggagctaggccttcaggtgctgtggctaccgactgggtctgcagacctgtga

SEQ ID NO: 99152 - DNA, 1518 bp, Enterobacter aerogenes
atgaatcaaattaaacttctccatgtggattttccccatttgcgggacttaaaaccttttgatactgctaacagcgcgacgccgtggctggcggatagagatgcgaaactcaaccgtaaactctgtgcctccatcgaagaggcggtggtacgcagcggcctacaagacgggatgacaatctccttccaccacgcatttcgtgaaggtgatcgggtgatcaacaccgtcgtggcgctgctggcacggatgggttttaaagatctgacgctggcctccagctcgctgatgacatgtaatgacgcgctgatcgaacatattgaaaacggtgttattactcggatttatacctccggcatgcgtggcaagctggcggaggctatatcccacgggctgatggacgagccggtacagattcactcccacggcgggcgtgtgaagttgctccaggacggcgagcttaatatcgacgtggcgtttcttggggttccgtgctgcgatgagtttggcaatgcgaatggaacggaaggcaaatcatgctgtggttcactgggctatgccatggtggatgcccattttgcccgcaatgtcgtattgctgactgaagagttggtacccttccccaatatgcccgccagcctggcgcaagatcaggtggactacattgtacaggtggagagcgtaggcgacccggcgaaaatcagcgttggggctgcacgcgtcaccagcaacccgcgcgagctgttgatcgcccgctatgcggcagatgtgattgagcactccggctacttcaagccgggcttctcgatgcagaccggctccggcgctgcagctaccgcctgtactcgctttatggaagagaagatggagcgtagtggcgtaaaggctcgctttgctctcggaggcatcaccggcagcttggtggatctgcacgagaaggggttgatcgaaaagttgcttgatactcagtgttttgatggccaagcggcggcctcgctggcgcgcaactcgaatcacgtggagatctccactaacgtttacgccaatcctggcagtaaggcagcaagctgcgatcagctcgacgtggtgatcctgagcgcgctggaaattgatatcgatttcaacgtcaacgtcatcaccggctccgacggggtgatgcgcggcgcgtccggcgggcactgcgatgtggccaccgcagcgaacctcactatcgtcgttgcaccactgctacgcagccgcattccgacagtagtgaagtgcgtcactacgcgactcacgccaggcgaaagcattgacgtgctggttaccgatcacggtattgcggttaacccgtcgcgcccggagatccatgagcgactgaaggaagcagggctgaagattgtggatatcaacgcgctgtacgagcgcgcaatttcgcttacaggtatgccaacacctattgagtttacagacaaaatcgtcggggtgatccgttaccgtgacggcagtgtgatcgacaccgttcgacaggtgaaggagtaa

SEQ ID NO: 99153 - DNA, 882 bp, Enterobacter aerogenes
atgagcaaactccgtcgcagtatgctgttcctgccgggggctaacgctgccatgctgtcaaccgcgtttatctaccgtccagactccatcatgtttgaccttgaagacgcggtcgccttacgcgagaaagacactgcgcgcatgctggtattccacgcgctgcagcaccctatgaatcaggatatcgagaccgtggtgcgcattaatccgctgagcacaccatttggcctgctggatttggaggccgccgtgcgggctggcgtgaacgtgattcgtctaccgaaaaccgacgcgccggaggatattgatgagttagaacgtcacctggtgcgaatcgagcgtgaatgtgggcgtgaggttggttctacacgcgtaatggccgcaattgagtcggcagtaggcgtgattaacgccgtggcgattgcccgcagctctccgcgcttggtcggtatcgcgctggccgcctttgattacgtgatggatatgcagaccgagcgcggtgacggtactgaactattttacgctcgctgcgccgtattgcacgctgctcgtgctgcgggtattgatgccttcgacgtggtgtggtcggatgttaatgacgaggccggttttttgcgcgaggttgaactgattcgcaagatgggttttaacggaaaatcactgattaacccacgtcagattgacctgctgcataacgccttcgccccgacccaggaagaggttgatcatgcgaaacttgtaattgaagcagcagaggagggcgaacgtaacggtcttggcgtggtgtcgcttaacggcaaaatggtggacgcacctattatcaaccacgcgcaggtggtacttgagcgcgcgacggcctccggcgtgcgtcggaaaggatga

SEQ ID NO: 99154 - DNA, 294 bp, Enterobacter aerogenes
atgaaaattgtaagggaggcgctggccggaacgcaggagtccagcgacctgatggtgaaaattgttcccgctcatggtgagctcgagatagtaatacatagtgaagtgattaagcagtttggtgagcaaatacatcaagtagttaacgacacattgcgggctatgaacgtagaccagggattaatcattattgaagacaaaggggcattggactgtgtaatccgcgcccgcctgcaaagcgcgctgatgcgtgccgctgatgaccaacccatcaactgggaggcactgaaatga

SEQ ID NO: 99155 - DNA, 1023 bp, Enterobacter aerogenes
atgcaatcgcaacccatctattttcgccacaccctggtggcgaagcatccggaacgtttaagtcagatccgttacctgctggcagacagcggccttggtctagacaacgatatcacattgtttgtcgaagcctggtccggatcgcaactggtgggttgcgcagggcttgccgccaacgttatcaaatgcgtggcgattaatgagcagctgcgcggccagaacctgagcgcgcggctacttggtgaggtggaaaatgcggcactggagcgcgattattttcatctcttcctttgcacccgtccgtgtaaccgagaacgctttgcacgctgcggcttctggccgattgcccagagtggaaacaacgccgtgctgatggagaacacccctaagggaatcgaacgctattgtcgttcgctcgtggcgaaacgccagtgtggggaaaaaattggcgcggtagtgatgaacgccaatcctttcaccctcggccactatcatctggtggagcaggcagcgatgcagtgtgatgcactgcatctgtttgtggtgcatgaagacgtgtcgtttttcccgtttagctcccgtctcgagatggtacgagcgggcgtgtcgcatctgtcgaatgtgacagtacatgaaggttcgcagtacatcatctcccgcgctacgttcccggcatacttccttaaggagaccgaccaggtgcagcaggcgtggagtgaaatcgatgttctgatctttcggaactatattgcaccggcgctgaatatcacgcaccgtttcatcggctcagagccgttctgcgatattacacgtcagtacaacaagacgctgcacgacctgctgacctcgcatattgaggtggtggaaataccgcgtatcaagttcacaggcatcgccatttcagcgtccgaagtgcgacgcttactcaagactcagcagttttctcggatccgggagatcgtcccggaatccaccttctcgcacctcgaaacaaattaccgtgatagtgcggaagtcgcttaa

SEQ ID NO: 99156 - DNA, 864 bp, Enterobacter aerogenes
atgaaactcgcaagctttttacaccaaggaatacgcagctacggcatcgtgcaggccgaaggaatgattgatttacgccgtcgcctcggcgatcgctacagcgatctcaaagcgcttctgcagggcgacgggctggcacaagccgcctgctatcaaaacgatgctgtggacatgccgatgagtgccatcaccttcttaccggtgattgagcagccagaaaaaattctgtgtgtgggcatgaactacctcgacaaacgcaaggagtttgaccagcacaacccggcaccgacgctgtttgtccgcttcccggattcgcagactggtcataacgagcctgtgctgaagccgcgttactccagcgaattcgactacgaaggtgagctggcagtgattatcggtaaagccggagagaatatcagccgcgacgacgctctgagccatgtggcgggatatagttgttacatggacggttctgctcgtgactggcaacacacttggtttactgcgggtaaaaactggcgtcagactggtgcatttggcccgtggatggcaacgagcgatgagatcccggacccgcaccagcttacgatacgcacttggctgaacggccgtatggtgcaggaagacaataccagcagcatgatccacaaggttgcggagctgatcgagtatatcagtacatttactcgcttaagtccaggtgatgtgatcatcaccggctcccctggcggggtgggtaaaaagcgtaacccgccgctgtttatgaaagagggggatcgcattgaggtggagatcgagcgtatcggtcatctgagcaacgtgatcgtagaagcgccagccatcgggcttgcggcagcacattaa

SEQ ID NO: 99157 - DNA, 1362 bp, Enterobacter aerogenes
atgagcacaaatgatgattctttctctgttacaaaccacccaactgaaattcagcggccttctctccaggtgcgctggtggaatattatggatacttggaaagtcggtattattcctctgccgctattcgttctggcgggcgtgctgattgcgattgattgtctgggtggaaacctgccgagcgatatcgtggtgatggtggcgacactggctttctttggctttgcctgcggtgagtttggtaaacgccttccgattgttggcaaacttggagcggcggcgatttgcgcaacctttatcccttccgcattggtctattatggtctgctacccgacgcggtggtcgagtccacaaccaaattctacaaattcaccaacattctttacctctatatatgctgcattattgtcggtagcatcatgagcatgaaccgcacggtgttgattcaaggcttcctgcgtatcttctttccgatgctatgcggcgaaatcgtcggcatgctggtgggtatgggggtggggctggcgctgggtcttgagccgttccagatcttcttctttatcattctgccgataatggcgggtggtgtaggggaaggggctattccgctttccatcggctatgccgccctgctgcatatggaccagggtgtagcgcttggccgagtattgccgatggtcatgttaggggggctgacggcgatcatcatctctggctgcctgaaccagctcggaaaacgttacccgcatctgaccggtgaaggtcaactgatgccaaattgcgcgaacgctgatgccaccgtttctcagccagcattctccggcaaagcagacgtgactactatcgcctctggtgcgctgctggcagtgctactttacatgctgggcatgcttggccacaagctgattggcctgcctgctccagtcggtatgctgtttatggcggtgctggtaaagctctgcaacggtgcctcgccacgtctgctggaaggatcgcaggttgtctacaaattcttccagacctccgttacgtatccaattctctttgctgttggggtggctatcaccccatggcatgaactggtggctgcgtttactgtcagcaacctgctggttatcgtcagtacagtgtccgcactcgtggcgaccggtttcttcgtcggcaaaaagattggtatgcacccgattgatgtcgctatcgtctcctgttgccagagtggccagggtggcactggcgacgtggcgatcctgactgcaggcaaccgcatgagcctgatgccgttcgcccagattgctacccgtatcggcggtgcaattaacgtctctatctcactgctgattctgggcaacttcctcatttaa

SEQ ID NO: 99158 - DNA, 1680 bp, Enterobacter aerogenes
atgcataaaaagatggtatattggcagcctttgtcgctacctcacgtgatagttatgaaagtctctttccagattaagttatttatttcgcttattgtcttttttttagtactttttgtattactaggtgggtattattatgtcgatgctagtaaacaactttatcaggaaatgagtgtgcgagccaaaatacaagctgaagggattgcgcttattccgacattgcgtaatgaggtagaacaaaaaaacatcaatgccatccgtgattttatgcagaagatttctataccgagtgacgccagctttatagttattggagataataaaggccatcatcttttccattccgtcttttccgacaaagtaggcaccacgttggtaggcggtgataatgaagccatattacagggtaaaagcactactaccattcgcaaagggggactgggcatttctcttcgcagtaaagcccccatctttaacgatgccggtaaggtggtaggaattgtttcggtaggctatctcacaagctacctggataccattacggtaagtaaagtggtcaatatatttattgccgtcgtgctgctgctaattgccctatttatcttctcctggttctttacccgaagtattaagaaacagatattctctctcgaaccgcgggaaatcgggctgctggtacgccagcaaaaggcgataatggagtctatatatgaaggaattattgccattgacgctgaacggcgaatcgaagtgattaaccaggccgcgcgccaactgctgggcctgaacctgacggccaaggaactgcgcgggcagctaataagcgaggtgatcgatctcatcccgttcttcgatacacaaataatgctggagaaagatacccatgacgaaatttgccgttttaatgaactcaaggtcattgccaaccgggtgcacatcatgctcgagggatcgctgcagggctgggttatcaccttccgcgatcgcaacgagattgactcgctgagtgcacagctcagccaagttaaacgctatgtagataacctgcgcatcatgcgtcatgagcaattaaaccggatgaccaccctgtctggcatgctgcacttgggtcgctatgaggaggcaattggctacattcaggaacagtcagaacatgcccaagagctgctcgactttatatcttcgcgcttcagttctccgaccctgtgtggcctgctgctagggaaaacagcccgtgcgcgggaaaaaggagtcgaactgaatttcgacccagcctgccagttggacagagcgttcctgccgcttggggaacaagatcttatttcaattattggtaacctactggataacgccatcgaagcgacacagcggtccccgcaacccagtgcaccagtggaagtgctgattaaacttagcgatcaagaactgattattgaagtggctgaccaaggtgttggtattaaaccggaggtccgtgacaggatctttgaacgcggcatcaccactaaaacacgcggcgatcatggaattggcctatatctgattgaaagctatgtcacacaagctggcggcgcaatagaagttgccgataacacacctcgtggcaccattttctccttgtttatccctaccacaggaactgaccgtcaactggaggacaccaactatgcggcatga

SEQ ID NO: 99159 - DNA, 693 bp, Enterobacter aerogenes
atgcggcatgaatttatcgacgtactgattgttgaagacgagagcgagctggcacagctgcacacagagctgataagtaagcatccgcgtctgaggccggtgggcattgcatcgacgctcgcttctgcccttgctgagcttgaaagcaaaaaaccgcaactcatgctactggatatctatctaccggatggcaaagggatcgcgcttattaataatcccatgctggcccgagctaattgctcggttatttttattactgccgccagcgatatggacacctgcagccaagcgattcggaatggtgcgttcgactacattctcaaacccgtctcttggaaacggctcagccagtcactggagaggtttgttcagttttttgaacagcagcgcgtctggaaaattgtcgaccaacagaacgtcgattcactgtatcagctacaggcgaaaaactaccgtctgcacaacagcagcaagggtattgaggaaaatacactggcgcgagtgcagacgctttttagcgataatgcaacacactgttttaccgtagatgaggtcgtaaacgagactggcttgagtaaaaccacgacacggcgttacctggagcactgtgtggagacagattttctgagtgtagagaagcaatacggaaagattggacacccgcgcagaatgtacaaacgagcaaaaggctaa

SEQ ID NO: 99160 - DNA, 1107 bp, Enterobacter aerogenes
atggatattcgcttaaggaaaatcagtgccctgggtttattaagtttattgtcgtttagcatggcgaatgcagctgtaatttatgataaaaatggtaatgaattggatttatatgggaaattagttgctaaggggaaatacagtttttcaaaaggccatgctcacaaagattctggatttggttcaattggcttcagagggaaaactagagttactgacgaactggaagggtatggtcagtgggaatatcgtgcgtatacaaattcatacgaaggtaatcaaagtactgagactcgtatcgctttctctgggatgaaatacgataatttgggttcgatagattatgggaggaattatggaatcctttatgatgtagagtcatataccgatcgagcaccatctcattcagctatgacctggggggggaattacggtgacaatttcatgaccagtcgcgcaggcggtgtattgacctatcggaatcatgactttttcggtctgctagatgggctgagttttggtattcagtatcagggtaagaatgaccgctcaaatgttaacacatctaatggtgatggtattggctattctatcggttatgagtttgatagtggtattagtattattagcgcgtatagtaactcaagtcgcacctcagatcaaaaattagatgggaaaggaaataaggcagaagcatgggcggttggtgttaaatatgatgctaatagtatatatctggctacattatatgctgaaacgagaaatactactcgtactggttcaaccggaaatgctggttttgccaataaagcagaaaactttgaaataattgctcagtatgtatttgactcaggtctcatgccatcattgtcgtatgtgcagtcgaaaggtaaggatttaactgcgaggggcttatttacgggcggagatgctgacctggctaagtttgttgaggttggcgtggcttattactttaataagaactttaaggtatatgccgactattatattaatttgctgaacgataatagctcttacgtaaaatcagtaggtggaatgaatggaagtgatgacgtaatggcattgaacgcaacttactatttctaa

SEQ ID NO: 99161 - DNA, 1365 bp, Enterobacter aerogenes
atgaatcaaaacatactgagtgcatttattgatagcagtaaatcgacagggttccataagctattactaggggtttgcacgtttgttattattttttcaggctatgaactttcagttttcggcgctatcgttccggttgttattcgtgagtgggaaattagccctacagagattggttttatcggtagttcagcaatgtttggtatgatgtttggtgcagtactgctaagctggatggccgataaatatggtgtgaagaaaatgttgatatcctcaatatttatctttaatttttttatcgtcatggcaacatttacaaataatggatttacttttggcctttgtcgctttatggctggcgtggggagtggtggtgcgactcccattgttatctccttgctcacggagtattcacccaaatcaaataaggcaaaaatggttgcaattgcaatctgtggtaaccagattggagggatgttggctccactagtagcaataaatgtgatgccaaaatttggttgggagccagtcttatggttatctattgttccattactattaattcctgtactcattaaggtcattccagagtcagctagatttcttgcaaaaactaaccaaactgaaaaacttgaccggatcctaaaaaaaattgatgttgagtacaaagatacacaaactaaaattgaaaggagcatgaaaggaattcctgttgaaggtaagccatcagataaagtctcatactccgtactttttaataagaaatactttgtcggtacagtgctgataacattaatttatatttgtggactgcttaccataaatggcgttaacatttggttaccacaggttatgaaccaaaatggttatgcattaggttcaagtcttactttctcaatagttttgaacttaggcactctgattggtaccattctttgggctgctgcagttgacaaagttggttttagaatcttgatgccagtaatctatattgctggttcaataagcctattctgtatgggaattagggcaaatttgattatactctatttattcgtcggtcttataggcatgttcgcatttgccgcccattctctaatgaactctttcgcttcacagtattatcctggtgaaataagaactacgggtgtcggattggctaacgctacaggtagggttggcggtatgttagggccgattattggcgggatgcttttgacggctaatgtttcattaacaacatggttcctggcctttgccattcctggggttattgcagcactatcgatgattcttattaatgtacacaaacattatatcaacaaaagatatatgctatcgagtgaaatgctcgcaaaacaatag

SEQ ID NO: 99162 - DNA, 855 bp, Enterobacter aerogenes
gtgactcgcaccggtgaacgcgtgcatttgagccaatctgcgacatcaggagccttatcaagacttagagaatttttcgacgaccagttgcttgttcaggtcggccagcgtatggagctaacaccatttgccgaaatgcttgcagacgaggtacacgatgttattagcaaatgtgaagcaattgttgataaaaatcaaaagtttgaacctgaaacgtcaactcgtacattccgattaaacatttctgatgcatcagccactgttgtgatgaacaacgcaatatcactcatacagcaacaagccccgcatgttcgactggacatatcatccattattgacggcccgattagcgagtatctgaatataggcgttatcgaccttatcgttacaccctctaatttgatatcctcccagcatccagcagaatatctttttgatgaccaatttgtctgcgtcgtatggtcaggtaacccattgtgtcaaaatggtataaatgttgacgattacctatccagcggtcatatcgtcgcgagattcagcaaaatgattggatggtcacttgatgaggtattccttagccagtcaggataccaacgacgaattgacattattgtaccctctttcagtatgctaatgacacaactgattggaaccaatttgatagcaacagttcatgagcgttttgctcgttattacgccaatttcctcccaataacaatattcccatgcccgataatttctgaaccttttgatatgaagttgcaatggcacaggcaccatgatggcgatctcggtattcaatggttacgccagatcctgcataagtctgtatcgaatatagaaccgcttagttaa

SEQ ID NO: 99163 - DNA, 1173 bp, Enterobacter aerogenes
atggagataggtaattacacaaaaaaacaaaacagcgttgctttagtgcgtgaatttttgctcaaagaaggtcctcaatctcaagcttccatatctaggaaaactgggttatcacccgctatggtaaattatgtcgttaaaaaactgcgtgaattaggtcatgcagaactacattgggtcaatggcagggaatgtcttgtatcgttaatatacaagaaaggtttatatttctctgtattggtatctatagataaaattacctgtgtgctttttttgtttgagttggaaaaaaaaattacccttgtatatcctgtagcacaagatgcacctgaggaaaacaatccatatacggttgttaaaattattaattctattctcgacgaaaacgaattgactattacggatgtctctgggatcgctataagcattatagccccgctcgatattaatagcgaaactatcatttcatggtcagctggtcgattaccgggatggcgtgatattaagattaagtccttcttcgaaaatgaattaaaaatcccggttgttataggtaacgatgctaaccattcgacgatggctgaatgggtatggggtgttggtcgaggtattgataattttgtttatattgcgtgctccaagcaaataggtggtggaattattatcaataaccatatctataaaggtggaaatggtatggctgcagagtttggtcatctgatcatcgataattcaggaccagtttgtttttgcggatgccgaggctgtctcaataccttcatttcagagcgggcaattataatgaatttatcaaaatcagagagttataagaattctttaaatgagataattctagctgcttctgatggtgacgccgcatgtcagcgggtgttgtttgaagctggcagagatcttggcaaagctttagcaaacatagcgaaaattttagccccaggagtgattgcgataggcggtgatctttcgaccgcagggccattattttttgatagtcttatggctactattgaagaacataaccttggcgcagtctcaacaaccattgattttaaactcgctcaactgacaaaccaacctgaaatactgggtggtattgctgctctgctggagcaaaacaaccaaggaatgaatcatcttcctgactggatgaagtga

SEQ ID NO: 99164 - DNA, 612 bp, Enterobacter aerogenes
atgttcggcatttgttcaatggcaatgtcagttatattaataatggataccgtcaacatgcctgtgctggtattatctggcatcctaggagccctcactggtgaattaataaggcttgaaaagaaaataaataaaattgccacaaaagccaaatacagtatagaatcgattttacccaaacctcgaggagaaataacaaacgaggagtttttgaatattttcgtagctttaattattttattcggagccagtggaactggcattgtcggcgcaatgaacgagggtatgaacggaaattcctccgtgcttgttactaaatcgttcatggattttttctgtgccgtactttttgcaactagactcggctactcagtagccatcctttttgttccacagttgattattcagttactacttgcatatagtgcagttttacttctgccactaacgactacagttatgcgcaacgatttctatgcggttggaggcttggtaatgatggcaacagggttgagaatttgcggcattaagatgtttccagtagccaatatgcttcctgcattattgtgggcaatgcccctatcctggctttggactaatttttttaaatga

SEQ ID NO: 99165 - DNA, 969 bp, Enterobacter aerogenes
atgtctaaatttatacttgttggcgatgtcggcggtacaaatgccaggctagctctgtgcgatgtggctgacggtaaaatctcgcatatccatacctattcggcaaatgattacgcaactctacaagatgtcatcacgcactatcttgaaggccagcacgtaactgttgatgaagcttgtattgccattgcttgtcctataacaaatgactgggttgacatgactaatcatagttgggcattttcgataaactcgatgaagctaaaccttggtcttacacatcttgaggtcattaatgatttcaaagctgtttccatgtctattccaatgttgaaagattcagacttgctaaaacttggtggtgggaatccagagcgaaataaaccggtagccgtttatggtgccggtaccggtttaggggtttgccatcttatacagtctgagaatcaagttatcagccttccaggcgaaggtggccatgttgattttgccccgaacagcgaagaagaagatcgcatactctccgtgctgagaaaagatcatggccgtatttcatacgagcgagtactatctggtcctgggctagttaatctatataagggtattgtaaaagtcgatggaagaattccagagaaactcaaaccaaaggacatcactgaccgagctttagctaacgaatgtgtagactgccgccgcgcgctcagccttttctgcattttattaggtcgatttggtggcaatctggctctgactatggggacctttggtggagtatatattgctggcgggattgttccacgcttcctggagtttttcaaatcatcaggatttaggaatgcatttgaagataaaggtcgcttctgcgaatatctcaaagatatcccggtgttcttaataactaatcctcagccaggactattgggtgcgggtgcacatatgcgtcaatttcttggttattcattaaattaa

SEQ ID NO: 99166 - DNA, 1668 bp, Enterobacter aerogenes
atgaaaaaagaattttatgacgcaattgttatcggctcaggagtagctggcagcatcgcggtgaaggaattaactgagaaagggatgaatataattttgctggaggctggcccatttttaggcgaaaaagatttccccataacgccgggtaataacgaaaagataaaaaaaatagatgcacttgcccgttttaaaattgcattaactggacagcctttacaggcgcgtgcagcgtatatgagtaacgagtaccgccatctctttgtgaatgactggcaaaacccttacacaacaccaaaagggcaatattttctttggatccgtggcagacagctcggtggaagactccatacatatggccgagttttgcaacggatgtctgactacgatttcaaagctgcaagttacgacggttacggccaggattggccgatcagctacgaggaactgtccccttggtatacgcacattgaagaattcctcggggtttacgggactgaagaaaatattccgaatcttcccgatggtaaatatattcaagcaccgattctaacaaaaccggaaaaggcatttaaaagtaaggtcgaatctaagtggcccgaacgcaaagttatcagttggcgtttttcaaccccaaacctgaagcgaattccagtaggggtacaagcagcaatcgatacaggtcgtctggagttacgtactgatgctatagcaaagcaaattgatgtagatccggtaagtggtaaagcagtcggcgttacatttatagacagattaacaaagcaggaacatagcgtacgcggaggcatggtcatgctatgcgcctcagcaattgaatccgtgcgcttactgctaaattcgcgctcttcacgtcatcctgaaggcattggtaattctacgggattgttaggacgttattttctagaacagacaccaagccttattgccggttctgtgcctgacagtaagggttgggaatacgataaaacaattatccaggatcccttctgtcgtcccgcaggcggaattgttattcctcgcttccagaacctaggccaggatagccagaaaaactatctacgtgggtttgcgttccagggggttattggacgaggttatgttccgccagggagcccggcacagtttggacttatgggttttggcgaaatgttaccgcgaaaagaaaattgtataacgctgaattttaaaaagaaagatgcatggggaatccctgctccacacattaattgttcttttggagccaacgatctgctcgtcttgaaagagcaattacgtgcaattaaggagatggtgacggagtgcaattacaacatcgattttgctggaacagcacttgggcttgaagatgggcggaatgcaatgcccaacgaaacacttcttacgaaaacaattttccgactctcctttaagaaaagtgtcggtctgggtgctgctatccatgaaagcggtggtgcaaggatgggagatgatccggaaagttcagtgcttaacaattacaaccaatgttgggatgcgagcaatgtttttgtcacagatggcgcatgttttgtaaccagcggtactgttggtccaacattaactatgatggcaattacagcgcgagcttgtgattacgcggcaacccaatataaaaatggtcagctttag

SEQ ID NO: 99167 - DNA, 1056 bp, Enterobacter aerogenes
atgaacactcttaaaggtcctggcatttttctttcacaatttattggaagtacatctccgtttaataccctcgaaggactggctatttgggctgcgaatctcggattcaaagctttacaaattccttgtaatcacaaaaacatctttgacgttgaactggcagcccaaagccagcaatattgcgatgacgtcaaagccttacttgcggaacatggcttacaaattagcgaattatccactcatttggaaggacaacttgtcgctgttcatcctgcttatgaccaacccttcagcggttttgcccccaatggggttgcgcgcgacccacactcccggcaggaatgggctgtgggtatcgtcaaaaaggcagctattgcatccgcacgactcgggctgaacgcacatgcaacattttcaggttccctcgcttggccatacctctatccatggccacctcataacacagtactttttgatgaaagctttaaagaactggcgaaacgctggttgccaatactcaacacttttgaagaacatggcgtcgacgtttgctatgaaattcacccaagtgaagatctacatgacggtgcaacatttgaacgttttcttgatgaggtcaactaccatccacgctgcaacatcctctttgacccaagccatttgcatcttcaacagattgattatctggattacatcgacatttatcacgagagaatcaaagcatttcacgtcaaagacgccgagtttaacaaaaatggtcggagtggtgtatacggtgggtaccaaccctggctacagcgcgccggacgattccgctcacctggtgatggacagatcgatttcaaaacaatttttagcaagctcgctcaatatgattacagtggctgggctgtactcgaatgggaatgttgcctgaaaaacagtgaagatggtgcgcgggaaggaagtcgttttatccaagaccatatcatcaatgtatccagtcgtgcttttgatgatttcgctgagactggaaacgatatttcagaaatcaaaaaaatgattggaatctcctga

SEQ ID NO: 99168 - DNA, 1125 bp, Enterobacter aerogenes
atggttaaaaaattacgtattggtattattggttgcggccgtattgcagtgtgtaaacattttcctgcatttgaaaaagccaaagatcgtgtagacctggtcgctttctgtgatatcgaagttgatcgtgccattgatgcagccgctaaattcggcatccccggagcgaaaacttattcagaccatcacgaattacttaaagatacttccattgatgttgtctacattctgactcctaataactctcatagccctctgacagtagatgctcttgaggcaggtaaacatgtcctttgtgaaaaaccgatggcggcaacaacagcagatgcgcagaaaatgctggatgcggcaaaacgtactggtaaaaaactcaccatcggctaccagaaccgattccgtaaagacgtacaaatcttaaaacaagcaagcgcagagggtgatttgggtgaagtctattttgcaaaagcccatgcagttcgtcgtaaagcagttcctacctggggtgttttcctggacaaagagaaacaaggtggcggcccgcttattgatatcggtacccatgctctggatattgccctgtggacaatggacaactataagccgaaggtggtttcaggttcggtgttccataaaatgaaagacaattatgagggtaatttgtttggcccatggaacccaaaaactatcgacgtagaagattctgcgttcggtttcatcaaaatggaaaatggcgcaacaatcttcctggaggcttcctgggcgctgaatatccttaaagcccgtgaaggacaggtcacactctgtggtacaaaggctggtgccgaattagtaggtgatggtgccgctgcaccaacttcagccgtagacggcacaggtagtattgtatttaatactgcgcgctttggtgaattggtagatattgagccattcgtacttggcggccctggtccattagatcttggaaacgaacctttccgtgtggcggatgcagaacttgctgctttcattgatgcgattgaaaacgacaaggaaccagttgttaccgcggaacaagcattcattgtgactcaggtgctggaagcaatctacaaatctgctgaaactggtcaggcagtagagttctaa

SEQ ID NO: 99169 - DNA, 1002 bp, Enterobacter aerogenes
atgcggcacgccaaccgcggagaccgtatccagcagccccataaactcgatactgatggggatgccctgcagggtcggaccgccgggcaccaccgtccccgccggcagcatatttgtcgcatcgagcggcattttagcgtcatcgagcagcgactccagcccgcgggcgaaggcgcgggctgtggcggccccccggcagtagccgtagacaaagagcttgattttggcgatgcgccgctgcgaacgctggatatgcagccgagttggctgccgcggccactgattgaccacgcaccccagatagtcgtcgcagaatttgtcaagcgcgcttttacggtcaaacttctgggtcagccgcgagaagggccagacggtggccatactgttccggtatctggtcagttcgctgtctttgatcgcggttttgttcaccgcatagctgatgctgctgtaggttttaagcagcgcctgattgatacggtcctcaccgccgttggcaaacagctcgccgtccagcgagtagtgctcttcgccaatctccggaaatcgcgctccgcagccgggaaagtaatagctgaagtagccgtcgttttccgcagtttcatcctgctctttccagtttgccgcatggtagagcctgccgatattggtcaacggcgggttacgcgagccgtatatctcatcagccccctctttagtacagcaggtaccgtcgaagaacaggctgatatgcaggctggccgggcagcccggttcggtttttttgtccgattgatgatcggactccccgacataaccctccagatactgcctggcatagttgccttcggtctgcgttctgctcgccggcaggcggccgcgctcgttgtattcggctttctgctgcgtggagttatccgccggcttttctccttttcatcatccggcccgggaaacttcggcggtaagctggccgcttccgcggtggaggttttgaccgcgaccggggtggcgccggtctga

SEQ ID NO: 99170 - DNA, 210 bp, Enterobacter aerogenes
atggaggcccgggagcattcaacagcgtcactccctgagacattaccagtattaaagattcagaacacactgaccggcaccctgaaatattatcaggggtctgaattctgttttacttgcacagaggaggcgaaaatcagcaacgaacgagaggcaggtatctttaatgggttatttctgatgctcttgcctgtaagtagccatttttaa

SEQ ID NO: 99171 - DNA, 234 bp, Enterobacter aerogenes
atgaaaaagcaaaacagtaccccgacaccccatgacgccaccttccgtcagtttctggcgaatcctgatgttgcccgcgattttctggatattcaccttccgtctgaattacgcgcgatgtgcgatctggattcgcttaagcttgaatccggtacttttgtggaggatgacttacgtcagtacgccagcgacatactctggcgttgtagtggcacactaaatttggccacctga

SEQ ID NO: 99172 - DNA, 312 bp, Enterobacter aerogenes
atggacaagaaaatcaaacgaaccttcacccctgagttcaggctggaatgtgcacagctgattgttgataagggctactcatatcgacaagccagtgaagcgatgaatgtcggttcaaccacgcttgagagctgtgtacgccagctcaggcgagagcgccaggggattacgccctctgccacacccattactccagaccagcaacgtatccgcgagctggaaaagcaggttcgccgtctggaggaacaaaatacgatattaaaaaaggctaccgcgctcttgatgtccgactcgctgaacggttcacgatag

SEQ ID NO: 99173 - DNA, 231 bp, Enterobacter aerogenes
atggttaagcttaaggaaatagaaatgaagtatccaggcgcatgggcctggcaaatgggagacagtccagaattggcaagcgagcttgctaaccttattaaaactggaatcaaaacggcctcttgtggatcttttgcctcttaccaacaggaagaatctgctccgagggttggcagctataacataattcttgatggacataatgtcccggtatgcgtgatccggctgtaa

SEQ ID NO: 99174 - DNA, 339 bp, Enterobacter aerogenes
atgatttcaaaagataacgctgaacattacatctggggtaaaaattgcgatggttggtatctggttaaccggcaagatatgcttattattcatgaaaaaatgcccccatgtacacaagaaaagcgccattttcactctgtttccagacagtttttctttgtgctagagggcgtactgacaatggagctggaaggtcgtgataatcaaatcggcccccgccagggaattgaaattccgcctggcttgaagcatcaagcgaggaatgatggccaatcctccgtcgagtttatcgttatctcacacccaaccacacgtggcgatcgttccgatctctattag

SEQ ID NO: 99175 - DNA, 897 bp, Enterobacter aerogenes
atgccttatttattactcacactcgctgcatgtttttggggggggaattatgtggttggccatttattagtccgtttgatcgaccctgttttattatcctcggcacgctggatcttgaccgcaattttactggtcgcactctaccaccggcaaattaataaccaatgggtagcgatgcggcgcggttttcacatcatcataatgctggctttatttggacaggtgctttttcctctcaccttgtacattggtctacaatatacttcatcactgaatgccgcgatatatttatcgacaacgccgacacttgttttaatgattaataaaatgatattcaaagaaaaaataagcaccaagaatgttaccggcgttattattagttccttcggggtagtctggcttatccttcaaggtgatttatggcactttaatacgctaaagcaacttaatcgtggcgacctgtggacgatggggtcagcggcaagttgggcagtatattgtgcatttttgcgccttaaaccgcgcgacctcgggggaaatgcatttgtggccataagcgcgacgataggcgccgttgtgctcgctccagtattatttttctctatagcaaaaaatggtatgtcagaactaactgaatttaaccatagcaatttggctattggcctcctgtacctgattatttttccatcgtggttggcatacttgttatggaataaaggcattcaggtgatcggcgccacgcgaggagaggtattttcgcatatcatcccgttgagtggtgggttattcagcgtgctgtttctcaatgcgccattacatttttatcatctggtgagcatgctcttgattatctgcggtatcgcgctatgctcgggcaaatcaaccaataaaacgtga

SEQ ID NO: 99176 - DNA, 915 bp, Enterobacter aerogenes
atgaaatttactctcaggcaactagaattttacatcgccttagcagaaacattgcaggtgtctaaagcagccagccgctgtcacgtttctcagtcctccatgacggtagcattacgtaacttggaagaagcattagatgcgcaactctttctgcgcttgccaaaggggatccagctcactttgaccggggagcgttttctgacgcacgctcgcaccatcatcagcaacagccatattgcgctggaagatttacatcgccaaccagaaacaacagctggaaaagtgcgaatcggtatagcgcaaacgctctcagcatatttgttaccggagatgctaagtgacatagaaaatcgttttcctttattggaaatcgattattttgaggccaccgcccccgatttgctcatcgcgctgcgccaacggcaagttgatttttgtctgttgctgacatccaatattcagcgcgatagcgatcttcaagtggaaaccttcatccgatcgttacgtcaactgtggattgcccccggccatgtcttactgagtcaggcggttattcgtctgcgggatattgagaaacttccttttttgatgctcgaaaccgaccaatatcccatggtcatcaccgatgtctggcagcttgctggttaccagccccgtatccactttcgcagcaactcttttgaagctgtccgcagcctggtcgcccagggcagtgggatcaccattttgtccgatctggtttaccgtccctggtcgttaaatggtcagcgagtggttcgccgtacgattgaagactgcctcacctatatggacattggcgtggtgacgcacagcggatgggcgctatccactccggctcagcggttgagagattttctgcgttccctgattgtgaggctggggggcaagagctaa

SEQ ID NO: 99177 - DNA, 333 bp, Enterobacter aerogenes
atgatggcggtatggcgacgtaaaccagacagtgaggtcatcgtatattcggaccagggcagccagtacggcagtgacgactggcagcgcttctgccgggccaataacctggcgcctaacatgagcagacgtggcaattgctggtataatgcggcggccgaatcgttcttcagttcgctgaaaaaagaacggatcagaaaacgcatatataaaaccagggatctggcccgggcggatatcttcgattatattgacatgttctacaacctggcccggcgccacagtcatctcggcggcgtcagtccggaggctttcgaacaggcctcgtcgtga

SEQ ID NO: 99178 - DNA, 477 bp, Enterobacter aerogenes
atgacgatgtgttgggtactgaatgtcgcccgggccggtttctatgcgttgctgcacaaccaagtctctgcgcgggataaagataaccagcgtctgctgatacttttctgtaactcatattcactgagtgtaggcgtatacgattaccggcgggttcatggcgatctgaacgaaatcggggaaacctgcggtaaaaaccgggtgggccgcatgatgcaactgaaccggatcaaagccgtacgaggctataaagctcctagtcatatcgctggccgaccttcagtggttgcccctaatcgcattcagcggcagtttaccgttgcccgggccaatcaggtctgggtcaccgattttacttacatccgcacctggcagggatggttgtatctggcggtagttatcgatctcttcgcccgtaacgtggtgggctggtcgatgaaacgaccttatcatgagaactggcgctggatgcgctga

SEQ ID NO: 99179 - DNA, 576 bp, Enterobacter aerogenes
atgtctgaagtgattaaccagcacccagaacgggaaaaatacatccgtaccttgcctgatgcacacaggcatattctggcagcgatgggggtcagacgcagacaactgacaatcatgcttacggctgaacgaaaccgattacatccttcacatcctcggagttatgaaagcatcaaatcaattatttcggcactgaagggtgagctggctcgcattgaagatgaaatggcgattcaaatcaagcactatttcagtgagttatctgatctactgagtgcagttaaaggtgttggggctgcgactgttgctgtattgctggctgaagttcctgagcttggttcgctctctcgacgtgaaattagcgcttttattggggttgctccagtaaacagggattccggtacgatgcgcggtcgccgaacagtatttggagggcgagcttccgtccgttcagcgctctatatgtcagctctggttgggacgaggcacaacccggtaaagagttctatacacgcctggttgccgcaggaaagcccaaaaaagttgcactgtcggcctgcatcaaaaaattgctga

SEQ ID NO: 99180 - DNA, 477 bp, Enterobacter aerogenes
atgaacataatgcctatcactattcaacgaggggggcttatcggtgtagccatgctgctagcggcaggcatccagcttctccctgataaccatcgctcacccgagttgaaatgtaatacttaccttgaacaatcggggggagatggtcaatatcttatgaaagcaacctttatgtttctccttaacagagatggcacaggggtgttcgttaatgacggtaccattacctataagggaattgtccatactcttcgccgggaagctaaagtcaggattgcaccaataaatgctgccactgccccatggaaactgatagagtttaatgaaacggtgagcagcagtgataacatcccagatgaagtatataaacgttttttcttcgatggaagtgaacgttccgggcgttatataacgataaataaagtgggggctcactggctaataggcagcatccgcacaccggcgttcctgtgctag

SEQ ID NO: 99181 - DNA, 747 bp, Enterobacter aerogenes
atgtatcacattctgaataaagaagttgttttctctccggatgatggtgctatctggttgaaagaaaaagcagatgataaaataattttgacacctaccttaaaccgtttgctgcaatgcctgattgaaaatcatggaaaagtgattacgcgtgaagaggtttttcagcatgtatgggatcgctggggaaaggaaggttcaaataacagtttgaatcaattcatctcacaacttagaaaaatatttcacaaatatggtttttctgacgatacaataaccacagtgcctcgcataggatttattcttaataatgatatcgcaattcaaactctgcatgaacaggttcctgctcttttaaaaaaaaacataattccaaatattaatcataagattttttttatgtgctcaatgctactggctttcgcgagcatgtttttcaaactctacccccaacagcttgataaacttaacatttcccccaagcttacgggagctatcgataaatgtacggtatatgcattaactgaatacgatgattcactatcggcttcacttattagtaatatacagcgttttgttaacaaaacacatttttcgtgcagttctccgggtaccttattttttttccttgattcaaaggtgcttgcagagcaatccggaaatttatacgtctccacctgtcgtggaaatgtgaaggacttttacaactgcaccaaccggatggatagcagctggagggaagaatga

SEQ ID NO: 99182 - DNA, 2079 bp, Enterobacter aerogenes
atgtcaactgaactcaaagggcctggagaaattgcgggtgagaacttggggggctccggtgcaaacttaaatgaacgacctgataattctactcctggaggcggttctaacggtactggtggtaatgacagtggcggctcatcttctggctatacagctgctcgccgacaaattgatgcagtagtaaacgacccagcagttaagagtaaattatcggcgattattaaaggtgccaaagcgatcaatcccaatgcacacctgtctattacagagttaactgagactggtactttaaaactcggcatcaccgatatttcggcagatcaggcctcggctcttgggctgggtaatattatcaccgtacatgctaataatgggtttatgtatactggcggaagtattgaaaccgggcatgtgctgggtaaaactccgcccgggattggcggaaccggtggtagcaacgatagtggaactatcgcagcacaaaacaaggtctcgccagatatttatctttcagtactgcaagggacaattccaaatggattttggctcagcaacgataaagtaatgacccgggtacgtgttgcttacatcataaatggtgggggtaagggtgacgaccgtactggttatcgggacaaggatgtggaagttccttcacttactgatgcctggaatactagcaagcagattaaggcggatattgaggaggctgcacgtcaggctgaagctgccaggaaagccgaggaggcaaggaaggctgaagaagcgcgtaaagctgaggaggcaagaaaagcggaggaagcacgtaaagctgaagaggcaaggaaggctgaagaagcacgaaaagctgaggaggcacgacaggctctttacaagaaagccggtattttaccgactccatcttactccccagaaaaggccgcggcaggcagtgctgcacttgcgaaagccggagttatggcccttaaccgtgcgcctgctgcattacagcttacatcggtagctggtggcgttatgactactgctagtgagctggccggttgggtagccagtgccttatggcgaggagctgttgccgtttccgacattgcagtggttagtccagttggggctatggtaggtgcatttgtagctggatttacaccaattccagtggggacaggtagcgatcgagtaccgggacgagatattgaaatgctggctgtgcaggcccgattgatggcggcaggtaaggttagtattgagccagggatgaccagtgtcaacttaccagtacgtagcttcattactactgacgatgatggtcgtcagtccgtacacatggttaaaactggtgtcggcggggtgtctgcagctgttccggtacttaatgcagtccgggatgaagctactggccttgatcgcattacggttccggcagtggcaggcgctccatctcgtaccattctgattaaccctgttccaagcgggccaacagtacctgccaataccggtaatacggggccagtgccaaagactcctgtacatacgggcacagatatccgacaagcagatagcatcgtaacaacgacctatccagctgcggaagatttggcgatacaggactttatctattggcagcctgacgcgcttgtaagtggagttgagcccatttatgttatgttggctagccctcgagacttgccaggcaaagtcaccggtaaaggggagcaggttggtgatggttggttagacaaagcgggtgaggaactaggctctccaattccaagccagattgctgataaattacgtggtcgtgagttctcgaactttaattcgttccgcagagctttctggaagactgtttctgataccccagagctaagtgagcagtttgatcaagctagcttaggtagtattaagttaggaaagtcgtccttcgtccgcaaaagtgagcgtgttggaggaagacttaaacatgagttacatcacgtaaaagctattaaagatggtggggatgtatttgatgttgataacttgcgggttatgactcccaaaaaacacattgaagtacacaaaagtaatggtggtaaatga

SEQ ID NO: 99183 - DNA, 954 bp, Enterobacter aerogenes
gtgtttttgagaacatcgttattatttttgctattgctttctttaaaggcaacagcgtcgggatgctggataacttcaggtgcaaccatcaattttggcgaggtggcggccggtgagacggcctctacaaatacagaggttaaattcagctgtcaggccgattatggtgcaaaagagtatatcaatgtctgcctgagtagtattgccccccctccttttaagatgctgtctctaggggatacagagggcaaacaataccctttgttttttcggatcttcaatggacttgcccgttcacaggagctagggaccactaccagtggaagccttattgagcaaactctgcttgccgaaagtaatgctaacgtgaatggccgctttcctctcgttgccaccctccctgcgggacaaagtcacctcccggcgacacactattacaactataatatgaatctgcgcatttcctggaacagttcccctcgtcaggagtctttaaaaagttgctcagacggctcggcggaaggagaacaaattcagggggggagtcatgcagaggccgttatcggagcaagttgtaatatagaatacgtcacaccgctgaacttcggcatcatcacaagtgccgcgacgttaaacccaacgcgttcaacggccaccctcagtataaactgtccggccggaatctcctattcacttgctatgggcaaagggaatcataccaatggaaatcagaggcagctgtgcaatatggaaggacaatgcctacggtatgagatctggcaagatgcaggtgcaacgcaacgctggggcgatcaaagtagcggtgatacgttaactacatccaataatatcgggggcaagaaaaatatcatcgtctacggcgagcttccagctcaaaccatgaccggtacgggagagttcggtgatgacgtgataattacgctgacctattaa

SEQ ID NO: 99184 - DNA, 2256 bp, Enterobacter aerogenes
gtgcgtctgctctggctaccgctgattctaccagcccacgctgagtctttagccgtcgatcagcagtggctggcaataaccataaatcactccccgcgaggggagttatgggcatgtcgggtggttgggaattctctttggattagtcgtgccgacataaaaaaactgggacttcacgcacctaatgaccaaagcgaatggattgagctgactgcacaacccggtctgaaagtgagtcttgatgtactttctcagcacgtcagcatcactgctgatacgaaggcgctcgacagtcggcaacatctgcttcttgatacgccaacgcagctctatccctatcctgaagcacaaccaatacgcgcttttacgcttggctactcgctttatgccaataatttcctgggacagcgcaggtttaacgccctgactacgctaagtacttcgggggggctcccaggtgtgattagtagcagttttgcaagccatgcaggagatgaaaacagcgcaggagggagggctaacacccgtctcgatacgaactggcagtgggatgacacaaaatcattaaccactctcgcgctgggggacagtattactatcggtaccagctggagccggcaggtacgttttggcgggctgcactgggcacgcaattttgaactcaatccgcagctcaacaccgaaccgcggagccgatacagtgacagcgcagttcttccttcaacaattgacctttacgtcgatggcctcaagcagaccagccagcatgttacgcccggagagtatctgttggacaccctgccctcctttactggtaatgggcaggcacaggtggtcatcaccgacatcaatggtcaacgtcgtactgttcaactcgatttgtatggtgcgcccggtatgctggcagagggactcagcagcggttcgttggatctcggctggatgcgaaaaaattatacgctgcgttcggatgattattcctcctcaccaatgcttgatgcaggattgcagtatggcatgagcaacaaattgacattggctgtgcataccgaacaacaacgtgacctgcacaatataggcacgggaactgactggttaatctctccagggataggaattatcagccagcacgtagcggtaagtgaaagcccctacggccagggggctaagtggggtctcggctggcagtggaacggtaacggtactggactttccgccagtaccgttagcaccaacgaggcctttgccgacaatgcccgaatgagtggaactttgcccgttaagcgcaacaacaccttatgggcaagtcattcatttaatggcttcggcacgctgggtgcaggctgggtacaacaaactattcagggcagtaaacatcgctatttgaatgcgtcctggtccgcttcattgccacataatctctctgcaaatttgagctttacacgttcattcgaagagtcatcaaactctgttcagctcatgcttacggtgccgttaggccgcagagatgcgttttctgtacaagccaaccacaagtcgtcccgactggactatcgtcaccaacctgatagccagactggtggctggtcatggcaacttgggaaaggtgaacacaacgaaaagtatgccgatataggctatctggggccttatggagagtggcatgttggacaggggcatggcgataaccagcgaagccagtatgcctccggcgaaggcagtctgacgttactcgataataccgtacatgcactgcgttacagccagcaaggaacgggcctggcactgatatcgacgaacggcatcggacatgtaccggtgaagcttgaaaatcgccccgcaggtgagaccgatgacaagggttatcttctgctgacggatctaccgcgttatcacaacagtaaggtcaccattaatcccctggatctacctgcagatatcgttgcccctgttaccgatatgtacgccagaccggggaatggcagcgtagtaaaagcccattttaatatacatcaggcggtgactgttcaggccagactggtggataccgagcatcgtccgctgccgctgggtagtgtggtttcgactccccatggtgccactatcgttggacatgagggattcatctggcttgaagatccgccacagcctggtgagctggccgtgaagacaggtgagggagcgtgccgggtctcccttcctgtaccacgtacaacctccgcgatacagaatattggagaacaagtgtgtttttga

SEQ ID NO: 99185 - DNA, 681 bp, Enterobacter aerogenes
atgcttgagctgcagagtcaccagaaagcaacagctttatacgtcacaaacaccgggatgacatcgattcatgcgcagatacgagtctatgaatggtcgcaggtagacaataaagatgtcttaaggccaactgataaattgatcagcagccctgctatgacttctctttcaccgggcgagcggcaacttgtgagaattatcgttctgcaaccaggggggagtgtgaaggagcaaagctatcgtctggtgattgatgagttgccaaacaaggcttctgactcatccagtcccaacgctgtgcatttcctgctgcggtactcgattcccgtctttattaccgggcgcgaacataaaccttcagatcaggatgacgtcagttgtgagctgacaaagaatataacgacaattcgttgttataactcaggagcacgccacatacgcctcagtaatcttcaggctttgactgctcaggagcatgttgttggctctattcatggacttgctgggtatgtgcttccgggacaaaccacccttctgacaatcaagcaaacatctcaacataagctcagcgcactgcgcgtatacctcaatgatgaccataatgccagccatattccgttgcatccgatcgccactcgtgcgtctgctctggctaccgctgattctaccagcccacgctga

SEQ ID NO: 99186 - DNA, 498 bp, Enterobacter aerogenes
atgcgaattatttccgctattgtatgcggttccatttatcttcttcccgttgtcgctaactctgcaggcaacacagagactgcgtcaatgcacgtttctcttgaagtcgttaaatcctgcacgctcaatgcaaacgacttgaatttctctcaacatggctcggatgaggctggagaaattaaagccagtacgcaggtcgatataatttgcaccaacggcactccttttacactgttcgccgctagcagtgacgccagtgaaaatggaactttctggctaaaacccgaaaataatgaggcaggtgcaaaaaaaatagcttggaaactttacgctgacgaaggtaaaaaggcgcaaatcaacagcatccaggggttaaccgataccgggacaggttccaagcaaatagaaactttgtacggggtcattgaagctggcgcgctcaccactgcccaggctggcacatacgctgatgacgtcacattaaacctggtgtactga

SEQ ID NO: 99187 - DNA, 639 bp, Enterobacter aerogenes
atgttaactggctataaatacgaacccatcagtatactccatagtgaacaagtgattgcgtgggagcttctctctacggcagaaccgcacattgatctggaagcacattttggattaatggctgtgacagagcaaaaaaaacacttttttgctcaactcaaacatgccacattttctgaagaggctgacaaatatcaccttaatgcctcatcctctttaatgctggaagcggatttcctagagcggctatgtgaagaagctctttatcctaataaactggctatcgagatcactgatcttgaaaacattattgactcagaccctatccgcatttgtgcattatgcaagtgcattgctgaattgcgctataggggaagcgaagtatgggctgatgatgtaactgaaactatcctttgggaattgttcgaatgtgctatccgctttgatggtattaaaattgataaacatacattctggcatggacgcactgagcggagtaaatttctgcaacttgcacaatgctgcaagtattttacaaataagattctgatagaaggcattgaaacagagagcgatttagaattagcgcgcgcgagtgttgctgagtatggtcagggttatttatggagagaaatatga

SEQ ID NO: 99188 - DNA, 2202 bp, Enterobacter aerogenes
atgttactaaaaagtttgaaaaatcgaagatttactgatgggacaagtatatcaatatcacatgatgctgagctgaatttaaatattcgttcattttttcttacgttagatgtaaatcaaaaaagtcttgctacatctattatccctcgcagttcgctattaggtgagtcttcggtgcagcagggtacgtctgtactaaattatgaccttggcgtatacaggtctcagataaaaaatggagataatacctctaatagctatttaaatatagatgatacgttaagtatagcggaacatcactttaatattaatggttcgttttacggtattggcgactcgcagcgcgatagtcagctttatcgtgctatgtacgaacatgatttccatggacgtcgttttgccgccggtttgttggatacctggaacctgcaatcattaggcagtatgtcagccttaaatagtagtaaagtgtatggagccacatatggaactaagtcactaacacaagtggtcaataatcagtactcccttacacctattactgtattcttacctgctgccggtgaagtgcatatatacagacaggggcggttgttaaatatacagaattttccgatgggcagttttgaggtagatacgagcggtctgccttatggtatatataatgttcaggtcgatgtcgtaattgatggcaaagtcatatctcacatgacacaaactattaataagtcattctcaagtcgtactcagaatatgcaacactgggattggcaaatttacgctggtaccgttgattatcaggacagaaaatatacggctgaaagtgaggaaacaaatcacagccctgattcatatcagacttggcttgcagggttttcaacatccgttagttatcctgttttatcaggactaactctgcaaacatccacttatagtttcgacagtaactatattaatgaatcatctttgaatctaacgattctaaagtatggtagcattggttggcagggtttgatatcccagggaggcgtgcacaggaatattattaacgcaacaatgcagctgccagaaggatttggatcggtttgggttaatcgtgaaaaaagccacattaatgataaactgccaatttatgaaacaaataactattcttttggtggcacgcttaattttaatcaaattatagatcatgctggacaggttactgtaagccatacggttgataaacgtgttcgtagtaattcaaataatttcgagtatacaacgtcacttttctctggacgttgggggaatgttaatcttcgtgcaggtatacaacgttatcagtatgattatcaatcaaatagctcaaatcaacgttatatttcacttgatttttcgcttcctctggcgacgtggttgagtacaggaatgtcatcaaataatggtaatattaaagctaatttaacggcgaccaaaaattttgaagattcggcctttagctcagcagggttgaatctctctaagttacttaaggataagaaaaatggtgagagcgattattcgatatccggttatactgcgttcgatactaaatacagtagtgggacgctatcattatccaggccagatagtgaaaggctgaatggtaatgtaacagcgcgtggttcagtcgcttatagcagtaggaatattgcagctagcggtatccaggaaaaatctggtgtgattattaataccgaagtttctgatgatgcagttcttgccgctcaggttaacggccgacactatcgacttagcggtagtaataatttcattcctttgccaccttattcagattataaagttgagttaatgaatgacaaaaattcacaggatagctttgatattgtaactgagcgtataaagaattttaccttatacccagggaatgtggctttgtatactccgcagataaaacaaatgataactgtatttggaaggatgacaactcaggatggtaagccaataccaaatgcctctgtccgtaatcatattggccatacttatacagacggagacggaaaattttcaatggatgtcgataaacgttttcctgttgtttcattggcaatgcatgataatgccatttgtgagtctgaacttgatttacggaaggcccgaggggttaaatgggttggcaacgtaatttgcgagaaacaaaccactttggcccagcgttaa

SEQ ID NO: 99189 - DNA, 1593 bp, Enterobacter aerogenes
atgaagacaacaacagttaccactatgattttgggaggttttttttccttctcaaatgtttttgctgcgacagtaaaaaatgattatgtatttgttgaaaatacaattgatggtgagtatttcattacaccagccaaaactgaccccagatttagtggtgcaaatgtttttacgaaatatgcatctgagaatcaggatagcctaggatatatgggcagttccggtgcattaggattaaatcagtttgcggatatttggcttgaaaactcgcctattgacaaacctttcatagggcaaagatgtaaacggaacgcttctggatgtccttcaaatggttacctggctggagattatatttctcataatggtgcttatcatataaaagttaatacacatgcgggtggtgcaggaatagctagaggaatattttctgactccgcatatcaatattttaaaaacgttgctgtgggtagtacagagagttatcagtataattattgctctaccaaaactgattatgatcctgcatcaggtcaaacttgcgtgagcatgggaggaaaacaaggcagtcatacctttttaattacgaaggttgggcatttaaagctcgaatctacaaatgctttgcaggaaatatttatagatagtagtggcagcccttcaataggtttgggttcccaattttgtaaggtgggatacatcggaagtataaatggagccatttgtaaactggtctcatatacccttaatggtgaaaccttaacacctatgcgagtaaatatgaaagttgatgctggtttggtagggtttactccctcaggaaaagatattcagattagttctgatggtgcatctggttgggaatactacgatgataaagtaaagtcttctgaatatttcaagcctggccatggaggcgtttatgtatttttatcgcagacatttttaaaacagttgattaataatagtcaggatctcactaattctcaaaaattttttacttttcagtttacaagtacagtagcaccacaatctggtttttatgaattctcaccttcaaatagtatcatattgcacacccgtgattatggtataagtatcatctctaaagaccttgatcctaacccacatcgggaggggaaagttggtccaggtgagtccgctctagtttttgattacaccgtcactacaagtggtcctcgacaggcgaattcaattattgctcaggtgtctggaccaatggataaattgaatggacaaccttactgtatatttagttctgatgacggaaagacaactgtaccattttcagcttatctatcatggacgaaaaatgacgggcaaactcaaaaagttcgtagtagttgtgacaatcttccggtatcgctggacaatgcacaatggctggaaacagcctggccacttccctatcagaatgatggaagcttctatcgtactgatcttaagctgacttttcctatggatgaatctacttctttatcctctctcgacggacgggactggatggggattgtaagtgcagcaggtgagattaaggttacagccgtctggagcggagcagatattcagtga

SEQ ID NO: 99190 - DNA, 693 bp, Enterobacter aerogenes
gtgagaattaaaacttttaacttaatgaggttaatttttatatcgttcttgatgtttctattttctctgcattccgcatatgctttatatttagattctagggtgtttacactagaaagcgaaaaatcattttactcgcgccaatttgttaacaatacaaaaaatacaaacctatataccatcaatgcctggcggattgaccggcctggtaagaatgaaattagaaaagaattgcaagaaggagagttaatgtacacgccattgcgaaaaatcatgcaatctgatggtcgcgagttttttaaattattttattctggtcctaaagatgatcaagagcgttattatcgtattgtcatacatgaaatacctgtggcattccattcgtctgggggggttaataaaacccctttggtttctcctattgtggcgctggagacaataatggttgtacgacctagggagttgcattttgattatcaatacaattcacaggcgagaatacttaaaaacacaggcaatacttattttcaggtcatgattcaccgctcttgtgaggcccgggatgatactgcgaaagtattctacttactaccgggtgaaagttatcatggatctgatttagacggtgaacaccgtaagtttattgtcgggtttaatcgctatcaacaatttggtaagcaatgtttaaattaa

SEQ ID NO: 99191 - DNA, 1266 bp, Enterobacter aerogenes
atgtttgctctggttgatgtgaacagcttctatgcgagctgcgaaaccattttcaggccggatctgcgagggaagccagttgtcgtattgtccaacaacgatggttgcgtgatagcgcgttctgccgaagccaagaagcttggtattaagatgggggatccgtacttcaaatgcaaagaccagttccgccggcatggagtggtttgcttcagttcgaactatgagctctacgcggatatgagcaacagggtcatgacgacactggaggaaatatgtcccagagttgaaatctacagcattgatgaggcattttgcgatataactggtgtacgtaattgtcgtgtgctggaagagttcggacatgagttaaaagataccgtttaccgtaataccaggctcccggtcggggtagggatcgcacaaacaaagacgctggcaaaactcgccaatcatgcggcgaaaacatggaaagccactggcggagttgtcgacctttcgaatgtggaacggcagcgcaaactgatggctttacttccggttgatgaggtgtggggtgttggtcgccgtatcagcaaaaagcttgaggctatggggataaaaaccgtcctacagctagctgatacggatattcgcttcatccgtaagcacttcaacgttgtgcttgagagaaccgtccgggaacttcgcggcgagccgtgtcttgaactggaagagtttgcgccagtgaaacaggaaatcgtctgcagccggtcgttcggggaacgcattaccacctatgaacaaatgcgccaggctatttgttcatatgcggccagaggggcagagaaacttcgtggagagcatcagtactgtcgctatatttccacctttgtgaagacatctccctttgcgctgaacgaaaaatactacggtaacagcggatccattaagttgctgacgcccacgcaggatagccgggatatcatcaatgccgcagtaaagtgcctggatgcgatatgggtcgacgggcacaggtatcagaaagcggggatcatgctcggtgatttctatagccagggtgtcgcgcagctgaacctgttcgacgataatgcgccaaggcagaatagtgagaaactgatggaagttctcgaccacctcaatgcaaaggacggaaggggaactctctattttgctggacaggggatccaggccacctggcagatgaagagagaaatgctttcgcctcgctatacaacaagatattcagacctgcttagggttcgatga

SEQ ID NO: 99192 - DNA, 291 bp, Enterobacter aerogenes
atgcttcaacaaccacagttttatgaagtaaccggcataagccagcatgcaacattcgttgatacacaacgtggcatcgccgtagttgagcgctcatcatcgccgttagcatcagcggttttacttatctcatattgcggggtacagcagtttgcgcgcttccttggaggatcgctcattacggaggacggcgacgctattgaaggggatatgctagcggatgttgagctgataggagtggtaactcacatcatcagtaaagccggttttgatgacagcccggtgatgtaa

SEQ ID NO: 99193 - DNA, 1650 bp, Enterobacter aerogenes
atgattactgatgacactttaagagaagatttaaactctccacaagaggggtttggaggagacctggttaatactccttatcacatgagtgtaaccaaattactaagtctaggtcgtatagtatacccagaaatgtatggcatagatttacctgcgccaacggatgacgatttatggacttcaatgtttaagggactctccgaactagaggatacatcattatctagcgacttaccttacaccattgacttacgtgggaaaacatacacactcaaatccacccacaaactcgatattaattttaatattatcaatggtactattttaatggctggcggtcagatagttatgggtgatgagaccagtgggaccaagacaagaaggcattatcttagggacctcaaggttagatatatcgatgatggaaaatcttactataatgatgccttaattaaaattgccaggtgttataatacatttgtcatcaattgtgacttttgggcaggaatctctacaaataaagatgccgatggcaatccgcttcgagccagatatggcctgtggcttggttcaaaaagagcctggggatgctcaataattggtggggagtattacggtgggcaaatttgttgtcgcataggatataccaacgaccataccggcataacagtaactggcggagctacattccaccatggattagtaggcaatctgttaatgtgcaaccctgctggttctatggtatccgggtgtaacattgagcattctgaagatggcgcatggggtttggccattacttctaacaccaacagtggtagtaattcagcgcatggtgtaataattgaagggtgttatctgtataataacgggaatggcacgaacggaaatgctaatactgaagctggcgtcttaataggttgcgatgttccaggaacaaatggatttgataacagtggagtaatgatatcaagtcttaacactgctcatagcatcactgtaagaaatagctatattgtttctccaaagcaattacgagcagttaaactgagaggattgtatgggttaaaagttgaagataataaatatggtgttgcactcaatgaaacatatggattttctgttgagggaacagcagcaagaacgtttattattaacaataggaatcaatcaacaggtatttcagatgaagttgaatattcctctacaaataaacctcagattggtggaagagtcggcacctatactcctggtgttgcaggtaaggatataccaggaaacattagttacagttccagaggctgtgattattacatagataatggcatgtgcaatctctcattatggttagctgtaagttcagttaatacaaaaccctctggtgatttatttattaagcttccagtacctattagcttggggaaaaaatctggatgcggtgtatttacactggaactagatggttctgtcacactcgccacagggatcagtgtaccaaacaattcattacctgtgaccgcatcaattacgaatggaaatgaaatgaaactttatatcgcaggagttccgatgcaggggaacgtaataaaaagcctaaccgaaattcaactttctatattataccctgttgatggggctattttcacaggttag

SEQ ID NO: 99194 - DNA, 687 bp, Enterobacter aerogenes
atgtttaaaagaatcagaaagttatttttggggatgctctttattttagcagctacacagcaggtatatgcaggtggtgtaacattgggagcaactcgggtaatatattcttcaagtgcgaagcaggcagaattaaccgttattaatacagactctcagaataagttcttggtacaatcatggattgatgatgagaatggtcataaaaataaagattttattgtgacaccacctctctatgttctggaagctaataaagaaaatacattacgtgttgtttatactggaaacaaccttccacaagatcgcgaatcaatgttttgggttaatgtcaaagtgattccgccgttaaatgatgagggtaaaacaactaacactttgcaaattgcaattcaaaacagaataaaattgttctatcgcccacaaagtatagcaaagtatgatgaacgggagcatgaaaaaattcgttttgtacgtcatggtaataaattagagattagtaaccctacaccttattatttaacattggttaacatcaaatctaatcagagagaacttgcgtcaaatttggttgttgcacctttctcttcagattatttaaccactaatgtaagcggtagtgtaagctatcaaacaataaatgatttcggcgcacaaacccccaaagtgacgaaacagattgattaa

SEQ ID NO: 99195 - DNA, 582 bp, Enterobacter aerogenes
atgaagaaattaattatttctgctttggttgctgcatcttttgctgcagtgtcgacaccaacattcgctggtgcggaagagaatccgccaagtgaaaataatgatggaaaacctcaacaggtaacagtaaatggtggcactattcactttgaagcttcagttgttaatgctgcatgtgccgtggacgcaaactccatcaaccaaactgtgcaattaggtcaatttaaactgtctgatttttcgaagaaaggtgatgagacaagccgtattcctttctctatcaaacttaatagctgcgatcctgctgtagcaagcacagctgcaattacatttgtaggcacgccatcagaatcagagcaggatgtatttgcattacagggcgctggtgctgctaaaaatattgcactgaaacttgttgattctcagaacaaacaaatcgctcctggccaagtttcaacaggtgtaaaactgattgatggaagtaatgaacttaattatagcgcgtctttaatctctacttcggatgaagtttctgctgggaacgctaatgctgttactaatttcatggtaacgtattcttaa

SEQ ID NO: 99196 - DNA, 573 bp, Enterobacter aerogenes
atgataaagcatatccgtattttgcccggcgggctggcggtgctggccgccgtttttctctgcctgctgacggcctgtcgtgaccacagtcgcgacggcatgagcggcgctgacatcacccttttaaaccatggtccggacgccatcgtttcggtgcaggtgaacggctacgggggaccaagggccaattcctacggcggcggcggcggcttctgctgtgtgatggtgccagatgtctggcgcccggggctgacggcaaaaattacctggacttccgaccctaactcctggatgaaaataagcgatatgcctgacaactattcgcaatactatcagcgccatggcccgatcaccgtgcccattgaacgctgggaagaggatcaggcttgcggctttcatgtgcatattttcccctgcgataaggtgcggatagtccgttcctgcattccaccgggacagccgggctacccggtaccccagtctcctcctgactgggagcaacgagcggataagatcattttcaaacatattaaggaggagatcgtatgtccgacaccgcagagtccacgctga

SEQ ID NO: 99197 - DNA, 465 bp, Enterobacter aerogenes
atgaccggcaaagacgcaattctgaattacctcaagacacacaaaacctgcagctccccggatgtggctgaagcctctggcatgtcgcatacctgcatcaaccaggcggcgaacatccaggcaaagcagggcgtactggtagcagtagcgaaggtctggcggacggttcactaccggctggcaactgaggaagaattttccggccagaagagtaccaatcagattttcaacgagtgccggcagagcccggtgatgaaacgaatttttagcggtatatgggagaacgcaggcatgaaattcatcaaattaagccagcgagcgacgactgagcgccagggtaaatatggctgggaaccagaaacagtttatgaaccggtatttgtcgctgctgcgcatatcgtgagcatggctccgcatggaattacaactgtgaaaaatgtcctctggcgagcgtatcgacgttaa

SEQ ID NO: 99198 - DNA, 516 bp, Enterobacter aerogenes
atgaacgaaatccggcgccagtgggttctggcattcagggaaaacggcatcaccaccatggagcaggttgcgactggcatgcgggtagcccgtcgccaggagcgtccattccttccgtcacccggccagtttgtcgcctggtgcaaagctgaagaagccgcggcggccgggttatctaacgccgatcaactggtggacatgatttaccagtactgccgtacgcgcggacagtatccggatgctgagtcttacccctgggagtccaacgcgcactactggctggttacatccctgtaccagaacatgcgcgcaaacggcctcagtgacgctgagttgcgccgtaaggcatcagaagaactggcgcgcatggctaaccggattaactcaggagagacgattccggagcctgttaagcaacttcctgtccttggtggtaagccgttatcacacatgcaggggctggccaggctggctgaaattcgcgagaagcacggactaagagggcgcaaacaatga

SEQ ID NO: 99199 - DNA, 696 bp, Enterobacter aerogenes
atgcagccgcgtcggctgccgcggccactggttgaccacgcaccccagatggtcgtcgcagaatttgtcaagcgcgcttttacggttgaacttctgggtcagccgcgagaagggccagacggtggccatactttgccgatatctggtcagctcattgtcttctatcctttcctttttcaccgcataacaaatgctgctgtaggttttaagcagcgcctgattgatacgatcctcaccgccgttggcaaacagctcgccgtccagcgagtagtgctcttcgccaatctccggaaagcgcgccccacagccggggaagtagtaactgaagtagccgtcgttttccgcagtttcatcctgctctttccagtttgccgcatggtagaggcggccaatattggtcagcggcggattgcgcgagccgtatatctcatcagccccttcttcattacagcaggtaccgtcaaagaacaggctgatatgcaggctggcggggcagcccggttccgtttttttgtccgattgatgatcggactccccgacatatccctccaggtactgcctggcgtagttgccttcggtcagcgttctgctcgccggcaggcggccgcgctcgttgtattcggttttctgctgcgtggagtcatccgctggcgctttcccctttttatcatccggcccgggaaagtgtggcggtaa

SEQ ID NO: 99200 - DNA, 420 bp, Enterobacter aerogenes
atgcatgccgatgttggcggcgactgtaaacccacggaactcggcaaagtgcagaccgatgccgccagcctgctgtcaaagattgtgctgcacgatatgtatgccgccgccttcgatgccggggcgccgctgagcgtacccgaggaggtattgcccggcggcgccaaaggtaaaaaatatcgggtaatgcaaggggatgtcgcagatcaattcaaaatctccgcccaggcgatcaccctgtttaacgcctgcagcaggcggcggcgcccgcggaaagcaaagggccgcgagaagtgccgtttatcgataaggatcgtctggatcgtgcggcgtggggctatgactttatccataccggtatcgtggcgctgctggatattattcccaccacgcaaaccagcgggtaaaaataattattga

SEQ ID NO: 99201 - DNA, 579 bp, Enterobacter aerogenes
atgcgtcatattcagttttacatcatgagcgataatagcttttttataattggtgtctctcggagcgttgatggattggcagaacgtcagccttttatggtaaacaatattaatatgagtatgtactgttcagggcaagcctttgctctctataacgattatttctccataccacgtgatcaagattgtttaaaagttattattgctgacaaggattatttaagtgttgtcgcattagccatcagtagtgataaggtccgggatacattatttattccatcaaatcaatgcacagaggaatgtttaaaaaacatcattgaagtgaaaagcaacaggtatcgatataattgtatgttaccaaagtttacattgttaggatcaattacttccagagaaaagcgagtgtgctattatctatatcatggcttttctatgaagctgattggtattattatgggtatacatcctaaaactgtaagtggttatagaaccagaataatgagaaagatcgggtgtaaaagcaaaggagactttaatcaaacgcttatcaaatattttcggttatgccttgataaatga

SEQ ID NO: 99202 - DNA, 621 bp, Enterobacter aerogenes
atgagtggtatgagctatagattatatccgctgcagaacacactttccttcaggaaaaccaccgaaaaatggggtggtctgtccaacatggctaaaggatatccattgttaatcaatggattgcctattcaatcaagtgaaatcctttaccaagcatgccgatatccagactatccggatatacaaaaggccatcattactcaaggaaacccctatgaagccaagcagaccgcacgatcgtttgaatctaaaactcgcgcaggatgggataagaatcgaatttcgattatgaagtggtgtgtttgcgtaaaattatgccagaactgggatgcgttctttgctctgttagacagtacaggcgaccatttcatcgtggaacactcagagaaggaccaattctggggtgccagtaaagacccagaaggtaactattatggtatgaacgtattagggcgaattctcatggatgtgagagaggttgctaggaaaaagggggctgatgggtttgcaacaataccatcactatctttggagaaattttttctactaggcgagagaattaaagatgtaacatttgtagagccaacgcctggagcagggcaaagtttatccttgttttag

SEQ ID NO: 99203 - DNA, 483 bp, Enterobacter aerogenes
atgataagaaacatttcattatcccttttcttaatggctttactttttttgctggctgttatagcaggccgattactaatgataggagtagttgctcaccgggatgcatattttagctgcgatgctaaggttgttgtagtcaacggagttagtaatctgtctcttgcgacatcatattttttcgaaggagacaaaggtcttgtcgttttcaaagggcgaatgcaacagggtgaaaaaatctataatgtaagtcgaaaagtattattcaatatcaatagcttacaaaacatttcaacgctaacttctacgcaggtagatacatcacctgccgataatacaccagaagagctattgcagctgatgctaccagctttcttctaccaccccaaaaacaatatggaatacacaatttatcaccaaggatggaatggttatattttctcaactggttatgtcccacttttttattgccggagatcttag

SEQ ID NO: 99204 - DNA, 591 bp, Enterobacter aerogenes
atgccatctgatacaaatatgatcgccaaagaggtttcaaataccgttgatgttgcgcgcttagtcagtttaagtgtggaacgtatatcttcaccacttgagcaagggaaagtaattcctatggaagctcaaaatgaaattatggtgacgcctgctaatcttattttgcctggaaaggcgaaagagatctttcgtatattttatggaggtcaaaaagatgacaaggagcgatattatagattaatttggcaggataacccagtagtagaagagggtaatagtaagagcaccaagacagcgatggctactacctccgctactattagcactttaatggtagtcaatcctcgtaaggaaaatttcaactatagatacgagaatggagttattagcaatataggtaacagttcctttcgtgttgtagcctcgggaccttgttttcctaacaaatcggaaggcgaaaataaaatgtgtcgtgagcgctattatgttatgccgggtttagctgtgcatctaaaatttgttgattatcaacttaataaatcaagcataggtatctggcacaataaaaactacattactgttaaatag

SEQ ID NO: 99205 - DNA, 846 bp, Enterobacter aerogenes
atggtatcacttggtatttctgtaccatttagattctttacgtcatcacccattgaaacaagcaatacctatttaaattataatttaagtaactcacaaaactatactaatcataatgtaagcatgtctggtacattacttgatgataacacactcaattacaatgtgcagcaggggttaacaaataatggaaccggagccagcggtggtgtatcggttggttatcaaagtcgatacggaaatggtaatgtgggttatagctatcagaaaacaaaccgacaattggattataatttttcaggcggacttcttttccatgaaaatggtataacactttctcagccaattaattcgaacgctgttttagttgacgtgcctaactcacctgatattcgtatagaaaactctactggcatttacaccgatcggaatggttatgcagtcataccgtacgcgaccgcatatcataaaaatcgtattgcattagatactaatagttttaacgatcatgtggatattgaggaaaacgttcatttctctgtacctacagaaggagcaataactaaagttaaattcaagccacgtattggtaaccgagttttgtttacccttaagaaaaatggaagacctttacctttcggggctattgcaaatgataaaaatcataaattatccggcatagttggtgaggaaggagtcctatatttatcgggtgtacctgataaaggaaaattaaatgtggcttggggtaaggaaattggaaagtcatgtaccgtagattattcaattcctgaaaacttgcgaaaggaaaagtttgcaaaactatacttggagtgttatgagtaa

SEQ ID NO: 99206 - DNA, 663 bp, Enterobacter aerogenes
atgccctgtctgtcccaggctgtactgcgtgatattgaagtcacagtcacgaagcgcgaactggccaccgccctgcaggaatatctggcgtcccttgaatttcgtcctgctgatgtagatgtcatagccgaacgagtgaaaatcgaaccggttcatgaccgactcggtaataaatacccgcttcagaccatgatgcccctggaatccccagccgtagaggccgtaatatccactgatgtgaatatcgatgctgttacggaagcaaactacatacgcgccgccggaagtgttcgggatacattcagctgctgcgttacggcagtgaatatcggtcacgccatacgagccgatcgccacgcgggactcgatatcgccagtcgcccagttatccatcaccagattttcaatgttgacctgcgagcgctcaacctgaatgttcacgaacttgcgaccgttgcctgcttcaaagaacgccgggggctcaaagttaagccaggcattttctttcggctggatccaggcttccgtgatggtgcccgccgggatatttttcaccagtacatcagaaaccgcgccattacgaccaatgcgggtgaagtcccggaaatggacctggttacggacgttcgttttatccccgccgcggtacagctcgacggatga

SEQ ID NO: 99207 - DNA, 153 bp, Enterobacter aerogenes
atgaaaatttcatttaggggaatggtgtggttgttaatattatttgcatgcgtagcattttggtttgttttacttaatattattgtcttttttataaaaacaatttggcatgattggtatatccctctactcaaccaattttatattccatga

SEQ ID NO: 99208 - DNA, 375 bp, Enterobacter aerogenes
atgcataaaatcgacagaccagctctggttcagcgcttccggcgtggccagcggcgagggattacgcaccggcagccgttgtttacccttacggcgaaaattcagcttcagcaaacagtaaatatggtggagccttttgtgattctattggtatccctgacgtcgcaggacctgataaagcttcgggaaaccgtatcgcggatatcgttcagccaccgcctgcaatgcggcaatgatgggttcatcacgcgtggtatccgggcggtaatggtaaaccgttctgctcaggttcagactccggcaggcctggcgaatactgagtccgcatgtcgttatcagatgagtgaccagctcacgcttaaaggctcgttttaa

SEQ ID NO: 99209 - DNA, 450 bp, Enterobacter aerogenes
gtgaagcaacaattccacctcattaacgaaagcgttaagcagaacgcaatcaacttcatccgcacattgccggttgaccagaagcggccgctgattctcgacatcaaagagatgactcgtacgctgcatcagaatcgcaagatgtggcccctccttaaagacctgtctgaccaggttacctggttcgggaacaaatacgattcagacgactggaaagacctcataacggcgatggtagctaaggccaaaaaacaagaacaacgaatggcgcccggacttgatggcggcgttgtgatgtttggtcagcgtaccagcaagatgaccgttcgccagatggtagaggtcattgaggctatttactggttcggaacactgcagggcgtcaagttcagcgagaaatctcgtctcgaaattgaatgggcaaaagagtggggtgagcagcatggctaa

SEQ ID NO: 99210 - DNA, 255 bp, Enterobacter aerogenes
atggtcatgaatatgaacgtttacaatactgagtctgtgatgctaaaggttgataatgggccagattcacttaatctattcggttttgcattggatagttttattgatattcatacggatatgttaaaggattatttgcaattagatagtgcaaatgccgaaactgttaacagagaatcctccatgacggataagaacattggcccatcgcttagtgctttgttgttttcggttacaggtttttatgacgagtga

SEQ ID NO: 99211 - DNA, 888 bp, Enterobacter aerogenes
atgttcataatgttttcagatgagttagtgttgcagcaaagacgtgatttattcaaaaataaatatgtcagatttgaaaatctattagtagatgaattccaggacatttcacctcaaatagctaattggttaagggcaatacataaagaaaatgcaattttaagtcgaaggcctacgataatggctattggtgatgattggcaatcaatatattcatggagaggcagttctcctgatattttcatgaatttttcagattttttccctgtgcataaatcattgggaaaacataagacagtttttatgatggaaaactatcgttcggatgctgcgattcttaatgatgctgaaaaaatgatggctttagttaaagggaaaatcataaaagaatctatatcatgccgaaaacctgatggtgatgagcatggtgtctattgttatgggtatgatgataaaaaagatgataattcatggaaaaataaagcaattcagctaatttatgaacaattaaatatggtaaaaaatcaaaaacataaagataaaactcatattatagttttgagtcgaactaataatacacttaaagaaataagagatctttatatagaaagatatggcagtattaaaggaataaattttttaacgatccataaagctaaaggtttgcagggggaagtatgtgtgatctttgatgatagcaaagctcatataggacacattttaagaaatgaagtttataaacagattccctacttcaaatatagttatgatcaagctatgatcgatgagtcatatcgtttggcatatgtagctataacacgagggataaaaagagtattctggtttgcaccaaaaggaagtgatggggcattctctcattttcggtaa

SEQ ID NO: 99212 - DNA, 705 bp, Enterobacter aerogenes
atgagttttgaagatatcagagaattcttttggccagttttagttgaactgaatagtgaagaaataagacaagatcaagaaaagctggataatgatatcttaattattaaaaatactgactggacaaatgaaagtgaactagcccttgatgaggcaaaaaaactcaatgaattagaaaatcaaagaagagtaggagctgagagtaaagctgcaatatatttaacagctattactgctcttgctcctgtattagtctcgttagttcccggtattattagtagtggtggaaataatgcctttgtggattttttgtcatttgcaatttttgtgtatgcactttctaatttgcttagagctgcattatgggcttttaataccttaaaagtttcagcttccaatagaatcgacacgatagatttagttagaatttgggggggagccggagatgcatacaaaaaaaatttaattgttgaaaatctttgtgctgttcgaaaaaatagagatggagtaaatcgtaaggtaacatgtattaaaatgacgcatgaacttctccttagaacatttcttgcatttgttttactcttattgttacaaacatcgatgtcatttattcctaatatcagcattgccaatcaggtctcttcaactacatgtaatgataaacaggatattgttcaacatcctgttaatatttatagaatatag

SEQ ID NO: 99213 - DNA, 450 bp, Enterobacter aerogenes; identical to SEQ ID NO: 91933

SEQ ID NO: 99214 - DNA, 924 bp, Enterobacter aerogenes
gtggcaaagcaaaagttcaaaatcaccaactggcccacctacaataaagccctcatcaaccgtggctccataactttctggctggatgatgaagctattcaggcctggtatgagtcagcaacaccttcttcacgaggcagacctcagcgctattctgaccttgccatcacgactgtgctggtcattaaacgcgtattcaggctgaccctgcgcgctgcgcagggctttattgattccattttttctctgatgaacgttccgctacgctgcccggattacagctgtgtcagcaggcgggcaaagtcggttaatgtcagtttcaaaacgcccacccggggtgaaatcgcacacctggtaattgattccaccgggctgaaggtcttcggtgaaggcgagtggaaagtcaaaaagcatggccaggaacgccgccgtatctggcgtaagctgcatctcgccgttgacagtaaaacacatgaaatcatctgcgctgacctgtcgctgaacaatgtgacggactcagaagccttcccgggtcttatccggcagactcacagaaaaatcagggcagcatcggcagacggcgcttacgacacccggctctgtcacgatgaactgcggcgtaagaaaatcagcgcgcttatccctccccgaaaaggtgcgggttactggcccggtgaatatgcagaccgtaaccgtgcagtggctaatcagcgaatgaccgggagtaatgcgcggtggaaatggacaacagattacaaccgtcgctcgatagcggaaacggcgatgtaccgggtaaaacagctgttcgggggttcactgacgctgcgtgactacgatggtcaggttgcggaggctatggccctggtacgagcgctgaacaaaatgacgaaagcaggtatgcctgaaagcgtgcgtattgcctga

SEQ ID NO: 99215 - DNA, 1251 bp, Enterobacter aerogenes
atgtcccttaccgacgcgaaaatccgcactctcaagccttctgataaaccctttaaagtctccgattcccacggtctgtatctgctggtcaagccgggtggctcacgtcactggtatctcaagtaccgtattaacggtaaagaatcccgcattgcgctgggtgcctatcctgccgtctccctctctgatgcgcgacagcagcgtgaaggtgtccgtaaaatgctggcgctgaatatcaacccggtacagcagcgggctgctgaacgtggcccacgaacaccggataaagtttttaaaaacgtggcgctggcgtggcataaaagtaaccggaaatggtcgcagaacaccgctgaccgtctgcttgccagcctgaacaatcacatctttccggttatcgggaacctgcctgtatcagaacttaaaccccgtcatttcattgacctgctgaaaaggatcgaggaaaaaggtctgctggaagttgcgtcccgcacgcggcagcacctgagtaacataatgcgccatgcggttcatcaggggttaatcgatacgaacccggcagcaaatcttggcggcgtgaccacacctcctgtcagacggcactatcctgccctgccactggagcggctgcctgaactgcttgaacgtattgaggcatatcatcagggccgcgaacttacccggcttgccgtcctgctgatgctgcatgtgttcattcgctccagtgaactgcgtttcgcccgctggttagagatagatttcacaaaccgggtctggacgatacccgcgacgcgagaacccattattggcgtgcgttattccgagcgcggggccaaaatgcgaatgccgcatatcgtccccctctcagaacatgtcatcgccattctgaaacagattaaagatatcaccggtaataatgaactggtcttccccggcgaccataacccgtataagccaatgtgtgaaaacacggtcaacaaggcattgcgggtgatgggctacgacacaaaaaaggatatctgtggccacggctttcgggcgatggcatgcagtgcgctgatggaatcgggtttatggtcaaaggacgcagtagaacgccagatgagtcatcaggagcgcaataccgtgcgcatggcttatattcacaaggcagaacatctggaagcccgcaaggcgatgatgcagtggtggtccgattatctggatatatgccgtgaagcctacgttccaccatatttccttatcagaaaataa

SEQ ID NO: 99216 - DNA, 624 bp, Enterobacter aerogenes
atgaccggtggccgacggcaggatatgcggcacgccaaccgcggagaccgtatccagcagccccataaactcgatactgatggggatactcagcagagtcgggccggccggaaccaccgtccccgccggcagcatatttgtcgcatcgagcggcattttagcgtcatcgagcagcgactccagcccgcgggcgaaggcgcgggcggtggcggccccccggcagtagccgtagacaaagagcttgattttggcgatgcgccgctgcgagcgctggatatacagccgcgtcggctgccgcggccactggttgaccacggcacccagatggtcgtcgcagaatttgtcaagcgcgcttttacggttgaacttctgggtcagccgcgagaagggccagacggtggccatactttgccgatatctggtcagttcgctgtctttgatcgcggttttgttcaccgcatagcagatgctgctgtaggttttaagcagcgcctgattgatacggtcctcaccgccgttggcaaacagctcgccgtccagcgagtagtgctcttcgcctatctccggaaagcgcgccccgcagccgggaaagtagtaacaaaagaaaccatcgttatcagctga

SEQ ID NO: 99217 - DNA, 180 bp, Enterobacter aerogenes
atgaggaacttgttcctgaacttgaagacccagatgaacttggtgagctgtatgtttttggataatagggagtgctgccaccatagtacccgccacctgatgatgaacggtgagaactatggctccgatgggagctatgactgcgatgccctgcaatgtagaatggaacttcggtgttaa

SEQ ID NO: 99218 - DNA, 1272 bp, Enterobacter aerogenes
atgaaggggatgcagaagataaagcgaggtaagaacttcgctggcgtagtgttttatgcattgaggccagcttcgcatcataaaactcccccatcagtaattggtggcaatatggatggaagcaatgccggagagttgattgcagaattcaatgcgactaaagcgcttcgcccggatcttgctaaacccgtctggcacaattcgcttcgcttgccgaaaaacgaagagctgacagatgctcagtggtcagaaattgctgatgattacatgtcccgaatgggcttctctgaaacgcacctcagatgctatgtcctccatgatgatgcggccggccagcacatccatatcatcgccagtcgcatcgaactcagttcggggaagctctacttaggtaaaaatgagaaccttatcagcacccgtatcatccaggatcttgaacaagactaccagctaacaagaaccaaaggaccgaaagcatctccagcagcgccctcacctaaaccgaagctcaaaaaatcccgtaatgagatgatgatagaaaagagaactggtgagctatgcccaaaaggaatcatccaaaacgcccttaacgaactgcttgataccaggcaatcgattaccgacttcgtgcaacagcttgtggcacaaaatatcaggccaatccctaacattgcctctactggacgcatgaacggcttctcattcgaatacaacgggattgctttcaaagcatctcaattgggaaaagggtattcctggtctgccttgcaaagcagaatcgactaccaacaggaacgtgataatgctttcctgtctaaactgaaatcatctgtcagagaaacatctgttagtgcaactcatgatatggtcataactatagatgctcctgaaaccacgacagaatacgttaaccgccccatagaagcacttatcctcgataaacgagctgctggtcaggacgaatactctatcgcttctgtcgaagcgcttctcccagaagctgttgcaactaacaaagaagcgatagcaaccgaaacgttaaaagtagcgcccaagcgaagctatagggcttcaacgttcagatggttagagaccatcccctatctcaataccatcattaccatcttcaaaaacctcaaaatcccaacccttaaacgccctcaaaaacacaaaaccatcactagcgtgagagtggtagagattacgcctctcccccaaaaaaatctcattgaatcagcacctcaatccagaagagcttcgctttcgatgtaa

SEQ ID NO: 99219 - DNA, 741 bp, Enterobacter aerogenes
atgattaagggatacagatatgtatctgttattcctaccttacgagggatgccattagacagcacagatatgtcattcatattcagccatgaagtgatgatttttcgggtgcaacaaaatctggcaaaatggtcttcacgaattatcaagcgtatctttgatatcgtaggctctttagccattataatactactatctccagtactgctttatatttgttttaaagtgaaaaaggatggcggtccagcaatttatggacatgagcgcataggtaaaggaggacggccgttcaaatgtttgaaattccgctcgatggtgactaattccaaagaggtgttggaagagttgctagcgacggatcttgctgcaaaacaagaatgggaccttacattcaaattaaaaaatgatccacgagtgaccaaaattggtggttttttacgtcgcaccagtttggatgagttgcctcagttgtttaatgtactgaagggagaaatgagtctggtgggacctcgtcctataatcactgctgaattggagcggtataatgatgaggttgattactatttgctcagcaagcctgggatgacaggactttggcaggttagtgggcgtagtgatgtagactatgaaacgagagtatattttgatgcctggtacgttaaaaattggtcaatgtggaatgacattgcaatattatttaaaactattgccgttgtgctcaaaaaagatggagcatattaa

SEQ ID NO: 99220 - DNA, 1065 bp, Enterobacter aerogenes
atgaagatccttgttaccggtggcgctggttttatcggttctgctgttgttcgtcatatcattgaaaatacccgggatgaagtccttgtcatggactgcctgacctatgccggtaacctcgagtctctggcgccggtagccggcaacgaacgctactctttcacccagaccgatattactgactcggctgctgttacggcgcagttcaatgccttccagccggatatcgtgatgcacctggcggccgagagccacgtcgaccgctctattgatggaccggccgcgtttatccagaccaacctgatcggtactttcacactgctcgaagccgcccgccagcattatatgtcgctttctgatgagcagaagcaggctttccgcttccatcacatttccaccgacgaagtgtatggcgatttgcatggcaccgatgatctgttcaccgaaacgactccttacgcgccaagcagtccgtattccgcctccaaggccgacagcgaccatctggtccgcgcctggaaccgtacctatggcctgccggtggtggtgactaactgctccaataactacggtccgtaccacttcccggaaaaactgatccccctgaccatcctcaacgccctggcgggtaaaccgctgccggtttacggcaacggcgagcagatccgcgactggttgtatgttgaggaccatgcgcgcgcgctctataaagtggcgacagaagggcggagtggcgaaacttacaatattggcggccacaacgaacgtaagaatatcgatgttgtccgcactatctgcgccattctggaccgcgtggtgacagagaaacccggcaatattaatcattttgctgaccttatcacgttcgttaccgaccgtccgggacatgacctgcgctatgccattgatgcggcgaaaatacaacgcgatctgggatgggtgccggaagagacctttgaaagcgggattgagaaaacggtccactggtatctgaacaaccagacctggtggcagcgcgtgctggatggctcctatgccggcgaacgtcttgggctgaataaataa

SEQ ID NO: 99221 - DNA, 558 bp, Enterobacter aerogenes; identical to SEQ ID NO: 98957

SEQ ID NO: 99222 - DNA, 339 bp, Enterobacter aerogenes
atggcaggttataagaatgtttatgctgcgaacgctaaagtacgacactcgcataattacactccaattgaagagtttaagcgatattttgatataggagttttccatacggatcaaccatggatacgtgataattttggtggtgcaggaggagaagggactaaatttattatttctgaattaaaatttctaattgctaatgttatctcatggttgccgctggcgatgatcaacaattttatgaaaatcgtaggttacaaattggggcaaaattataaaaaattacctaaggtgatcatcaaaaaatgtagcatgcataagcgattttggaaattttaa

SEQ ID NO: 99223 - DNA, 246 bp, Enterobacter aerogenes
atgcggaagttgtctaccatacgcactggcaacttcttcgtcatcgaaaacggaaataatctcttcgataaatccagattctggaatagcatcctgcgtcagaaatataacaacatcataatcatctatatactcttttactgccagatttcttgttccgccatgattaaaatcatcgcccgcaattgtcaaaatatcaaacccagcttcagaagccaaagatgctgtatcatccttgctacttga

SEQ ID NO: 99224 - DNA, 555 bp, Enterobacter aerogenes
atggggatattagtatttattgcaaatgaaagtgatagggtgacgcttattcatcagacggatggatggtttcttttacatctaatactggcggtttgttgcgttgcttggtattcaatgagacttagacattatttttacaggaaaacattctggtttgaattaaaagaaatcctacgaactttagtcatttttgcaattatcgaaatagcggtaatggcttttaccacctggtcattttctcgtttcttatgggttttgtcgtgggtatttattttaattttggtaccagtattaagaatgttaactaaacgagttcttgatacttttggtctttggcgcagagatacatgggttattggtaacggtgctaatgcagaagaggcatataaagcaatcaatagtgaacggaatctcgggctatcaatagtaggttttatctcaagctcccaatatgtaaaagataatgagtctatagatggaattcccgtattaccaaatagtattgcatggttaaatacaaaagatactaagctgtctcttatacacatctga

SEQ ID NO: 99225 - DNA, 429 bp, Enterobacter aerogenes
atggtgactaattccaaagaggtgttggaagagttgctagcgacggatcttgctgcaaaacaagaatgggaccttacattcaaattaaaaaatgatccacgagtgaccaaaattggtggttttttacgtcgcaccagtttggatgagttgcctcagttgtttaatgtactgaagggagaaatgagtctggtgggacctcgtcctataatcactgctgaattggagcggtataatgatgaggttgattactatttgctcagcaagcctgggatgacaggactttggcaggttagtgggcgtagtgatgtagactatgaaacgagagtatattttgatgcctggtacgttaaaaattggtcaatgtggaatgacattgcaatattatttaaaactattgccgttgtgctcaaaaaagatggagcatattaa

SEQ ID NO: 99226 - DNA, 168 bp, Enterobacter aerogenes
atgcagcatcagcaggacggcaaaccgggtcagttcacggccctgatgatatgcctcaatacgttcaagcagttcaggcagccgctccagtggcagggcaggatagtgccgtctgacaggaggtgtggtcacgccgccaagatttgctgccgggttcgtatcgattaa

SEQ ID NO: 99227 - DNA, 906 bp, Enterobacter aerogenes
gtgaagggtatgcagaagatcaagaggggtaagagcttcgctggtgttgttcgttatgcattgcagccaagagcacatcataaaagcgatccagtcgtaatcgggggcaatatgctgggtgactccgctcttgaactgattgctgaatttgatggcaccaaacagcttcggccagatgcccagaaaccggtatggcacaactcgcttcgcttaccagcaggtgaatcactaacgtctgaaaaatggtccagtttcgcagatgactatatgaaactaatgggattcagtgatactcacctccgttgctatgtcctacatgacgattctgccggtcagcacatacacattatcgcaagcaggatcgacctcaatggagggaaactctacttgggtaggaacgaaaacctcatcagcacccggatcatcggtgaactcgaaatcgctcatggtctgacagtgacaaaaacagccccttccattgcaccaaagcaaccgaagcggaaaagaatctctcgcaacgaacagatgctttcacaacggactggccttccctcctcaaaagaagctctccaacagatacttgataaaagtttggcagatacacctgaccttttaactttcacaaaacgactggaagaagcggaagtaacttggacagcgaatatcgcaagcacaggtaaaatgaacgggttctcattctcctaccgcgatatcgctttcaaggcatctaaacttggaaaggcatactcttgggtaaatcttcaaaagcagcttaactacaaccatgaccacttagaagctatacgaaccaacacaccaacaaaagaccaccctgctgttcctgctcccatgccaatacctgttcctgtttgccatggtgctggcgatcggcctgctggtggatga

SEQ ID NO: 99228 - DNA, 558 bp, Enterobacter aerogenes; identical to SEQ ID NO: 98957

SEQ ID NO: 99229 - DNA, 6873 bp, Enterobacter aerogenes
  misc_feature (6783)..(6792): n is a, c, g, or t
atggcaaataacatcattaaagggcgtaaaggtggcagctctaaacagcgtacgcccacggaacagccggacgatttacagtctgtagcaaaagccaaaattcttatcgcattaggtgagggtgaatttgcgggtggtttaaccgggaaagatatttatctcgatggcacccctctggagaatgccgacggttcgcaaagctttagcggcgtagcgtgggaattcaggccgggtacgcaggcacaaaattatattcagggtattcccggcactgaaaatgaaattagcgtagggacggaagtttccagcgagaccgcctggacccacacattcaccaatacccagctttctgccgttcgcgtccgcctgaaatggccatccctgatgaaacaggaagacgacggcgatgtggtggggaataccgttaaatacgccatcgatttacagacggatggcgaagcctggcagaccgtactggaaaccgcagcctccggcaaaacgacttccgggtatgaacgtagccaccgtatagatttaccgcaggcaggcagcacctggacgctgcgtcttcgcaaggtatcgccggacgcgaacagcgtcaaaatcggcgatgtcatgacgctacagagctacaccgaggttattgacgcgaaactgcgttacccacataccgctctgctgtacatcgaattcgactccagccagttcaatggttctatcccgcaaatctcctgcgacccgcgcgggcgtgttatccgtgtcccggataactacaacccggaaacgcgcgaatataccggcacatggacagggggcttcaaatgggcatggactgataacccggcatggatttattacgacattattgtctctgatcgtttcggtcttggcgatcgtctgaccagcgcgaatatctccaaatgggcgctttacccgattgcgcagtattgcgatcagctgatacccgatggcaggggcggtgatggtatggagcctcgccatacctgtaacgtttatgtccaggaacgcaacgacgcctacaccgtactacgcgatttcgctgctattttccggggtatgacctgctggagtggtgagcagattatcgtgcaggccgatatgccgcgtgatgtcgatttcaactatacgcgcgcaaatattatcggtagcccgcgctattccagcagcaccagtaaggcgcggtacaccaatgcgctagtttcatggtctgacccggataacgcctatgccgatgcgatggagcccgcatttatcccggaactggtttcccgttacagctttaatcaggtggaagtcacggccattggatgtacgcggcagagtgaagcccatcgtaaagggttatgggccattctgaccaacaacaaggaccgtatggtcgaaattgatgttggtctggacggcaggatcccacagcctggttacatcattggcctgggcgatgaacggctggccgggcgagttaatggtggtcgtatcagcgcggtgaatggacgcgtcatcacgctcgaccgtgatatcgatgcaaaagaaggcgaccgcctgcatctgaatctgccgtcgggtatctcgcaggctagggccatcctgtcggtgaatggccgccggcaggtaacggtcacgacgggatacagtgagacaccagaggcggagtgcgtctggatcgtcgaatataccgacctggtgccgcagcagtatcgcgttatcggtgtaaaggacaacaataacggcacgcttaccattaccggcgtggctcacgacccggataaatttgctcgtatcgataccggcgcaatcatcgaccagcgcccgattagtgttatcccgcctggcaaccaggctccgccagatggcatcctcctgacgtccttctccgtggtgaatcaggggatcagcgtcgaaaccctgcaggtcaattgggacgcggtacaaaacgctatcgcctatgaggctcagtggcgccgcaatgacggcaactggattaacgtgccgcgcagctcgaccacgtcatttgaggtcagcggcatttatgccggtcgctatctggtgcgagtccgtgcgatcaacgcggcggaaatttccagtggctgggcgtactcggaagagaagaccctgaccgggaaagtcggcgagccgctgccgccgctggcgctgacgaccgtttcactgaccgcaggtatcgaaattcgctgggaattccctgcaggcgcagaggatagccagcgaaccgaactgcagtacagcccggaccagagtggaaacggtgcgatgccgctgaccgatttagcgtatccgggcaaacagtatcaacagatgggcctgcagattgccacgcagttctggtaccgcgcgcgcctggttgaccgcctgggcaatgcctcgccgtggaccaactgggtgcatggaatgtccagcgataacgtttctgattattaccagcagctcgacgacgcgcttaaaggctcggatacatacgaggaactgaacaaaggcatccaggacaacagcgctgctgccgacgccgcgcaacaggctgcggacgccgcccagggaaccgctgaccaggcggcgaaggatgtcgccgcacagggggccattgtcacgcagcagggcaaggacctggccaccaacatcgccaaaactaacgacacgaccaacaagctggcgcaggaagtgaaagaccgcgctgcaggtgatgccgtcacggcgcagaaagcggccagcgatactgcggcggcggtggcgaaagccgaaacggacgatgccgccctggcgaagcaggccgccgataacctgctgagtgccaaacgcgaagttgaagcggcgattgagacgacgaacgtcaccatgcaggatggctttgacagcctggcgcagcagatggcgtcgatttcagccggtaccggggagcagttcgacagtctcaaaatctggtatttcgacaaggacaacgacgggtggagttctgacgacggcggcacgaaaccgctcccgacgaacgacgacgggtgggtccttcctgcggattccatttcgaccatgcgcagcccgtcgggcgctggcacgctgattgacggcagcgcctataagtacctccgcctgcgcatcaagaaagtcggcaacccggcctggggcggtcggctgtactggattggcgctgatgaaaccggctggaccgatggacgccgcctggtgctgccagcaccggattttgacccggccaccggcatcagcactatcgcgatcccggatatcccgtggcaggcctccggcaccatccgccgcctgcgtctcgacttctcacagggtggagcggctgacgccgataactattatgccgttgactggctggccgttgggcgcccgactcctggcgcatcgcaggcgcagattcaggacctgaaaacggcgatgactgctgccgactcagctgaggcgatggagcgtaaccaactggcggtgcagctgcgcggcaacgaggaagggacagacccgaataaactggtttctggcctgcttttcgaagagcggaaaatccgcgtgacggcggagaaggccatcggctcccgcgttgatacgttgcgcgtcgattatgataaatccactgcagcggcgacccagcgcatggatacgctggcgagcgacctgcagtcgactgcctcgaaaacggatcaggttgcagcggaccttgtttcagcgaacggcgtcattgctggccatacgctggccatccagaaaatcgagggtgacgtccagactatcgacggcaaagttcaggccaacgccagccagattgccggggtggaatcgaaggtcgataacatccgaatcggcggcgtaaacctgatacccaactccggggaactgaccggcaaatcgccatctacaaccgaacgttaccggggtaacgcggttcgcatcctgacgcgtgccgccggagcgactgattttgccgtcctcgactacacgctggccgcgccggttgacggtaccgagtatgttctgtcgttctatgcgaaagcgaagacggacaagacgccggttcgttgtttcctgaatacgccggatgccactatccgcgctgaaaccagccagggcgttattgtggagcgtccagccgggtataacggcgatgtgaccgtgacgctctccacgtcctggagccgctattgggttaaatacaaacgcaaacctggcttgtccgggacggcgtatctcgttgtggccagactcgacggcgcagctgcagcgcgcgaagcgtggatcagctctccgatgtttgaatccggcaatattgtgagcgactggagccaggcaccggcagacagcgccagctcggatgctgtccagcaactgacgacccgcgtcacgactgccgagaatacgctggccaccacggcgcagcagacgacggcgctcaagtcacagattacgaccggcaacctcctgctgaatggcgacctgattaataaagcggataactggcagctgtccggcaccggcgcgggtgctccggtctatgacgcggtgatgaaaggtctcaccacgaccgagccggcgatgcgaatcgccaacggaacaaaaatcccggtcgaagccggtcaggtactgacgctcaccttcggattcaagacggacgacgcgacgatcagtatcgggacccagaattttacgatgggcctgattgagaattgggggaacccgaccgcatggcttactcaggacaacaactggtttgcaggcatcaccaccggctaccagacccgcacgctgacgttcacgatcccgaatgacttcaaagggaggtggtgttacctgcgcatggcctgcggaggatggacgccgtcgaccgctcgtgtttacctgcagggcttcatgctgaccgcctcaaacggtatcgctggtaaagccgatgcatcagcggtgcaggacctgcagtcgcaggtcacgaagaacggtgacgacattgccaccaacgccagcgcgatcaccagcctgagtgggcgtattgataccaccaatgccgaggtggcgaagaaagccaccaccgccgcgctggatagcctgaagtccaccgtcacgcagcagggtaaggatattgctgcgaacgttgctgcgacgacgagcctgtcagcagatctttctgcgatgaagcatgacgcagacaacaagctggccggaaacctaatcccgaatggtgggtttgagcgtggctttgataattgggttacaggttcaacgaccgatgttcgtgtggatacggcccaacaacccagctcaggtaaaaaaattctttacttcaaagctcataacgaccagctggatgaggtacgcaataccacgaccgtgacggtcgttgctggtcggacttataggtttggaggattcgcacgagcgaaagacgggacggctatcgttactggctccgaacaaagcaacaaattccggtttgcgtttaatgacaattcgcagattcaggaagcccgtattgacccaacaaaactgcagactggttccgtctggacagaagtatttgctaagtggaaggcgaataaatcgggcgttatgcagatgagcgttatggctcgccttgcctccggggagctctatatcgatgacatgttcgtcattgatattaccgaccaggaaaatattaatgcgaacgcgacagcgttgaccaacctgcagacaaccgtctcccagcagggcgatacgattaccagtcagggtaaatcgctaacgcaactgaccggcagaatcgataccgttaacacagacctggggaaacgaatcgaccagaaggccgatagctcgacagtacaggacctcagcgccaccgttaccaagcagggcaaggatattacggcggcgaaccaggccataaccagcctgaaaggacgcgtagcgacggttgaggaagggctggccaaagcggccaccgccgatgccgtgagcaagcttgatacgcgcgtcaccagtgctgagggtaaaattgaatcgcagggaacggcgatcaccgggattaatgttgctctgaattcgcagacggcagcgggtggcgactacatcctgaacccgacatttgaccccgcatatccatcgatgggttttacccgtcgggatacggtagacagcaacgacgatgatggtattccgtatgatgctgacatcccggcaggcgctccgcgtcgctatgtagcgcgactggcctcacgcgatcaccagctcaatacgccaccgtggccggtaaaagcgggacaggtattcgagatttcggtctgggtagcggcaaaggcaggttccaacgccgcatttaacatgtacatcggctcggctacgggaccgaatacgggtgccgtggcttatgctgctttaccgggtagcgttgcgcccactcagacctggacggagaaaaaataccgctggacggtcccggctaacttcccgcgcggatatatgcgcccattcctgcaggtgaaccagaacgcgccgtttggctccgtctggtatgcaactgatttccactgccgggagatcaccgccgcgcagggcgcacagactgccgccgacgctgccgccggtgctgtcacccagttggatgcgaaagtgacgcagcagggcaacactatcaccagccagggccaggctattacagccattacaggtcgagtgtcgaaccttgaatccgggcagagcgcgaacagcagcgcaattcagtccctgacgcaacgaaccacggcagcggaagggaaaattgaaacnnnnnnnnnngaacagccaggcgatcacctccgtcaccggcgcggtgaatgcgatgttcaatcgcggcgagaacctggcaaacgattttaa

SEQ ID NO: 99230 - DNA, 525 bp, Enterobacter aerogenes
gtggtggtgaccaactgctccaataactacggtccgtaccacttcccggaaaaactgatccccctgaccatcctcaacgccctggcgggtaaaccgctgccggtttacggcaacggcgagcagatccgcgactggttgtatgttgaggaccatgcgcgcgcgctctataaagtggcgacagaagggcggagtggcgaaacttacaatattggcggccacaacgaacgtaagaatatcgatgttgtccgcactatctgcgccattctggaccgcgtggtgacagagaaacccggcaatattaatcattttgctgaccttatcacgttcgttaccgaccgtccgggacatgacctgcgctatgccattgatgcggcgaaaatacaacgcgatctgggatgggtgccggaagagacctttgaaagcgggattgagaaaacggtccactggtatctgaacaaccagacctggtggcagcgcgtgctggatggctcctatgccggcgaacgtcttgggctgaataaataa

SEQ ID NO: 99231 - DNA, 669 bp, Enterobacter aerogenes; identical to SEQ ID NO: 96518

SEQ ID NO: 99232 - DNA, 1053 bp, Enterobacter aerogenes; identical to SEQ ID NO: 96727

SEQ ID NO: 99233 - DNA, 3006 bp, Enterobacter aerogenes
atgcccgttgactttctgaccactgagcagactgaaagctatggcagattcaccggtgaaccggatgagcttcagctggcacgatattttcaccttgatgaagcagacaaggaatttatcggaaaaagcagaggtgatcacaaccgtctgggcattgccctgcaaattggatgtgtccgttttctgggcaccttcctcaccgatatgaatcatattccttccggcgtccggcattttaccgccagacagctcgggattcgtgatatcaccgttcttgcagaatacggtcagagggaaaatacccgccgtgagcatgcagcgctgatacgtcagcactatcagtatcgtgaatttgcctggccctggacatttcgccttacccgtcttttatatacccggagctggataagcaacgaacgtcctggcctgcttttcgatctggcgacagggtggcttatgcaacatcgtattattctccccggagccactacgctgacccggttgatttcagaggtaagggaaaaggcgacgttgcgcctgtggaacaaactggcactgataccgtcagccgaacagcgttcacagctggagatgctgctggggccaactgattgcagccgcctgtctttactggaatcactgaaaaagggccctgtgaccatcagtggtccggcgtttaatgaagcaattgaacgctggaaaactctgaacgattttggcctgcatgctgaaaacctgagtacactcccggctgtgcgcctgaaaaatctcgcacgttatgctggtatgacttcggtgttcaatattgccaggatgtcaccgcagaaaaggatggcggttctggttgcctttgtccttgcatgggaaacgctggcgctggatgatgcattggacgttctggacgccatgctggccgttatcatccgtgacgccagaaagattgggcagaaaaaacggctccgctcgctgaaggatctggataaatctgcattggcgctcgccagcgcatgttcgtacctgctgaaagaagaaacaccggacgaatcgattcgtgctgaggtgttcagctacatcccaaggcaaaagctggctgaaatcatcacgcttgtccgtgaaattgcccggccctcagacgataattttcatgaagaaatggtggagcagtacgggcgcgttcgtcgtttcctgccccatctgctgaataccgttaaattttcatccgcacctgccggggttaccactctgaatgcctgtgactacctcagccgggagttcagctcacggcggcagttttttgacgacgcaccaacggaaattatcagtcggtcatggaaacggctggtgattaacaaggaaaaacatatcacccgcaggggatacacgctctgctttctcagtaaactgcaggatagtctgaggcggagggatgtctacgttaccggcagtaaccggtggggagatcctcgtgcaagattactacagggtgctgactggcaggcaaaccggattaaggtttatcgttctttggggcacccgacagacccgcaggaagcaataaaatctctgggtcatcagcttgatagtcgttacagacaggttgctgcacgtctttgcgaaaatgaggctgtcgaactcgatgtttctggcccgaagccccggttgacaatttctcccctcgccagtcttgatgagccggacagtctgaaacgactgagcaaaatgatcagtgatctactccctccggtggatttaacggagttgctgctcgaaattaacgcccataccggatttgctgatgagtttttccatgctagtgaagccagtgccagagttgatgatctgcccgtcagcatcagcgccgtgctgatggctgaagcctgcaatatcggtctggaaccactgatcagatcaaatgttcctgcactgacccgacaccggctgaactggacaaaagcgaactatctgcgggctgaaactatcaccagcgctaatgccagactggttgattttcaggcaacgctgccactggcacagatatggggtggaggagaagtggcatctgcagatggaatgcgctttgttacgccagtcagaacaatcaatgccggaccgaaccgcaaatactttggtaataacagagggatcacctggtacaactttgtgtccgatcagtattccggctttcatggcatcgttataccggggacgctgagggactctatctttgtgctggaaggtcttctggaacaggagaccgggctgaatccaaccgaaattatgaccgatacagcaggtgccagcgaacttgtctttggccttttctggctgctgggataccagttttctccacgcctggctgatgccggtgcttcggttttctggcgaatggaccatgatgccgactatggcgtgctgaatgatattgccagagggcaatcagatccccgaaaaatagtccttcagtgggacgaaatgatccggaccgctggctccctgaagctgggcaaagtacaggcttcagtgctggtccgttcattgctgaaaagtgaacgtccttccggactgactcaggcaatcattgaagtggggcgcatcaacaaaacgctgtatctgcttaattatattgatgatgaagattaccgccggcgcattctgacccagcttaatcggggagaaagtcgccatgccgttgccagagccatctgtcacggtcaaaaaggtgagataagaaaacgatataccgacggtcaggaagatcaactgggcgcactggggctggtcactaacgccgtcgtgttatggaacactatttatatgcaggcagccctggatcatctccgggcgcagggtgaaacactgaatgatgaagatatcgcacgcctctccccgctttgccacggacatatcaatatgctcggccattattccttcacgctggcagaactggtgaccaaaggacatctgagaccattaaaagaggcgtcagaggcagaaaacgttgcttaa

SEQ ID NO: 99234 - DNA, 861 bp, Enterobacter aerogenes; identical to SEQ ID NO: 49032

SEQ ID NO: 99235 - DNA, 543 bp, Enterobacter aerogenes; identical to SEQ ID NO: 8085

SEQ ID NO: 99236 - DNA, 192 bp, Enterobacter aerogenes
gtggtcatcggcttcatcggagtgcttctcgtggtcaagccgggctatctgccgttccaattgggtcatttggctgccatcggcaccgggctggccacggacgcggcaatcatcatcctcaggcgcgtcggcggaaaggtgaagaccaccagcatgctgggcatcagtgcccggcgcttgcagcgcggctga

SEQ ID NO: 99237 - DNA, 186 bp, Enterobacter aerogenes; identical to SEQ ID NO: 28362

SEQ ID NO: 99238 - DNA, 552 bp, Enterobacter aerogenes; identical to SEQ ID NO: 28363

SEQ ID NO: 99239 - DNA, 390 bp, Enterobacter aerogenes; identical to SEQ ID NO: 28364

SEQ ID NO: 99240 - DNA, 351 bp, Enterobacter aerogenes; identical to SEQ ID NO: 28365

SEQ ID NO: 99241 - DNA, 348 bp, Enterobacter aerogenes; identical to SEQ ID NO: 6026

SEQ ID NO: 99242 - DNA, 498 bp, Enterobacter aerogenes; identical to SEQ ID NO: 16552

SEQ ID NO: 99243 - DNA, 315 bp, Enterobacter aerogenes
gtgtcatacgaacctccaagagacggttacacaaacgggtacattgttgatgtcatgtatgacaatcgcccaagtaagtatccagctgtgttcagaacgtacgtccgaattccagactatgtcgaactagataacgcggaggagctggccgacgcaatcattcgagaggttgagttaaaggaggcatggctcacaagggtcttggggaactcagccgatcctgacgcttctgtgggcaagtgggaccggcgcctagcgcagtgcggtggtattgatgagatgtcaagtggggtgcaggggcactgttgcaaatag

SEQ ID NO: 99244 - DNA, 1260 bp, Enterobacter aerogenes
atgggcgtcacccagttctaccagggcgtggagaccgtacggtcgctgaccagccttgcgatccttaccggcaacctcggcaagccgagcgtcggcgtcaacccggtgcgcgggcagaacaacgtccagggcgcctgcgacatgggcgcactgccggatacctatccgggctaccagtacgttaagttcccggaaaaccgcgagaagtttgccagagcctggggcgtcgacagcctgccggaacataccggttatcgcatcagcgagctgccgcaccgcgccgaacacggcgaagtccgcgcggcgtacattatgggcgaggatccgctgcagaccgatgccgagctttccgcggtgcgcaaggcgtttgaacagctggaactggttatcgtccaggatattttcatgaccaaaaccgccgccgcggccgacgtcatcctgccgtccacctcgtggggcgagcacgaaggcgtgtataccgcagcggaccgcggcttccagcgcttctttaaagcggtggagccgaagtgggacctgaaaaccgactggcagattatcagcgaaatcgccacccggatgggctatccgatgcactacaacaacacccaggagatctgggatgagttgcggcatctgtgcccggacttctacggcgccacctatgaaaaaatgggcgagctcggctatgtcatgtggccatgccgcgatgagtccgacgccgaccaggggacgtcgtatctgtttaaagagaagttctctacgccgagcggtaaagcccagttcttcacctgcgactgggtcgcgccgggagataaactctctgcacagtatccgttggtgctgtcgacggtgcgcgaagtcggccattactcgtgccgttcgatgaccggcaactgcgcggccttaaccaggcttgccgatgaaccaggctatgcgcaaatcaacaccgccgacgccgaacggttaggtatcgaggatgacgcgctggtgtgggtcaattcgcgtaagggccgcatcatcacccgcgcgcaggtcagcgatcggccgaataaaggcgcggtgtacatgacctaccagtggtggatcggcgcctgtaacgagctggtgtcagagaacctgagcccgataaccaaaacgccggagtacaagtactgcgcggttaacgttgaacggattgccgatcagcgcgcggcggagcagtacgtgatcgaggagtacaacaagctgaaagcccgcctgcgcgaaagcgcgatgggttaa

SEQ ID NO: 99245 - DNA, 705 bp, Enterobacter aerogenes; identical to SEQ ID NO: 8686

SEQ ID NO: 99246 - DNA, 201 bp, Enterobacter aerogenes
atggcaaagcaaaactggtttttttcatggaatgcatatgatgcaattacggggcaataccttcctgagtattcccatagcgaaacttacgttagtgacaactcgatatcccctcatgaagtatttgaagatttgatggagcagaaaggtaggttgcgcgaaaacctcagaattcactgcattgcattcaataagctttaa

SEQ ID NO: 99247 - DNA, 519 bp, Enterobacter aerogenes
atgactgagcatgaccttgcgatgctctatgagtggctaaatcgatctcatatcgtcgagtggtggggcggagaagaagcacgcccgacacttgctgacgtacaggaacagtacttgccaagcgttttagcgcaagagtccgtcactccatacattgcaatgctgaatggagagccgattgggtatgcccagtcgtacgttgctcttggaagcggggacggatggtgggaagaagaaaccgatccaggagtacgcggaatagaccagttactggcgaatgcatcacaactgggcaaaggcttgggaaccaagctggttcgagctctggttgagttgctgttcaatgatcccgaggtcaccaagatccaaacggacccgtcgccgagcaacttgcgagcgatccgatgctacgagaaagcggggtttgagaggcaaggtaccgtaaccaccccagatggtccagccgtgtacatggttcaaacacgccaggcattcgagcgaacacgcagtgttgcctaa

SEQ ID NO: 99248 - DNA, 669 bp, Enterobacter aerogenes; identical to SEQ ID NO: 96518

SEQ ID NO: 99249 - DNA, 858 bp, Enterobacter aerogenes; identical to SEQ ID NO: 74968

SEQ ID NO: 99250 - DNA, 348 bp, Enterobacter aerogenes; identical to SEQ ID NO: 6026

SEQ ID NO: 99251 - DNA, 1050 bp, Enterobacter aerogenes; identical to SEQ ID NO: 96519

SEQ ID NO: 99252 - DNA, 126 bp, Enterobacter aerogenes
atgaatactacttttcccagtaaagtcctcggcgatatgcgcgttactgccgtaagcgatggctatttgcaggtaggttttggcctgttaaccaaaattgatgaagacgagggctttgttgaataa

SEQ ID NO: 99253 - DNA, 729 bp, Enterobacter aerogenes
atgcgtgatctgatccttcaactcagcaaaagttcgatttattcaacaaagccgatccctgtagcaaaaacgcagattgcgcagtttgaagatcaaaaggcattagtggttgagcgtttcgaaagaagatggtcaggcgatcggcaatggatcattcgtttgccccaagaggatatgtgtcaggctttaggtgtttctccgttacgaaaataccagtctgatggtgggccgggtatttccgatattatggacatattgagtcattcagatcaggctgagcaggacaaagagcagttcttcagggcgcaaattattttctggttgttggctgctactgacggccatgccaaaaatttcagtatcgctattgagccacaaagtcattaccaccttacgcctctttacgatgttttatcagcatggccggtaattggtcatggtaataatcagatttcctggcagagatgcaaactggcaatggctgttcgcggtagcagtaattattaccacatttatagaattcaacggcggcattggatcaatcatggtgaattaaccggattgggaaggcgacaagttgagtccatgatggatgacattatatccagcacgccagaagtcattgagcgtgtatctatgttgcttccagagtcgtttccacctgagcttgctgagtgtatttttgaaggtatgcggcagcagtgtaggcgtttggctggaagggaataa

SEQ ID NO: 99254 - DNA, 570 bp, Enterobacter aerogenes
atggatacggggaagttgaacagcagttttggtcgtattcatgcctgctaccagaagctgcagttaaatgcgcatctcccacacgtcatcgcctgtagcgaaaacgtcgagtgcgccgccggcgagcgttttcatccgcaggatgggttcatttactttctgctgtccgggcaaatcaccctcgcagtcaacgaccctgataacctgttggggattgtgatcgagcatatgccgctgggcctgcttgagcactactgtccggcggtagagctgctatatcaatgtctcgatcgctgccgttttgccagaatcagcgtggaggatttcgagcgtatcttcttttactcttcgccggagtatatgaaagagctgacgactattctggcctacatgggcatttttgctcttgatgcgcacaacgagcgcggcaacctgtccggttttcagaccataaaatcgatgctatcgcgttatctgtaccgtaacgagatcgattgtggaaaacgtgaaagcctgtccgcttttattattaaacggaccaatctttcggtgatgctgccaacttactga

SEQ ID NO: 99255 - DNA, 492 bp, Enterobacter aerogenes
atgcaaaatggcgaagtggtgcaaattggcacccctgacgaaattctgaataacccggcgaatgattacgttcgtactttcttccgcggcgtcgatattagccaggtatttagcgctaaagatattgcccgccgtagcccggttggcctgattcgtaaaactcccggtttcggcccgcgttcggcgctgaaattattgcaggatgaagaccgtgaatatggctacgtcattgaacgcggtaataagtttgtcggcattgtctccatcgactctctgaaaagcgcgctgagcgaaaatcaggggctcgatgcggcgttaattgactccccgcaggcggtggaggcacaaacgccgctcagcgacctgctctcccacgttggccaggcgccgtgcgccgtcccggtggtggatgaaggacaccagtatctcggcattatttcaaaacgcatgctgctacaggctttagatcgcgagggggcaaacaatggctga

SEQ ID NO: 99256 - DNA, 339 bp, Enterobacter aerogenes
atgatgagccacgtcccgctgtcgccgtttattatcgcctggctgattaccgctattattcgtattcttaccggccagggcgccgttgcggcaattacttcagcagggattgtttcgccgatggttaccgcatttcatcttaatccagcgctgatgtgcctggcggtggcctgtggtagcaataccattactttgatgtatgacggcggctttttactctttaaggaaacgtttggtatctcgatgcgtgatacctttaagacctggggcttactggagctcatcaactcggtggtgggtctgttgatggtgttattactgagtctgtttatttcctga

SEQ ID NO: 99257 - DNA, 522 bp, Enterobacter aerogenes
atgtcagctaaagatgattttaaaaagagagtacagcaaggcagcgttaacagggaaaatctggagaataaagttaaaagtgatattcagtttttccgtgcacgtctttatgagttggttaaggaaattgaagggtggctacacaacacaggtgtaaagactgacgtcatcgatgccccttatacagatgaaagcatagattcattaccagaagtgaaacatctcagtaattacaaagcaagttttgtcacaattaataatggcatgaaatccgcttcgctagtccctttgggggtctatggtggcgacgccagtggttggtgtcggttattagttcaaaagtcatctgacgtagaaaaatttcttttaaagctgaaaaaagatgatcatacctggaccattaagcgcgaggtcgatttgtcaacaataagctatctagccgcacatcgaccaatgacctcaccggaacaagagctcacagaggatacttttttccaagccatcgcagacattgcagattaa

SEQ ID NO: 99258 - DNA, 372 bp, Enterobacter aerogenes
atgacttctaaaaatgtagcaaatgtaggttcaattgtcactgataaaaccattgacagccagtcactgcttgaaatggtaaatcaggcgcgtaagcaatgcggtgaaaaagaggttcgtaacaatgtcttcatggatcgcattaaagacgagcttgagggggagttttacaagatttttgtaaaaccctctggcggtatcggaggtcgcccggtagaggtggcagagatgagtaaggttaactatccatgcagatggaatgcgacaatgcagacatttttccgactggctattcgaaaatcagcgagccagatttttacaaatcttggtgtgaatgcccttaaccaccagcccacaaatgggatcaactag

SEQ ID NO: 99259 - DNA, 552 bp, Enterobacter aerogenes
atgccgaaaaagtgtcaacctgaggcgcgggctcgccgagataaaattacttttacttactttgtcaaaggagggggtatggcaaagctaccagcagagattaaagcctttatagtgcaggctctggcgtgttttgagccaccgtcaagggttgttgaaatggtaaaagttgaatttggtataaccataactcgccagcgtgtttctgcttatgaaccatcaaacgcaatggcaaggagccttagctctaagtgggtggttctctttaatacgacaagagataaattccaagaggaaaccgccgatattgcaatttctcataaggcataccgtttgcgtgttctcgatcgcatggcttcgagtgcggaaaggatgaataactacggtatgacagcccagcttttggaacaggccgctaaagaggttggcggggcttatacaaacagagttaaagttgaaaaaacaaggaaggagggcggaattatcaaagaggaagcaatcagtttatctccccagcaggaatccgaaaaatataagaatttccttgggtga

SEQ ID NO: 99260 - DNA, 516 bp, Enterobacter aerogenes
atgctcatgagcaaatcagaatatgccaggcatcgaggcgttagccgtcaaacggtttacgattgggtggcgaaaggtgaggttgtattatcaggcaataaaatcgacgtagagaccacggaacgcaaaatgcagaacgaacagaaaggccagggcgaacacgttccccgcaaactggaaatgacgtgggggcagtgctgggaggcggtcaaggcgttagacggaaaagccccggagcctcgcagcgatgaagatataaagcagcgggtacagcttgcggccggcgaacttggttgggatgttgaatttctggaaggcaatgggatttttatgtgtgatggtgacactgaattctacctaacgcagtacgaccagcttattcaaaatgcagatgtggccatcgggcttatccggcgtgacctctgttatgcagcttgcgattgccctgatgatgaggacgaatggagcaaagaaggactggcagcactcgcagaatggaaaacgggcaatgtgtaa

SEQ ID NO: 99261 - DNA, 669 bp, Enterobacter aerogenes
atggctaccccgactcaaaatagtgattttttcaactggattgcagacggtaagtcctgtgttgctcatcatgaagctggccacgccgttgcaaattggtgttcttgtttaaacatacggcatgtcagcatcatgaatgagaatggctacataaacgacgagcactacaatgaagctaagtgtttaggggttgtgtgcagcgaatttagaagcggttacaatctgaatagattgctggaaagtaagtcaggggtagtaaatagagatggtagtattacgccttttattgaactttactcaaaagaaattaaaatttacgccaagagggaaatgcttatatcgcttgctggtcctataagcgaggttgcatatggaggtggtgatatattcagtaaatcatgttcattcagcaaaaaaacaaagggctcagaccgagagatagttgaagaaatgcttgatctatattgtgcaacaaatacaaaggcaagcagagttggtgtcttaaatgaaatggtgaaagaaacagagttattcgtcatgcggcattggcgggaaattcaaaagatagctaaaattcttgagcgtgattatgttattaaaggcgaatgtgttaactcaattataggcattaatctaactgatggagtgactccactattccaagactaa

SEQ ID NO: 99262 - DNA, 558 bp, Enterobacter aerogenes
atgccaaacctactgcaattcagtgctaccccatctggaaaaggcgttgcaatttccgccagctacgatgacggcgctaccatctcgttttctaccgatgaacaatccgcaaactttatgacctccattgttcaggcgcttgctgctgctaataagagggttattgctgctgagaatcgcgcagcagctgagcggcgcacagcagaccgcaaatacaagcgcactggcgatagttatgaaagtggcaacatgccaacaacctgcgacgctgaattcatgcggctggtgcgtgctgtatgtcctaagtacaacgagaacacaaaggatgatgatcctcgcctcgttgctcttgatgtactacgctacgcccccgctgaagccttttcagcagcctattcccgtccaatgtcagagattcagttaagcgaagctatagacgtactggcgcaggttggagattacatgaaagcaaacaacatcgagccaaaaccgtacaccacctttgattcaataatggctattggtgacgcggctaaaaaggcgtggggggggaaataa

SEQ ID NO: 99263 - DNA, 2343 bp, Enterobacter aerogenes
gtgaaagatgattttattaatgaggtcaggcataaagccaacggctattggccctcaatcatgcagcgcctgaatattcccacaaacaggagtgagggtccgtgtccggcgtgtggcggaaatacccgctaccggttcgacaataaagataaccggggaacatatttctgttcgcactgtggagccggcacagggctggatctggtgatgaaggtcaatcagtgcggtgcgagagaagcggctaatctggtggcggaggcaatggcgctaccgttgccggaaccgaagccagccagagagagaactcaaacggatatcgccgggaaagtggctgcaatgaccgccaaagccttgccgggacaatctgcatatctcacatcaaaggggcttacatgccccttcccgttgctgcctgatggatcacttgtgctggtgctaaaaaacgccgcaggcgcaacgacaggcgcacaggtgattaaacctgacggctctaagcggctggtggccggaacggtgaagaaaggtgcttgctatgtggtcaactctattgaatcgccggaaacggtcattattgccgaagggctggcaacggcgctatccgttcaccagatgcaccccgaagcgctggcggtggtcgcagtggacgccggaaacctgctttcggtcgcacagcttatgcgccaaaagcaccctaacgcgcggatcatcattgccgcagacaatgaccagagcgccgaaagtgacagaagaggaggagtgaaaattaacacaggtaaggagtgcgcggagaaagccgcaaaagccgttgctggctgggcctcgctgccacccgtggactacaaagcggactggaacgattaccaccaacaatatggactggaagccgctacagcagcatttaacgattcgatgtatcagccggagggagaaagcgtgggcgcaaaactaaaagtagttgatggcggcaaacagtccgggcgcggtgatatcaaccttattcagatggctgacaatgaaaaggcgctgatgttagcggatcggtacgagggtattgccattcacgcagagagtgaggcggtttatctttaccgcgagggggtatgggttaaggctgcacccttagagttaagtcgtgaaatggtggctatctacaacgaaaaccatactaatttcagcaaacgttctgtaaataacgtcattgaggcgttaaaaattgtcattccggttatgggagagcctcgccgcagccttatcccgttcaaaaatggcgtgtacgacatggaaacaggagttttttctgagcattcgttagccaactggctcaccaacgataacggcgtgatctatacgcaaccggagcctggcgaaaaccttcatgaccatgcgccaaactttcataaatggctaagttacacagcaggaagagacgcacttaagatgcagcgtatcgccgctggcctgtttatggttctggcaaaccgctacgactggcagctttttcttgaaataaccggcgagggcggcagcggcaaaagtgtattcactcacatcgctaccatgctggctggcgaacacaacacggccagcggaaatatggcggctctggacagcgccagaggccgggcgcagttcgtaggcaaaagcatgataaccctaccagaccagcccaaatattcaggcgaaggaacagggattaaagcgattacgggcggtgacgccgtagagattgacccgaagcacgaacaccagtacacctccgttctgagggccgttgtggtcgccacgaacaacactccgatgattttcacggaacgggccggaggcgttgcccgtcgcagggttatttttcagttcaataaccgggtaagggaggaagacaaagaccctgatttgtcggaaaagatatccgcagaaattccggttatcgtccgccgtcttttggctaacttttccgatcctgaaaaagcaagaatgctcttgctggatcagcggaacagtgaggaagcgctggaggttaaacagaaaacagacccgctttatgctttctgttcctaccttgaaaagctgtcagagtgtacgggaatgctggtgggaaaccgtaatccgccgctctatccgagagtgtatctctatcacgcctatctggcctttctggaggctaacgggttcgataagccgctaaccctgaataaatttgctgagggcatggaaagtgcaatgcgggagtttaaccacgaatacaggaaggagagaaagacgcgaggtgtagtaaccaatgttgagctttcaggcagtgcggaggactggcttccgcagccttaccctaatcccgctaagaagtag

SEQ ID NO: 99264 - DNA, 219 bp, Enterobacter aerogenes
atggtgaaaattagttctggcttaattgccagcggcaaaactcatcctgaaattgtgccgggcgataaatgggaagataaaagcggaataccaataaatattgaaagttaccgattcaacagagtgacattttatagagagggctataaatcgccgtgtatttaccctgaacaacgattcgttaaagaattccagccagtgcgggaggttaagccgtga

SEQ ID NO: 99265 - DNA, 219 bp, Enterobacter aerogenes
atgaatagaaagcccaatgaaagagatgttttagaggttatcactgatgttgagcatgctattggttatacccggcaggggctggccgttcttgatctatggcttgatagcatgggtattgaagacgataccgaagtgaaccgtatcgcagcagttcacagccttgtgcatgagtccctgacctaccttaaaaaggccgccggcatcaacgaggagtaa

SEQ ID NO: 99266 - DNA, 264 bp, Enterobacter aerogenes
atgaacataaataccatctaccgccacccggcagagctggaagccgaagcgatgctatctcgtaaagaagcatacccggatgattttacgctggcagaccgaacagcagagcgcatggccagagttcacaatgggctggctcacgttatgaccgatttattaccactcctcgaagttgagcaagcagtcatcgtgtattgctggctggataaagtcctggcgattgtcgacatagcccgaattgatgcggaggccaactcatga

SEQ ID NO: 99267 - DNA, 180 bp, Enterobacter aerogenes
atgcgtaaaaccttccagattgacggatacgctgttaacaggcgcgggcatacggtagggattcactacaccatgaccagcactagcccagaaacagctaaatctactgcgcaactactggcgcagaagggcagctataaacacgttcgcattacccgcattcgtgaggtggcagcatga

SEQ ID NO: 99268 - DNA, 879 bp, Enterobacter aerogenes
atgcttaatctccagacccttacagccaaagcccgacaattgcgcggaaacgtggttaaagcggttagtactaaaggcagtcgtacaatgacgcctgtctatgaccgcgacgaacagcgcaaactgcgtgaacgtatccagcaaacgcagccggattgggtgttgctttggtgggacattgctaccgtaaccggctggcgtaccagcgacgtttgcagcctgcgttactcctgcatcaattgggagactggcacagctacgattgtggtagcgaagcaaaccaaagccgcagaagccagagcaacccgcaaaggtatcgaaatcgttcgccagcagcgcaaggacgccgcgagactcgccgctgaccatatcgcctacatgaagtgggatagcatcacctgtgacgctctggcggctgatatgagcgacgaagaacaggcgatagtgtttgggctggtggctaaagctgacgttaagcacgacaccaaacagttaccgccgggcatcataaagcggctgcgtgaacgtcaggatcgtaatctggttgaagatgatttggtattttcccgctcacagattgaaagtaaccgttgtcaacgtctggaaggtagcgtgacccgccaaaccatctggcgcaaacttcatggcgtcatggcgtggtttacccgcttcattaacgctaaattgcgcctgagcgcctattcaagccgaaaaatagcagcctttaatcttatgtccgcaggtggcgaacagggcttattggtggcgtctgaaatgctgggccatagcaacccggcgataactcgcacttaccttcaattaggcagcaaagccgccgctatccagtcccgtttagcaatggaggccggaaatgcgtaa

SEQ ID NO: 99269 - DNA, 183 bp, Enterobacter aerogenes
atgcttaaggtttccacctcaactcacgaaaaaagcgctgatgaaaaactgcaaataatatggacgctggctgttgccgcccggtatttgcgcggcactgaatggtcacacgaaatgcaggttgaaatgctcgatattatcgagaaaatctcttccgccgctcagggggtggatcatgcttaa

SEQ ID NO: 99270 - DNA, 288 bp, Enterobacter aerogenes
atggctaaatcaacctgccataaatttacctggctatttctggccacgccgaaaaaacacgattgcagcccgattgtattgcgcacacaggccgatagcgaagaagcagcacgtaacacgttccccggctgggatttaatctttgccgccaaaatccgcaccgaaagcccgtttcaggattgttggactgactccgacagcggaaccatctggcagatcattgcagacgatataccgccgttatcttcattagctgatagctccctgcaagggggtcgccatgcttaa

SEQ ID NO: 99271 - DNA, 1065 bp, Enterobacter aerogenes
atgaaaaaacgaactaaagccattatgaaattggctgtctttctcccgctcgtactccctctgacctcctgtaccgctgggaagatagatccatctaaggcgttaacccagatgcatattgtcaaaaacgatgattataaaaaacgtccgggctgggatgcggtggtgcgccttactgataatgattgtgaaacccaaaaaagcgggggcaagagcctaataaaatggaatggatcaacctgtgataccaaagccattatcgattttgtgaataaaaaaccacaattcatacctattttctacgctgcatatcatgaatatggttcggatggcttgggggtaatatcattcgattccaatgaaagaaccgaagaagagttaatgggctttgcctcaaaattgactgaaaaattaacaaataaaaatttagtcgatgccattttcgcagatttcaaaaacgaccgatggagtatggggcttgatgatgttgataaggagagcttcaacaaagccatttcttcattcagggtgaaacgtgaacaaatcgaagcgcggtaccaggaagttcgcaacgaaaaccagcagcgttatcaggcagagcatgaagctcaggccaagcgcgatcaggaagaactcatagcctcagaaaggcccattaatcttgtgctatggactaaccccacgccggagcagaagattattctcaacgccctaaatacgataaaattcacaataagaggtaacagggtgacttatgcaaatggccggtggttcatgtctgtagatggactggagtccttaagaaacagccttgatatgagtttatcttcatgctcggatgttggggcgtatgctggtgaaaaggttataagccgtgcgtgtgttcagggtttagcagggaacatcgtcgaatggggtaagacggcaaaagatacctccatctcagatagggcgtggcgtgcagcagcaatcgatggaagcattacttacaacccgattaagtacgaaattctcttcggtcattggtctggtatggcgcgtgtctatgcttctcgcgggtactga

SEQ ID NO: 99272 - DNA, 213 bp, Enterobacter aerogenes
atgtctgtatcgagcagtgaaattttgcttaaggtcgaggttaaagcccggctgcgttatcgctctgattcatcgttttatgagtttttgaagaacgaggaaaacggctttcctatgcccttcaaggttggcggccgcaattgctggtatcgtgatgaggtggaggcgtggatcgggaggcagagcgaaaagcgcggaatctgtagtgagtaa

SEQ ID NO: 99273 - DNA, 1230 bp, Enterobacter aerogenes
atgagtagtaagcccctaacccatacagaagtgaagaacgccaaaccacaaaaaaaggattacagcttatatgacgggttcggcttgttgctgtacgtttcagccgccggcggtaagtcctggcgtttcaggtattcgcacccgctaacagggaaaagacagacgctaaccataggccgataccctgaatttagccttgccgaagccagagaagaaagagataaagcccggcgtctggttgcccgtggtgttgaccctgtggaggtcaaaagggaggaaaaggcgttaaaacagaaggaacacggggagaaattctccgtactggccgctgcatggctggcaaaaaaagaaagcgacggtttacgggagcggtcacttatatacaccagaaagggaatcgaccacctgaatagcatcatcggcggcattagcgtacataaaatcactgcatctcacacgctcgcagagcttgagaaattctccaaacatccagccttgagactgaaattatgcagctatgcaaatggggtaatggattttgcagttaacgccggaataatcgcttacaacccgcttctacgcattgctaaagcgctgccaactgtgaaggttactccattgccagctttttcctctgcgttgttccctgaattcctcgatgtctgggatgcgagcatatgcggcgaaccgactaaacaggcgctaattttccagatccttaccatgaccagacccgcagaatcatacggggcgcggtgggaagaaatagacatagacaacgcgctatggaatatccctgcggagcgcatgaaggccaagagaccgcatacagtcacgctatcacggcaggctatggatattcttcaaactatgaaggcatggcgacgcggtgattatgtgtttccctcgctgaagcgtcaaaacgaggcaataagccgctataacgtgacaaagataatcagccgctcgaagtttaaagggcttattgtcccgcatggcttccgatctctggcctccacagtgctaaacgaagaagggtttaacccggacatcatagaggctgcattagcgcacaaaagcggtgacgccattcggaatatctacaaccgttcaacatatatcgaaaagaggcgcattcttttgcaatggtggggcgattatgtagaagctgccggaaagggtgaaatactggaaacgaagggtgataaggggctaaggctcgttggatag

SEQ ID NO: 99274 - DNA, 462 bp, Enterobacter aerogenes
atgccaatgacatttgaccaggcaacagtagacagttctggtgcctttctcatcggagagctggagcgcttggatcagacgctgaacctgccgctgacctcacagacgtggagccgcgatattcaacttcgcgaagacgtgtctatcgctgacgaaatcagctctttcaccaacaccacctttgcggctgccggcacaccgaatgctaacggtaaaaactggatcagcccgctggccactgcgattgcaggcgtcaacgttgatatcgagaaaaagggcttcccgctggaactatggggcatggagcttggctggaccgttatcgaactgaatgctgcggcacaggtaggccgtcctatcgatacccagaagtacgacggtatgcagttgaaatggaagtgtgattatcattcgaattcaatcggatacctttcgaatcatccggcaaatccccgccaatag

SEQ ID NO: 99275 - DNA, 1998 bp, Enterobacter aerogenes; identical to SEQ ID NO: 92583

SEQ ID NO: 99276 - DNA, 936 bp, Enterobacter aerogenes
gtggatgatattactggcactctccgccgtgctctcctttgtgctgttccggctccatcttcccgctgcgccgctgcgccgctgcttggcccgcttatcgccggaattacccttagtctgcgcggcgccacgattcgtctccctcgtccattcttcatctccgctcaggctatcatcggctgtatgatcgcccgcgcgctaaccccgtctattttcggcgttctggccgccaactgggcgctggtgttgattatcctcctttccacgctggctatcagcgcgctgaccggctggctgctggtgcgttacagttcgctacccggggcaaccggcgcgtggggaagctcgccgggcggcgcttcggcgatggtggtgatggcccaagagtatggcgccgacgttcgtctggtggccctgatgcagtatctgcgggtactgttcgtggttggcgcggcggtaatggtggtgcgtttcgcgctcggcggcgaggcgcaggagatgacccagcagatcgtctggttcccgccgctgacttttaatctaccgttaacgttgctattgactgcggtcgccggttggttagggttacgtttacgcatcccttccggggcaatgttgttaccgatgctggccggtgcgctggcgctgaagacgctaccgcaaatcatcgccgccatcgtcggcctgatcgcgctgtgcgcgctgatggcttttgcgttaacgcacctgctgccgctggattttctcaccgcctatctggcgaccagccccggcggtctggatacggtggcgataatcgccgtcggtacccgggcggatatgtcttttatcatggcgatgcaaacgctgcgcctgtttaccatattgctcaccggcccggccaccgcgcggttaatttcgcgctatgcgccgcgcaaagaaaaaagcccccgttga

SEQ ID NO: 99277 - DNA, 750 bp, Enterobacter aerogenes
atggccggtgactggatcaagatgcgcgctgaccttcatacgcatccaaaagttgtccgcatggcgtccgcattgaaagcggacagacttcggatagttggcggactacattccgcatggtgtctttttgatgtccattctgttgatggttttcttgacggttacagccctgagacacttgatgatctcatcggatttccagggtttgccagggcgatgatggcagttggatggcttgaagaagatggcgaaagccttgtaatgccgcgctttgaagcccataacgggcaatctgcaaagcgtcgggcacaggacgctgacaggaaaagagttaagagaaatgtcgtaaaaatgtccgcatcagaagcggacgaaatgcggaccagagaagagaagagaagagaagatataaaagatatagatccccccaaccccccacgggatagaaagcaggtgaaacagtatccgtaccctgagcaactcaatgccagcgcatgggatgagtggaaaagatatcgggctgaaatgcgattcaaagcttatgcccctacagagcggagcgagggtgcagccatcacagagctgataaacctgtctggtgggaaccatgaacggcagatgcagatcgtgaagcagagcatggccaaggggtggaaagggcttttcgagctgaaggaatcacttaccaggcgggatgtaaatgccatatctgtgccggatacgaggatcccgcaaggattcaggggctga

SEQ ID NO: 99278 - DNA, 1005 bp, Enterobacter aerogenes
atgtcacacctgacgacctcagaggatttacccaatgccactttttcgccggaattggcgtctggtcccattccctccgcctcgcaggatggcctgacgataaaccggtctggactggctcctgcccttgccagcctttcagcgcggcaggcaaaggcgatgggtttgctgacgagcggcacctttggccccacttcttccacctcatcagcgagcgcagacctcagcatgtctttggcgaacaggttgcaagcggtaacgcaaacacatggttcgaccttgtacaagcagatctggaaggagtgggatacgccttcgggcttgtgccgtttacgtcagcgggcatcggtgcgccgcacatcagagaacgggcctattgggtggccaacgccgacagcgtcatcagtgaccggcgcgggaacgtctgggcgccagggcgggatgaatattcaaacagcggcgatgatgtccggctggccgacgccaaccacgatcgacaacaaccaggtcaggggattgggagccgctgcaaatgcgccgagcagggtatcgacattgggaggagcggccagaatggcgggttgggtaactccaacgtcgcgcgactggaaagactcggcgggaatgacagcgcagcgggacgggaaagaacgactggaccaactgccgcgccaggtgttcatgacgggttggccaacaccgacaacgagcaacactcgatcgccatcagtagatgcggccatgaacatgcatcgacaggacgggagcaagacccagcagcgtttgcaggacttcgcggggattaccggccccttgaggttaacggtttttggcgagatgcggactggctcttatgtcgagatgggaaatggcgtccagttgaacccggcacattcccgctggttgatggggctgccgcacgcctgggacgagtcgagcccggggtggcaagagtggcaagcagcaaccgcgtcggcagactcaaaggctacggcaacgccataa

SEQ ID NO: 99279 - DNA, 294 bp, Enterobacter aerogenes
atgatccgggcgctgctcgctccaggtgagattcagttcgcgattcagcgcttcgtctttattcccttccgtcgtctgaccgttaatctgcgtcagacgcgcgcgtacgatgggataaaactccgccgcccgggtctggtgttcggcaaggaatgtcttcaccggcaccacctgttcgggagcaatattaatcaggaagtagttcgggctttccggcggcaactgctgttgccaacgctcaagcagatcaccgcgcagcaccaacagcagagccagcagcataaacgacagtga

SEQ ID NO: 99280 - DNA, 516 bp, Enterobacter aerogenes
atgccggtatacccagctactgatgagcagtcaaatggaaacaccccatcagggaacctactttacgatcctgaaatgaatgctacgctcaatgccaacggtaatgaacaactaagtaaatttgagccatctttctggcagaataatggtgaggctattgaaataataatcgcgttctttgcttttgtattattggttctagcccttataaggcttatcaaaaaaataaagaacaaaaaaatagatttttcattaaacacctcgttcaaaagagcaggttttgtgacgttcataatcggtttatgtcttatgctaatcggcacgcttaatcatgaattttactttgatagtgaaacattctttctatctatccaattcagtcggaggttcggttcagtacccgcattcggtattggattctatcttacagtagcgggcttatttgcgtcttttctgttcgattatactttaggccctatattccggtgggtgaaacagggccataaaaaggcttaa

SEQ ID NO: 99281 - DNA, 489 bp, Enterobacter aerogenes
atgtgtacaggtgttgaaatcgcgctggtggcttcttctgttctcgctgctggtggtgcagtggccagcggccagcagcaaaagaaaatggcgaactatcaggccgcacaggctgaagccgacgccgacgccgcaaaggcctctgcccgcgtggaagcggagcgtattcgtaaagccggtcgccagcaggcgtccgccgctaatgctgcgttggcagcttcaggcgttgagacgggagagggaacagcgctgcgtgtcacgtcaggtattactggggatgcggagcaggacgctttccagacaatcatgaacgggaataaccaaggagcaaggcttaattctcaagctcaagccgacagaattagcggcagcaatgccgcaacttcgggttatatcaatgctggaagttcattgctttctgctggtggaacggcttatagcggttggaagtcggctaaagctggtaagtacgggttatatgcggagtaa

SEQ ID NO: 99282 - DNA, 441 bp, Enterobacter aerogenes
atggctcgaccgaaaaaaatcgttgagacgccggggcaggaaaaaacggcgccggaagaaaaaacgctcgttacagaggggcaattaattactgctgaacagaccagcgcgcagcagcagggtagcgatagcgacgaacagaccgtgcagcaaaaggtttcaaccctgcttgatggtactcagctggcagaacgtaacgccattctcgccacgctcaacgcgcagggcgctgccatcgttgcccgatttgaagagtacgccttcactgacagcctcgatcacccgctgaccaataacctcgatttcctcaatctggtacgcaaagccaccgatgtaagcactggcggtacggtggagcaggtgacaaacgaggaaggcaaaaagcaacccgtacgcagtgcgccggtattaaccgaacacggctggcacgttccgggctaa

SEQ ID NO: 99283 - DNA, 618 bp, Enterobacter aerogenes
atgagagaacaatacactacaactcagatttttttcctgcagcagaacgttaagggagttacagcccgcgaattaaccgaaatgtttaacgcgtgttttgagacaaacaaaagcgttgacgcgatccgccagtacctcagggcaactggattaagcaagttcttgctgagaactcctcgctatacagatgagcaactgacgtttatttacgccaataaggatctgacgattgccgagcttacggagcggtttaacaagcgatttggaacgcggaaaatgcctaagcatatcaagtatgccaaaaaggcccgcgggtggcttcgggagcctaaaaaccgtagaccgaatcaggctcagcggatccgtgtaaacaaaaaaaacgtccggctggatgtgtacgtttacgagtgtgtgcatggcaagctgccagcaggatataccgttattcatctggacaatgatttcagtaataacagcatcgacaatttgcgtgcagcaccacaggggatacgccatgctttttcaatgtcgggttatgcaaaaatgccgcaggtgcttgcaccggcgctgtatgcacaggtaatgctccgccatgcaatcaaacgattgtccagctaa

SEQ ID NO: 99284 - DNA, 246 bp, Enterobacter aerogenes
atgacaaataactcattcatcgaaaaaataatcgatgctggcttatcagtatttgagcacgaaaataatagcgactttggttcagggactatgcatatcaccattatcggcggtgttcgtcgtgtcgagttctaccctactactggcaccgtttacgccaatgctgaaaagggaaaatttccggcgttcaagcagaaaaaagccgggattaaagttgctatccgtttagctaaatccggcgcgtga

SEQ ID NO: 99285 - DNA, 2247 bp, Enterobacter aerogenes
atgaatttcatggttcgccgatttaactaccaggggaatgtggccggaacgtatgaaaaccgccagttctccgccacggatacctgggcgacgtacgccgctgagtttagcgcgccatcgtcggcggcagtggatggttctgtttttgcgctctactgctacccgaacgcgtcggctattcagattgattacatcgccatctatgacatcaccgatgcggtggccatcgatgcgaatacgtctgcggtcacgcagctgcagcagacggtcacgcagcagggcaagtatattgctgcgaatgccagcgccacgaccgccgtttctgcaagcctgaaatcggcgctggcggatgcggataataaaatcgccggcaaccttgtaccaaacggcgggtttgaacgtgattttgataactggaactacccggccaatgcgtccgttatgactgccagcgccccgcatactggcagcaagattgttaagatggtagctgcgccgtcggcaatggtttcgagccagcaaaccatcagcgtaatcaaagggcgaacgtataaatttggcgccttcatgcgtgccaagagcggtacagcaatgctccccggtactcaagggaataacaaagtacggttcgccttcacggacaactctaccattcgggaggctgcattcgatccggctaaactgccgacaggctccacctggcaagatgtcagcgcggtttacaccgccggtaaagatgggcaaatgctcttcggcgtaatgaccgccctctcagctggtgagatttatttcgacgacgtatacgttatcgatattactgaccgggtcgatctcgatgccacggctggcgccgtatctaacctgcagtcgaccgtgacacagcagggaaaagatattgcctctaatgccagcgcgatcacgtcggtcaacgcttcaatcggtgcgctgcagagccagggattaaacccctggtgtgatggttcctttgaatcatacaccgcaaaccagcaactgggcagcagctcgctggcgcgcgtctcaaccgatgtttaccgcaatggccagaagtcgctcaaaatcacgcgtaacaacggcgagaacggcaacagcgacaagatgatcgggaactggcttgctgttcgcggtggcggtaagtatcggttttctctctgggcttacatggccagcgatatgtcgacaccgaacggctggaacgtgtctgtcggcctctttgctcgcggagagaatggcggcgcaaaccaatggccggaagccgtccgtatctccgagacaaacatctcgcgcggcaaatgggttctcctgacgggagtagcgaccgtcggtgccgaccggagcattgcgcagatgtggatctccaccagggggccgaacggtggagccggttattcgctgtatctggacgatatcagcattgtcgatgtgaccgacgcacaggaggcgcaggataccgccactggcgccgcgaacgccgttacccagctgactgcgaccgtgacccagcaagggaaggatatcaccgcgcaggcagggcaaatcaccagcctcggctcgcgtgtgggtgatgcagaatcgcgcatcacccggcaggacgaaaccatcgcatctaacggcctggcaatggcgaccggctttaaccagatgcgcagcatgattggcgacaatagcgcggcaatcaccacgacgaacaaaaccgttgccgacctggaaaaatcaaccactgagcaaatcaccacgctgacctcgcaggtcggggatatgtctgcgaccgttcagcagacggcatccaccgtggcggatttaaacgggaaattgggagcgcagtggggcgtgaaggtcaacacgtcttccggtggtaataactacgtggcgggtatccagctggggattgacggcagcggccagtcacagttcctggtccaggctgatacgtttggcgtttatgtgcctaacggcgatcaaaaaaatatggtcttcggtatcgacgggaacggcgcttattttcagcaggcaatggctcgtaacctgacgattaactttggtcagatttctgacagcctgcagtcaacgaactatcaaccccgctccaccggctggcgtttgccaaaaaatggggctttcgaaatgaacagcaatgtacctggtcaagggaggattcaactggatgaatcagggcttaaagtttttgatcaaaacggtgtcctgcgttttgttggtgggcggtattag

SEQ ID NO: 99286 - DNA, 804 bp, Enterobacter aerogenes
atgacaatccctgcatttggtcttggcactttccgtctgcaagacgacgtagtcatcaactctgtaaaaatggcgctggagctgggctatcgtactatcgataccgcacagatctatgaaaacgaagccgctgttggccaggctatcacggaaagcggcgtgccgcgtgatgaactgttcatcaccaccaaaatctggatcgaaaacctgagtaaagacaagctgatcgccagcctgaaagagagcctgcagaagctgcgcaccgattatgttgatctgacgctgattcactggccgtcgccgaacgatgcggttgctgttgaagagtttatggctgcgctgatggaagcgaagaagctgggtctgacccgacagatcggtatctctaacttcactattccactgatggaacgtgcgatcgctgccgttggcgctgaaaatatcgcgaccaaccaggttgaactgtctccgtacctgcagaaccgtaaagtggtcgattgggcgcgtgaacacgggatccacatcacctcttacatgacgctagcctacggtaaggcgctgaaagatgaagtgattgcccgtatcgcggcgaaacataatgcgaccccggcacaggttattctggcgtgggcgatgggagaaggttatgcggttattccatcttccaccaagcgtgaaaatctggcgagcaacctgaaagcgctggatctgaagctggatgatgaagatcgtaaagcgattgccgcgctggattgcaacgaccgtctggtaagcccggaaggtctggcgccgaagtgggattaa

SEQ ID NO: 99287 - DNA, 810 bp, Enterobacter aerogenes
ttgcagattgctcagataccaagaagcaccttttactatcacctgaaagcgcttaaatcttcggataaatatgaagagattaaaagcagaatcatagagatatataacgagaactgtggtcgttatggctatcgcagagtcacgctggcactccggcaggaggcaggccgcattaaccataaagttgttcagcggctgatgaacctgctttccctgaaagcggctattaaagtcaagcgatacagctcgtggcgaggtgcgctgggggaaactgctgataatgttctaaagcggaatttcaaggcaacccgacccaatgaaaaatgggtcactgacgtcaccgaatttgccgtcaatgggcgaaagctctacctctccccgattatcgatctctttaataacgaagtgatttcctacagtatctcagagcgtccagcaatggctatgattgatgagatgctggacaaggcgtttgcaaaactggacaagaagagcacgcctattctccattctgaccaaggctggcagtaccggcaccgctggtatcagtatcagcttaaagcgagtggtgtagttcaaagtatgtcacgaaggggaaattgcctcgacaacgcctgtgcagaatgcttttttggcacactgaagtctgaatgcttttatctcaataaattcaacaatattgaggaactaaagacagctctttcggattatattcactattataataatcaacgaattagcataaaattaaaaggtctgagcccggttgaataccgcctgaaggtctgttcccaccctgtcaggacttaa

SEQ ID NO: 99288 - DNA, 1041 bp, Enterobacter aerogenes
gtggctagcgcagagcaacttaaggcacttatcaaatcgcacattagtcgcgatgatggtcacttttattcagtggctatgcaggttgctgcgcatgaggcgaaacagggccatggacgattagctgaggagcttttaactcttctcgacaaggcaaaagcaaaactggctaatgataaaagtgggaagctggtacccctgtccaatgcggccaaaaaccgtacagatcttggtaatttattgattgttagccagccagaataccgattggccgatgttgttctggatcattctgcccattctcagctgcagcggctcatacgtgaacagcgtatgatgtctcgaatcaaagagcatggcctttccccaagacgaaaagttttgttagtcggtcctcctggaacgggaaaaactttaacagcatcagcattagctggtgaacttggtattcctttgtttcaggttcgttttgatgctctgattacaaagtttatgggggagacagcttccaagctacggcaggtgtttgatgctattgctgatattcgtggtgtttattttttcgatgagtttgatgctatcggctcccaacgcagcctcacaaatgatgtaggtgagattcgccgcgtactcaatagctttttgcagatgatcgagcaagacaactcaagtagtataattattgctgctactaatcatccggaaattttagattatgcgttgttcagacgttttgatgatgttattgagtaccatttgccaacgttagaacaggcactcgacttaataaaatctcgactaggagcatttgcgcccaagcctttccgtaaaaatggattagaaaaacaggttgctggtttaagctatgctgaaatttgtcgagctgtcgatgaatcaattaaagatgccctcatgagcgatcgcatgcaggtcgatcttgtcatattaaagcaggctttagaagagcgtcgtttgatcagtagtaagttatcacttaacgaaaaaaacaagttaaaacatgacggaacaaaccaacgataa

SEQ ID NO: 99289 - DNA, 2511 bp, Enterobacter aerogenes
atgacggaacaaaccaacgataaaaggcttcatctctctttaccaaaaaattctacagcacagccctatacagcacattctcttggtgggggtggctctaccttactacctgagcgggatcgacaagcacatggagtagccctaagaactcaactgcagcaggttaaggaaatgtcggcccaaattcgtgaagggcaagaaaaccttgagctaattagcggtctcggaatgcaaattgagtttattgggcaacctgatgttgaattagcatttgaaagcttgggtaatgagagggggcggaacaaagatcagcacatagaagttttaagtatacataaggagggcgatataacctctgcaaatgtatttgtgcctgatggaaagctagtgcatttcgaaaattacattcaggattatttgactgagaaacgccgcgcagacggggtttccgctgaccataaatcgttaataaatacattatcagcaatacgtcttgcagaaattaaatctctttggacagacgatttgagtttattgccatctgacccggatgaggcattttggtgggaagtatggctaccagtgaggggtaatagaaatgccgttgttactgattttcatcgaataagccatgcgactggatgccaggtcagcgaacacaaagtcgattttcctgagcgaaccataacctggatgtatggttctcagagccaattttctcaagctaggttggttttaaactgtgtagcagaattgcggcgtgcaaaagatacagctgagtttttcgaaggactaccagcattggaacaacagctttgggtggatgatgcactgcgacgtctccaggttccttcacccgaagacaatgtaccttatatctgtttgttggattcaggcattaatcgcgggcacgctatgcttgcacctgttttgcaccagcaggacatgcatacagtcaatgacgcgtggggagtcaatgacaccgcaaaccatggtacggggttggctggagttgcaatctatggcgatatgattgacgctttgtcttctactgatgcaatagaagtaggacaccgactcgagtcagttaagcttactccaaattatggggccaacgttggtgacgcaaaacagcatgcatatctgttcagctcagccgttacacgtcctgaaattctcaatggtcagcgcaaacgtatttttagttcagcagtaacagcaactgcttatcgtgactttggtcgcccttcagcttggtcatcaatggtcgattcactggcagtagatgcgctagcagaaaccccttttccccggttgtttgttctttccgctgggaacatagttgatcgcgaccattggggaaactatcccgccagtctttcagttaatcaaatccatgatccgggccagtcatggaacgcattaactgtaggtgcatttactgacaaggttgagttaaatgagcctgaatttattccggttgctgatcaaggagcattaagtcctttcaccactacctcaatgggatgggaacctgtctggccgtttaagccagatgtagtttttgagggggggaatgcagctgctaacacagaatttgtcgataactttgcgagtttagaattactaacaacaagtgcttcatcccaccgccaattttggacaactaatgcaactagtgcagcttctgcgctgtgtgccagaatggctgcaaggttaatggcacaatatcctgagtatcgcccagaaacgatccgtgctctgatcacacactctgcgcaatggacacctgctatgttgcgtatgtatcctgctcgcaataaaagtggcttcgcacagcttatacgccattgcggctggggctcaccagatgttgaacgtgcgctctggagtgtgaaaaatagtctgacactggtagctgaagacagcttgtacccctatcgtaagactcgcgacggtattaaaactcgtgacttgaatttacatgcgctaccttggccactggaacagctccaggagttacaggatacgcaggtagagctcagggttacattgtcttatttcatcgaacctaacccttcagcacgggggagttcatcaagatatcattacccatcccaccgtctacgctttgcgatgaaaagacaaacagaatctttagacgaatttaaaactcgcatcaatgcagcagctgagtctgaagagagtgagcatgggactaccggtaacgatgataactggtcattaggtgctactcaacgacataaagggtcgttgcatcaggatatatggcggggggcagcagcagagcttgctagttgtggttatttggctgtttatcctgcacaaggttggtggagaaccagaggcgctttgcaacgatttgattctgaagctaaatacagtctggttgtatcgattcatgcacccgaagcagacgtagacctttatgccgcagtggaaaccttggtcgaaaatatggttgaaaatcctgttgaaataatgggttag

SEQ ID NO: 99290 - DNA, 996 bp, Enterobacter aerogenes
atggtagaggagggcatatggcgcgaacgtcgtcgtaagtttgcccgaatttatcagcgccggatgcggcgcccatcctacggtgaactcatccagattgatggctcgcctcatgactggtttgaaggtcggggccccaaatgcacactgatagtctttatcgatgatgctaccagcgctctgatggcgctacgattcgctcctgcagaaacaacccgggcttacatggaaaccctccggggttaccttaatgatcatggcgtaccactggctctctattctgacagacacagtatattcagagtaaataacccggagcgggaaggagagttgactcagttcacacgtgcgataaagacactgggcatcgagccaatccatgccaacagcccgcaggcaaaagggcgggtagagcgtgccaatcagacactgcaggacaggctggtcaaagaaatgcggcttcagggtatcagtgatattgaaacagcaaacgcatggttgccgacctttattgaagcctataacaaccggtttgctacgccgcctcgtattgctgataacgcccatcttgatgtacaccattctgaagaggaactgggttatatcttcagcctccaggcgaagcgcgttctctccaaaaatctcactttccagtacaaaagcagtgcgtttcagattcgcagtgaaggccggggatatcgacttcggcattcggttgtcacggtatgcgaaagctttaacggtgaaattaaggttctgtatgatgggaaagcgttgggatgggaaaaatatgttgatggcccggagcctataccactggatgatgaaaaaagtgtccatgaacgtgtggataatgcccgttttgatttacgctcaaaattctacgtaaaacctaaagctgaccatccctggcttacgcgccgaacgcaaagtaatcagcaagtgaagccccctaaattacccagaaagaaggctgatcccgataaaatggactga

SEQ ID NO: 99291 - DNA, 411 bp, Enterobacter aerogenes
atgcaaaaacaatatttcagtcagttcgtcaccggagtgttactcacttcgttcatcgccattcctgctctggcagcgcaaggtggcttctccgcagagaaagagcctgtcgtcactgagcacatgtatgccggtcataaagttcagcaggagaatagtcaaagccggattcagatcgtatcgtcaatgcacgaaggggcgtggatcacactggaaggcaatgttgtcagccagcagcaggacgagtggtatacgttccgcgacccaaccggtaccatcaaagtccgcatcccgcagaaagtctggaacgggcagcacttcgatgctcaggacctggtacgggtcagtggaccggtaagccatgaaaatgatggttcaattttatatgttgcagttatcagcaaaccctaa

SEQ ID NO: 99292 - DNA, 1131 bp, Enterobacter aerogenes
atgactgatttttccactcttttacagcaaggcgtggccaatgcctggctgttcatccccagcgctattttgctcggtgcgcttcacggactggagccagggcattccaaaacgatgatggccgcctttattgtggccatccggggaacggtcaagcaagcggtattactggggcttgccgcgacaatttctcatacgtctgttgtctggctcattgcgttcggcggaatgtatatcagtcagaaattcactgctgaatcagccgaaccctggtttcagctgatttccgccgtcatcattctcggtacggcggcatggatgttctggcgaacctggcgcggcgaaaagctgtggaagatggagcaggaagaggaacacagccacggtcatcacgatcatgacgaaacccgcatcatcgatacgggccatggcagcgttgaactctcgattttcgaagaaggacaaccccctcactggcgtttacgctcgctcagcggcaagaaatgggaagctcgcgacatttctctggtgaccaaccgtggtccagggacattttcacaggtatttgatttcgtcgaaaaagacgggtttatggaatcggccctggcgatcccggagccacacagctttgatgttcgcctgtctttaggccatcgcggccatgtgcatgattatgatgtggaattccgtgaacatgaacacgaccacgatcattcctcgctggaaggtctggatgttaattctcgcgaatatcaggatgctcacgaaaaagcgcatgcgaacgacatcaaaaaacgttttgcgaatcgcagcgtaaccaccggacaaataatcctgttcggcctgaccggcggccttattccttgcccggcagccattaccgttttgctgctctgcatccaggtgaaggaatttacgctcggtgccgcgctggtactgtgtttcagcatcggtttagcgatcacgctggtttcagtgggcgcagcggcggctttcagcgttcgtcaggcaaccaaacgctggagtggcctggatacgctggcgcggcgggctccatacttctcaagcgtactgattgcacttgtcggcatttacatgggctatcacggctggatcggcgtaacgagctga

SEQ ID NO: 99293 - DNA, 270 bp, Enterobacter aerogenes
atgaccgttcatgcatcacaccctgacattattaaaagacttaaacgtgccgcagggcacctgaaaagtaccatccagatgctcgaagatgagaaagcatgtctggatatcgcccagcaactgcacgctgtggaaaaggcgataacgaatgcgaagcgtaccttaattcatgaccatctggatcactgcctggaggatgcccttcatgctgaccacacggagtctgataagacgcttagcgaatttaaagagataactaaatatctttaa

SEQ ID NO: 99294 - DNA, 1299 bp, Enterobacter aerogenes
atgctcaacattctttctaatcgtacctatcgccacctgtttatggcacaggttatcgcccttattggcaccggtctggcgaccgttgcgttagggttactggcctacgatctcgcaggtgacagagccggggcagtgctgggtaccgcgctggctatcaaaatgagcgcctatattcttgttgcgcccgtggcggcggcttttgccgataaattcccgcgtcgcaccatgctggtaacactggacctggttcgcgctctcgtggctatcacgctgccttttgtcacccagatatgggaaatctacatcctgatcttcattcttcaggctgcctcggcggcgtttacgcctactttccaggcaactatcccggatattcttcctgacgaacgtgaatatacccgggcgctgtctctgtcacgtctggcctacgatcttgaaagcgtcatcagccctatgctggcggctgcactgctgacggtcatgagtttccacaacctgtttgccggtacggcagtcgggttccttgcttcagcagctctggttgtttccgtgacactgccgaagatgaaagcgttaacggtcaaacgcagcatctatgacaaaactacacgaggtatgcgcatcttcctgaaaacgcccagactgcgcggcctgctggcactcaacatggccgtagcggcagcgagtgcaatggttatcgtcaacaccgtcgttctggttcaggcggactttggtttctcacagcggtctaccgctattgcgctggccttcttcggcgtggggtccatggtatcggccctggttctccccagactcctcgacaacatgagcgaccgtatgccgatgcttgcaggtacggcgcttttagtcattggcctggggtcaggcattttcctgaaggattacatcacgctggttgtgctctgggcactgctgggggtgggctattcactttctcagacaccgggtggtcgcctgctgcgccgttcgtcaacagcggaagacagaccggcgctgtttgccgcccagtttgcactgtcacattcatgctggctggtgacttatccgctggccggatgggttggtgcggcatgggggacacaggcttcattcatcgccctgactgttgtggcaacattgtcgctggtcaccgccgtacttatctggcgtcctgagcatgaagtgtacgctcaggttcacagccacaaagacccggaaacaaacaacgaatcgacccatgagcatgatttcgtcattgacgatgaacatccgtcctggccgaagaaagagaagtaa

SEQ ID NO: 99295 - DNA, 759 bp, Enterobacter aerogenes
atgacaacattactgccgggggaaaccctggcagcctctctggctgaaaaagtcagtgaaacatggcaaaaaataaacacccgccgcaatcaacaagaggcgataacgccgggctgggttttgcagtcgctcgggcttaaacctggctcaactgaactgcgaagagccatttttgagctggtcaggcggataccctatcagctcggtgcatggaatggcgaaagcatgagtctgtttcagcagggctttggcgactgccgtcataaagccgctgctgccgaacgactgctgaccgatggtggcattacggcaaagcgaaagctggtgcggtttgactgggctgatttgcctgtacctgcggatattctggcaattttgccgcaaacacagggatttcatgacactgtggcttttgagctacagggcaaaacatacctgtttgatgccacctgggatatggccttgcgcggagcgggtttcccggtgatgccttcctgggatggcaactctgatacctggccggtgacttcccggatgtcgacgcagcaaaccgtactaatgccgcagccagggcaggacatttacagcactaaccagatgagctggccgcagcgcgagaaaaccatggcgtttaatcaggcactgaataactggctggaggtcattcgggctaaccgtgatgactggtgcaccattatccatagtgatattgaagccacccggttgagcctgaaaacctgtctgggacaactgagttaa

SEQ ID NO: 99296 - DNA, 921 bp, Enterobacter aerogenes
atgtataaagactctatccaggcgcgtcgagagattgcgcgtaatttcactgcactcaattatcgtgttgatcccctgcactggcagacgctctgcatgggcgttaatcgcgaccttcaggccaaaaaaatgcgtccgaatgtcccggttccttcacggcgtaaagtcattccgttcctgaaaatgatgcatcaggaaacgggctcgatgctcaaagcgatccttgcctttggctttgatggcccctggacatccagcggcggttcatttcgcctggcgcgagaaattgggttcgacatcgcccactatgcgaaaaacattcaccacaaaaacgggaaagtcaccttcctggaaattggtgccgcctgggcgggttttcgcgctgaggaatgtgccggccatcaggcgacgatttccgggctttccggggagttcagggagcaacttggggaaagcgtattcctgcacttcactaatctcacaccgtggcatgcatcgctgccaaaaggcgtgactgagcatccttacgtgacagcagccgggctgggagcgctggaaaacagaggtgttcaggcaggtgaggtcgatattatctactcccaggcagcggcctatttcgaacaggattacacggctttccttcgcagcgctgcacgcctgctgaaagaggatggcgtcctgatcttcaaccatgaccctgttctggcgagcgcgatggatgaagtcgcctgggagcacggactgcggctggtcagacgtaagcaaatgggaggaatgaatggcgcgattgcccgttatcaccggcttcgttcgtccccggtaagtcagatggtcttccccggcgtaaagcgggcagaggatgaagaagtggtctgtgaatcactggttatgtcggcgcttcgtcgcaacgtagaggtgtaa

SEQ ID NO: 99297 - DNA, 372 bp, Enterobacter aerogenes
atgtacccgatgtttaaacgttcgccccgttatgttctgatgatcgtcatcatggccattggcatgatgatgtcgtcgatggtgacgtttgcgtcgcacggtacaaacggcctgacaggctacgagatgaatctgcatgacgcagaagtcaccatgtcaatgcaggatcactctcacgattcggatatccctcagtctggccacgcaggccatcatcagacagaccatttccatgaaacccctgagcagccgccctctgtagagatttccctctctcctgtaacagacagatggttgccgcttgccgatcttcgtagcccggttaaggccacggacatcatttaccgtcctcccagcatccgccagatctga

SEQ ID NO: 99298 - DNA, 978 bp, Enterobacter aerogenes
atgaaactacatatccttattctgacactgcccactgagcaggccacattacgtatgcgtgtctggcgggcattaaaaaataccggtgccgccatgctgcgcgacggcgtttatctgttgcctgaagcgcaacagagccatgagatttttaacgagatgagtcgtgaaatcagcggtgagggaggaacggcctttgtttttgacgcagagacttccgacgaagagaaaattcgcccgttattcgatcgctctcagcagtacctgatcctgatggagagccttcaggtttgtaaaaacgaccttaatgaggaaaccgcggtcagccaactgaagatggtaagaaaacttcgtcgcgagctggatcggattgtggcgattgatttctttcctggtgaagcgcaggcgcaggccatttttgccttgtcagaactggaagctggcattaacaggttcatctctcccggagagcctcatgccgtcagtggcttgctgacacggctgaagcctgaggattttcataacaggatctgggctacgcgtcgccggccatggattgacaggcttgccagcgcctggcttatacggcgttttatcgaccaggatgcgcagtttctctggcttaaggatggcaacgattgcccggaagaggcggtggggtttgattttgatggcgcgaccttcagccacatcgacaatcgtgtgacctttgaagtgctgatggtccgcttcgggctgacgggggatgccctgaatggtctggggatgcttgtgcattaccttgatgttggcggggttcagccccccgaagccgctggcgttgaaagtgtactggcaggattgcgtgaaagcattacggatgatgacacattactcacagcggcctgttcgctgtttgacggtctgttaacgacgtttgaaatgaggtccggccatgatgaacaaaacggagttgctgacgctggcagaggaaaacgttaa

SEQ ID NO: 99299 - DNA, 891 bp, Enterobacter aerogenes
atgatgaacaaaacggagttgctgacgctggcagaggaaaacgttaagcccaagccggtccccctgaaggaggcgttctggttctggatgaagctgggttttatcagctttggcggtcctgccggacagattgcgatcatgcatcaggaactggtcgagaaccggcgctggatttccgagtcccgttttctccacgcactcaatttctgtatggtgctgcccggtccggaagctcagcaacttgccacctacattggctggctgatgcacaggaccttgggcggagtgatagcgggtttgttatttatccttccctcactttttattcttatcgcgttgtcgtggatctatatcgcctggggagacgttgccattattgccggtatcttttacggcattaaacccgccgtggcggcaatcgtgctgcaggcggcgcatcgcatcggctcccgtgcgctgaaacacggtgcccactgggccatagctgctgcggcttttgtggccgttttcgccctgaacgttccttttcccgtcatcgttatttcagcagcgataactggctttatcggcggacgcatcgcgccggaaaaatttcacagcggcagcgggcataacaaacaggagaaagccgccgttgatgctgcggttattgacgatcatacgcccgtaccggcgcatgccctgttcagctgggcgaaactgttaaggattgtggcagcgggtgcactgctctggcttattcccatgacggtgctgacgctggggctgggctgggcgcatccggtgacgcagatgggctggttctttaccaaggctgcgctccttaccttcggtggggcctacgccgtcctgccatacgtttatcagggtgctgtcgtcaattttggctga

SEQ ID NO: 99300 - DNA, 474 bp, Enterobacter aerogenes
atgatggacgggctggcgctgggagaaaccacgcccggcccgctgattatggtggtcacgtttgtcggatttgtgggcgggtatacccatgccgtttttggcgcggatatgctgtttgtcggcggcgccgttgccgcctgcatggtgacctggtttacctttctcccgtccttcattttcgtgctggcaggcgggccgtttatcgaaacgacccacaacaaggcgggtttcacggcacctttaaccgccatcacagcggccgtagtgggcgtcattgttaatctggggctgttttttatctggcataccgtatggccggaaggcgcaaagggagggatcgatatccctgccgccctgattgccgtcgccgctgcgtttgcgcttttcagattaaaatggaaggttacgcacgttattgccatggcggctctcgccgggctgatactccgcctgaccgggctgtcagctgtgtga

SEQ ID NO: 99301 - DNA, 690 bp, Enterobacter aerogenes
atgtacaacactgatttaccaacacgcgcagaattaccttctgccatcaaactgatgcagtccactatcctcgccgccatcgtggcgctgacgctgctgatcaccgtcgtcatgccttcggaatacggcattgatcctactggcgtgggtcgtttactggggcttaagcagatgggagaaatcaaaacgcagcttgccgaagaagctgatgccgataatcaggccagcgctgttcagcaaggacagctggctgcgccagttaatgagcgaccgatcccggataatcctccggcaataacgcagaacacctacccggagctgagcgttccggcgaccacgcgcgcgccggaagtaccatcggctggctcgcaacgtcatcagatgctcatcaccctgaagcctaacgaagctgctgaagttaaactggaaatgcgcaaagatgcccgcgtgacctatcagtggacaagttccggaccggtaaacgtggatgcgcacggcgatccggtcaacgccccgaaaggcttctaccatggctatggtaaagcccggcagatcacatccggagacggcgttttacaggccgcgttcgagggtaaacatggctggttctggcgaaatcgtggttctgagaccatcacgatccagcttgatacaaccggcgactacctgaacatcaaacgggttatctga

SEQ ID NO: 99302 - DNA, 738 bp, Enterobacter aerogenes
atgtataccagccttgatacacagggccggttgagcgctcgcctgctttcagctcaggcgcgttcggcttgtctgtttttcctgttgttactgcttttctacagccagggcgcgtatgcgcacggcgtggcggaaggcgacaaagggtacatccaggaaatcaccggggtgaacatcatcccgtttatctaccttggcgcgaagcacatggtgaccggttacgatcatctgctgtttctgttcggggtgattttctttctctacaaaatgcgtgatatcgggctgtacgttagcctgttcgctatcgggcattcaacgacgctgctcatcggcaccttctttgatatcagcgtcagtgcttaccttattgacgccattatcgggctgtccgtggtctataaagcgcttgataacctcggggcattccagcgctggtttggcgttcagcccaacacgaagcttgcgacgctcatctttggattcttccacggttttggtctggcaaccaaaatccaggaattcgaaatctctcccgatggcctgtttgtcaacctgattgccttcaacattggcgttgagatcggccagctgctcgcgctgagcgccatcctgatcgttatgagctactggcggcaaacggcgagctttttccgacacgcttataccgccaatgtggtgatgatgagcgcgggatttctgttaatgagttaccagctttgtggctacattttagcctga

SEQ ID NO: 99303 - DNA, 366 bp, Enterobacter aerogenes
gtgtttatcagccgtgaagtcatttccagaatcgtgcttatcatcatggctgttgccgtgctgagcagttcgtttatggcaaagccacaggctgcatacagcgttcaggaaacaacgtccatcagtgaccatcaacacgacagcgatgaaccactgaatgagcacgatccattgttgtttcactcccacggtagcgtgcatcacctcaatgccgatcattcccacgatctgaataaactctttgctctgcctactctgcacgcatggaatccgggcatgcgggtgatatatgcgttgagttcagaacaaatactgcaaatgccgcagtccacccccgaacgccctccgagaatcctgtctgcgtaa

SEQ ID NO: 99304 - DNA, 240 bp, Enterobacter aerogenes
atgggtagcattaacctacgtattgacgatgaacttaaagcgcgttcttacgccgcgcttgaaaaaatgggcgtaactccttctgaagcgcttcgtctcatgctcgagtatatcgctgacaatgaacgcttgccgttcaaacagacactcctgagtgatgaagatgctgaacttgtggagatagtgaaagaacgactttgtaatcctaagccagtacgtgtgacgctggatgaactctga

SEQ ID NO: 99305 - DNA, 288 bp, Enterobacter aerogenes; identical to SEQ ID NO: 84381

SEQ ID NO: 99306 - DNA, 1209 bp, Enterobacter aerogenes
atggacgaaaaacagttgcaggctctggctaacgaactggccaaaaatctcaaaacccctgacgatctcaaccagttcgatcgcctgctgaagaaaatcagcgttgaggcggctctcaacgccgaaatgtcccaccatctgggctacgataaaaatcagcccaaactgggggctaattcccgtaacggctattccacaaagaccgttaccaccggcgatggccctctggaactacgtaccccacgcgatcgtgatggctccttcgaaccccaactggtgaagaaaaaccagacccgcattaccggcatggataaccagattttatcgttgtatgccaaagggatgaccacacgcgagatcgccgccgcgttcaaagagttgtatgacgcggatgtctcacccgcgctggtctcaaaggtcaccgatgcggtcatggagcaggttgtcgaatggcaaaatcgtccgctggatgcagtctatcccattgtttatcttgactgtatcgtcctgaaagtccgacaggatagtcgtgtcatcaataaatcagtgttcctggcgctgggcattaatatcgaaggccagaaagagttgctggggatgtggctggccgaaaatgaaggggcgaagttctggctgaatgtgctgacagaattgaagaatcgtggcctgaacgatatcctcattgcctgcgttgacggcctgaaaggtttcccggacgccatcaacgcggtgtatccggaggcccgcatccagctgtgcatcgtgcatatggtgcgcaacagcctgcggttcgtctcctggaaggactacaaagccgtcacccgcgacctgaaagcgatttaccaggcaccgacggaagaagcaggccagcaggcgctggaagcgttcgccgcagcctgggacagccgctatccgcagataagccgaagctggcaggcaaactgggccaacctggcgacgttcttcgcttacccggcagacatccgcaaagtcatctacaccaccaacgccatagaatcactgaacagcgtgatccggcatgctatcaaaaagcgtaaggtgttcccgacggacgacgcggtgaaaaaggtggtgtggctggcaatccaggcggcctcacagaaatggacgatgccgctgagggactggcgtatggcaatgagccgctttattatcgagttcggtgaccgcctggacggtcacttctga

SEQ ID NO: 99307 - DNA, 414 bp, Enterobacter aerogenes
atggtgttaaatattgattttataaagtatctgtatttactgatgaaagaagattcatcgtatgtcattctgagcattgccctttttggggtgattccagcactgttgatgtcaagcgtattacggattaaaaacagaacgaagcgcttcctgtcgttaatcattattatggtggtttcatttggaactctttcattgctccaaccagaaagtaagtacaaagcaatattaatcaataagcaaaatactgaatatacattacaacactgcaaagtatcggcatttaacgcgcagccagaaacaccatttaccagtgcaaaagatgcctggtcttgtccggatagcgtaacacggtatatggatgtgaaatacagggataatggcattcacagcctttctgataaaaaggagtaa

SEQ ID NO: 99308 - DNA, 531 bp, Enterobacter aerogenes
atgatgattaacaataaagtcatttttgaagaggtggaagagttaaaacatatactttcacaaggggaagtggacataccttccttttggacatgtttatggcctggactggttatagttgcttggaatgcactttgttctgtaattagtgtcgaaagtggttttttttcaagcagatatatatttagcgcgatgatttttccatgcggtgttgggttcataattatgcttggcgtcgctagtgcgcgttcgctgtttttgtcagtgccaagaacctttagacttaattcatttttatatcgattctttggtaaaaaaattatggtatacacgattacatatatggttgtgatcgttctgcttgccttattcaatcgtgtgtattataactcaccattaccttttgcattcatgattattttaacaactatttgttgtggtgtggtaatgcatttagactttgggcgatatcaactatcattgcttacatccgcaataagtacatttaaaagcaataggcttaatagctaa

SEQ ID NO: 99309 - DNA, 585 bp, Enterobacter aerogenes
atgacggaagataaacgtcccactctcagcctgaaacgaaagccgggggagaaaacaccggaatccggtgctgatacagcccgtgttgtccgccgtaaacaggtggtgaatgtgaccaccccgccggcatggaaagtgaagaaagagaaactggccagaaaaacggaaccggtggcacctgctgcccccgtgtcgaagacaccggacaaaccggaaaggatcgtccgtccagttcgttatctttgcctgccggaggtgcaggatgcgattgataccctgaaggtgtggtggcctgggctgttcaaaggggaagcgcctcacctgctggccatcggcatccgggaggccttttttgaggatattgccgaacggggaataccgttgtcccataaacaggtcattaaatgcctgaaaagtattacacggtctgaactttacctgtcatcgatgatcgccggtgctgaacgagttgacttacacggtaacccggtgagtgtcgtgaccccggatgaagaaaagtatgctcagctgcgtcttgaaaaacagcgacagcaacaggccagaattcagaatgaaatcatttaa

SEQ ID NO: 99310 - DNA, 1494 bp, Enterobacter aerogenes
atggataagttagatgaagcatatgaaccggataatatagggatcggaatcatagcgggtctggcatatgcctcaattgaattaaatcaaaaagcaaaatgcattcgcccaatcatttttttaagggataatatatttagatcactatcaaaggaagatcctgactactcaagaaatatagaggggcaagtcataaggctgcattgggattgggcacaactcctaatgctatcggctaaaagaatgaaagtagcatttaatctagatattgagaaagatcaacgggtttgggataggtgtacagccgatgatctcaaaggaaggaatggttttaagcgatgcttgcaatttaccctttaccgcaccagagatttactatcattgttaaatgaagcttttttttccgcatttagagagaatcgagaaaccattattaacactgatctagaatatgcagccaagtcaatttccatggccaggcttgaagatctttggaaagagtaccagaagatctttccttcaatacaagttataactagtgcattccgtagtattgaacctgaattaacagtctacacttgcttaaaaaaaatagaagcatctttcgaatcaatagaagaaaatgaagacccaaaaataacttctgaaatacaattactaaaagcaagtgggatcctccaaagtttgtatagcgtaggattcgtaggtatacgtgataaaaacacttcatcctattcattttgccatgatggacgaaccccagacaaaggttttgaaagcggtgaaaaattattaattcatccctgttattggcttggtttgaatttaaatcgcaacgctcttgctccagaggaagctgaggaaataaatgatgaatatgatatcaatgttgtttccgataattcagccattagaaataaaacaataggtcaaataaccactcacctggatcaaataccgacaggaaatgaaggagctaatgaatttgagcaatggtgcttagatgcactaagaattgtatttgcatcccacctgacagacataaagccgcatccaaacggtaatgcggttcagcgacgagatattataggtaccaatggtggaaaatcagatttttggaagcgcgtgttagaagactataaaacaaggcaagttgtttttgatgcgaaaaattttgaagaattaggtccatctgagtacagacaattacaatcatatttaacaggaccgtatggaaaattaggttttattattaatagagaagaaagtgaggcgttgaaatcagggagagatttagattggacaaaagagatgtatcaatctcataattcattaataataaaattacctgcaaaatatatatctaaattgctgcaaaagttaagaaacccagagaagcatgacgctatagatagtcagatggggaaacttttaactctatatgaaacatcatatatggctattaaaagtactcaaaagaaacgaagaaaatag

SEQ ID NO: 99311 - DNA, 969 bp, Enterobacter aerogenes
ttgaaggatcagatcacgcatcttcccgacaacgcagaccgttccgtggcaaagcaaaagttcaaaatcaccaactggcccacctacaataaagccctcatcaaccgtggctccataactttctggctggatgatgaagctattcaggcctggtatgagtcggcaacgccttcatcacggggaagacctcagcgctattctgatctcgccatcaccaccgttctggtcattaaacgcgtgttcaggttgaccctgcgggctgcacagggttttattgattccatttttacactgatgaatgttccgttgcgctgcccggattacaccagtgtcagcaagcgcgcaaagtcggttaatgtcagtttcaaaacgttcacccgaggtgaaatcgcgcatctggtgattgattccaccgggctgaaggtctttggtgaaggcgaatggaaagtcaaaaaacacggcaaagaacgccgtcgtatatggcgaaagttgcatctggcagttgacagcaacacacatgaaatcatctgtgcagacctgtcgctgaacaatgtgacggactcagaagccttcccgggtcttatccggcagactcacagaaaaatcagggcagcatcggcagacggcgcttacgacacccggctctgtcacgatgaactgcggcgtaagaaaatcagcgcgcttatcccgccccgaaaaggcgcgggttactggcccggtgaatatgcagaccgtaaccgtgctgttgcgaatcagcggctgaccgggagtaatgcgcggtggaaatggacaacagattataaccgtcgctcgatagcggaaacggcgatgtaccgggtaaaacagctgttcggaggttcactgacactgcgtgactacgatggtcaggttgcagaggctatggccctggtacgagcgctgaacaaaatgacgaaagcaggtatgcctgaaagcgtgcgtattgcctga

SEQ ID NO: 99312 - DNA, 501 bp, Enterobacter aerogenes
atgggaaattattcagattttgagaccgagtttgttcaacgaacactggcacttatcgatcagtataacgaaatgattaaggagctgggcaagcccttcagggagcagtacaactacacattgaccctgaattgccttctgggtctcatcgtgatgccgaaagagagggcgctctctttcctgcccgctgaccgtttaacgcagcagcttaaaaccagcatggggttacaggagtcgcagctacccggaccggagatgactctgcgtgctcttatccttaaaatgagaaattctgtggctcatttcagcgtccaggttgtatcagtcagcgacgagcgtcttgtcgatctgattgctttcagggatgatcctgaggatgagaatgcctatgccactttcagcgccccggaacttttaccctttctgaaatattatgcgaccctgctgctcaacaatatggcccgacgtcgagccaaagctgttaacttattggatttttga

SEQ ID NO: 99313 - DNA, 777 bp, Enterobacter aerogenes
atgttaatcctcgattgctcctcacgaactcaggcgttgcatacattatctgccgggtttggctgtccccctgaaaagctgaaaaaagtgctgctttcgcttgatcttgaaagtatctacgagcttaatcctcgccagttggttgatgcacctcagtatctgagagagtacgtctgtgcggaactgggcgaaccgggaccattcacacgagctctgtggtttcatggtacccggactttcgccgggaatacttttcccgcggggttactggcgctaaatcagtctgaatcactcgccatgaaaatgttgctcgacctggctccgaatgagatggttcgtaaacaccttcaggaatggaatgttccgggaggtgtcccggatgagatgtttcagctcagaactgacgatagaacgcactgggggccttacggccatctggttcgggaattacatttccacaccagtgaaaatgggcaacatgattatctcaggctaccggagctggtagaggatgtctgtaacgcatactttgagaactacgcccacgatcttacgccgcattacctcaaggtgcttcacccctgtattgtctggttccaggcagatattatttatgaaaagggtacgcttgaaacggcacttgcatatgcttatacatcagtccggaatctaccgccggatggaaactcaactttcggtatagaccgtgaggggaaatcagtgtccaggtcgtcaattgctaaaatagagtatctgccgcacgggcaaattaaataa

SEQ ID NO: 99314 - DNA, 249 bp, Enterobacter aerogenes
atgagccatcctgaaattcacgtcaaagactggattgatgtgggcaacagtgagtgtgtggtgcaacggcttcttcccccggggtctccctccggcgtctgcattgttgttttgaataaaaccaaaccaaccacccggatcgtcggctgggacggcaaaaaatggtacttcatgcccagccgtgactatggcggttatgcagatgattatgatccctgtgttcgtgaactgaaacggggccgtagctga

SEQ ID NO: 99315 - DNA, 987 bp, Enterobacter aerogenes
atgaactttcagacttcatctgaacaaaacgagtctcaggggaccgtgtcggtctcacttaaaggcattccgaccgctcagggccaggcgctgaaagaggtggccagagcacgggacattaaccagtctgcgctgctgcgtgaaatggtcaatgccagtatgggcagtatactccatgtcttctgccttaagagcccgcttgtcgcgtccctggatcaggacatcgcgcagtataacggctgtactgtcctgccaacatggagcagtgtccctcagccccctcagtttgaagcggcctaccgcgacctgctttccatccgtacagaagatgatctgacccggattttgctgcgtaatgcacagtacctccgcatgcgaagcagccaggttttgccaccgggacagcagttctacggcgggactgcgctgtattttgccctgttctgtgatgttgccggtcgtgatgaacagacgattgaagccttctgggccagtatcgcgcgtttctggggagcctggtatcgtcggcaggattactatcagcagatcaaccagctgcgcggagtcatgggcaaggcgccggcgaatggtctcagtgaggcgcatgcggtgggcgtttacagccgggtcgctgtgtttcaggatgaaagcggccagaaaggacacagccaggtgctgctgacccttcgcacagaaaatacgcaggcgctgccggcaggcgagtttgatcagtttgagttgccgttctgtaatggtcacattctggtgcctgatccgggctatggctcccccgttgtttttcacaacaatgtactcggcctggggttccgcttccgggaaggaacctgctccatgcactgctacactgtggaggacgcccggctcgggcctacccagacactgacggaagtggcggaagcgctcgtcagtaatgttgatgctcccctgcgggcctatgctgcaaccatcccggtcaatcagaggtag

SEQ ID NO: 99316 - DNA, 258 bp, Enterobacter aerogenes; identical to SEQ ID NO: 15284

SEQ ID NO: 99317 - DNA, 435 bp, Enterobacter aerogenes
atggacgctccggactatgggaaacaggtcaacttcacgggcggccgggagtgtgggaaacaggtcaacttcgcgggcggccgggactgtgggaaacaggtcaactttacggactgcccggactgtgggaaacaggtcaactttacggacggcccggactatggcaaacaggtcaactccgcggacggcccggactgtgggaaacaggttaactttgcagacggcccggactatgggaaacaggtcaactccgcggacggcccggactgtgggaaacaggtcaactacgcggacggcccggactatgggaaacgggtcaactttgcagacggcgcggactgtgggaaacaggtcaactacgcggacggccagggccgcgggaaacaccacatgtataggcacacacagatagcgtgttcagggcaacaaatgtga

SEQ ID NO: 99318 - DNA, 549 bp, Enterobacter aerogenes
atggtgccgtctttagtggcggtgtacgtgttgctgtactcctgccatacgctgccagtaggcattgtggccgggtcgaagcgcgcctcgaggattacagagttatcgaggtatgcaaatcgaaccttgttattctgctgcgtgttcggctgcatagtcgaaccggccttagcccgtagccacgcaccaaacttgtacgttctgcccttaacggcagtaataacggtgtcattcgacaaaagagtcgtggtggtagcggccacatatttcacgatttttttgccgctgtgtggattctgcgccgacatcactgtcgcctgtgctggcgcggtccagttggtgaagtcgcgctcgaatcccccgtttaaaatcaggttgcccgtgattttgttatccacgtcagccattgctgcattcaggcttgcagaaacggcggtcgtggcgctggcattcgcagcgatatcctggtcctgctgcgtgaccgtctgctgcagctgcgtgaccgcagacgtattcgcatctatggccaccgcatcggtgatgtcatag

SEQ ID NO: 99319 - DNA, 549 bp, Enterobacter aerogenes
gtgccgccgtcgtcagaactccacccctcgttgtccttgtcgaaataccagattttgagactgtcgaactgctcgccggtaccggctgaaatcgacgccatctgctgcgccaggctgtcaaagccgttctgcatggtgacgttcgtcgtctcaatcgccgcttcaacttcacgtttagcactcagcaggttatcggcggcctgcttcgccacggcggcatcgtccgtttcggctttcgccaccgctgcagcggtatcgctggccgctttctgcgctgtggcggtatcacctgcagcgcggtctttcacttcctgcgccagcttgttggtcgtgtcgttggttttggcgatgttggcagccaggtccttgccctgctgcgtgacaatggccccctgcgcggcgacatccttcgccgcctggtcagcggttccctgggcggcgtccgcagcctgttgcgcggcgtcggcagcagcgctgttgtcctggatgcctttgttcagttcctcgtatgtatccgagcctttaagcgcgtcgtcgagctgctggtaa

SEQ ID NO: 99320 - DNA, 591 bp, Enterobacter aerogenes
ttgtaccgcgtcccaattggcctgcagggtttcgacgctgatcccctgattcaccacggagaaggacgtaaggaggatgccatctggcggagcctggttgccaggcgggataacactaatcgggcgctggtcgatgatcgcgccgttatcgatacgcgggaatttatccgggtcgtgagccacgccggtgatggtgagcgtgccgttattgttgtcctttacaccgaaaacgcggtactgctgaggcaccaggtcggtatattcgacgatccagacgcactccgcctctggcgtctcgctgtatgccgttgtgaccgtcacctgccgacgaccgttcaccgactgaatggtccgggcctgcgagatacccgacggcagattcagatgcaggcggtcgccctctttcgcatcaatatcacggtcgagcgtgatgacgcgcccattcaccgcgctgatacggccaccattaacccgcccggccagccgttcgtcgcccagcccaatgatgtaacccggctgtgggatcctgccgtcaagaccaacatcaatttcgaccatgcggtccttgttgttggtcagaatggcccataa

SEQ ID NO: 99321 - DNA, 690 bp, Enterobacter aerogenes
atgggcttcactctgccgtgtacatccaatggccgtgacttccaactgattaaagctgtaacgggaaaccagttccgggataaatgcgggttccatcgcatcggcataggcgttatccgggtcagaccacgaaaccagggcattagtgtaccgcgacttactggtgctgctggaataccgcgggctaccgataatatttgcgcgcgtatagttgaaatcaacatcacgcggcatatcggcctgtacgatgatctgctcaccactccagcaagtcatcccccggaaaattgcggcaaaatcacgcagtacggtgtaggcgtcgttacgctcctgaacatagacattgcagatataacgaggctccatgccatcgccgcccctgccatcgggaaccaactgatcgcaatactgcgcaatcgggtaaagcgcccatttggagatattcgcgctggtcagacgatcgccaagaccgaaacgctcagagacaacaatgtcgtaataaatccacgcagggttatcagtccatgcccatttgaagccccctgtccatgtgccggtatattcgcgcgtttccgggttgtagttatccgggacacggataacacgcccgcgcggctcgcaggagatttgcgggatagaaccattgaactggctggagtcgaattcgatgtacagcagcgcggtgtgtga

SEQ ID NO: 99322 - DNA, 300 bp, Enterobacter aerogenes; identical to SEQ ID NO: 25124

SEQ ID NO: 99323 - DNA, 489 bp, Enterobacter aerogenes; identical to SEQ ID NO: 25123

SEQ ID NO: 99324 - DNA, 1518 bp, Enterobacter aerogenes
atgtctgaacaacaagcacaaggtgccgatgaggcaattgaccttaataatgaactgaaaactcgtcgcgaaaaattggctgcgctgcgtgagcagggcgtcgcttttccgaacgatttccgtcgcgatcatacctctgaccaattgcacgctgaattcgatgcgaaggataacgatgaactcgcttccctgaacgttgaagtctctgttgctggccgtatgatgacccgccgcatcatgggtaaagcctctttcgtcacccttcaggacgttggcggccgcattcagttgtatgtcgcgcgcgatgacctgccggaaggcgtctacaacgaacagtttaaaaaatgggatctcggcgacattatcgccgcccgcggcaagctgttcaaaacgcaaaccggcgaactctccattcactgcaccgagctgcgtctgctgaccaaagccctgcgcccgctgccggataaattccacggcctgcaggatcaggaagtccgctatcgccagcgttatctggatctgatcgccaacgaagattcgcgccatacgttccgtatccgttcgcagatccttgccaccatgcgtcagttcatggttgctcgcggctttatggaagtcgaaaccccgatgatgcaggtgatcccaggcggcgcttccgcccgtccgttcatcacccatcacaacgcgctggatctggatatgtacctgcgtatcgcgccggaactgtatctgaaacgtctggtggttggcggcttcgaacgcgtcttcgaaatcaaccgtaacttccgtaacgaagggatctccgtacgccataacccagagttcaccatgatggaactgtacatggcgtatgcggattacaaagacctcatcgaactgaccgagtcgctgttccgcactctggcgcagacggtgctgggcaaaacagaagtgccgtatggcgaccaggtgtttgacttcggcaagccgtttgaaaaactgaccatgcgcgaagccatcaagaaacaccgtccggaaaccaacatggcggatctggataacttcgacgcggcgaaagcgctggcggaatctatcggtattcaggtagagaaaagctggggtctgggacgtatcgtgaccgagattttcgatgaagtggcggaagcgcatctgatccagccgaccttcatcaccgaatatccggcggaagtttctccgctggcacgccgcaacgacgtgaacccggaaatcaccgaccgcttcgagttcttcatcggcggccgcgaaatcggtaacggtttcagcgagctgaacgatgcggaagatcaggcgcagcgtttccaggatcaggtcaatgccaaagcggcgggcgatgacgaagcgatgttctatgacgaagactacgtcaccgcgctggagtacggcctgccgccgaccgccggtctggggattggtatcgaccgcatggtgatgctgttcaccaacagccacaccatccgcgacgttattctgttcccggccatgcgtccgcagaagtaa

SEQ ID NO: 99325 - DNA, 222 bp, Enterobacter aerogenes; identical to SEQ ID NO: 30135

SEQ ID NO: 99326 - DNA, 1146 bp, Enterobacter aerogenes
atggcacataaaataaaagcgctggcgatctcgatcggcgcagcattagcgttaacttcttttgcatcccaggctgagattacgctgctgaaacaagatccgcaggcgggcgatccgttaagccgccttaactttaccgtcggcggcagtattcgtccgcagttcaacatgatgaccggcgatggcgataaaggttcctacaagcgtaacggtttcgacggcggcacccgtttccgctttgcggctgattactatctgtttgatgatattagctggatcagctactacgaattgggcgtgaatattccggcgctgttcgattgggacaatcactacgcggaaggggcgaacaataccactcgtcgtatgctttataccggtctgaagagcgatacctgggggacattaacctacggtcagcagaacagtatttactatgatgtcgtcggcgtgaaaaccgatatctgggactacgatatgatcggtcaggctccgggtaacggtattaacggcgactacgatggttcttatcgttcacgcaatatgttgaaatataagaaaaccgtcggtgatgtcgatctgtacggatcctatctgtttgaagatagcgagtatctgccgggcgatggtctgcgctacaaacgtaaaggcggcgggtctatcggcgtggattaccacatcatgaaggacctgacctggggtaccgcgtggaactacacccgcgccgagatgcgcgacccgtcaagctccgatagcaaaacctacgaccagaatattgtcggtaccgcgctgagctggactccggataactggaccttctccttcggcggcggttggtatcagaacttcctgactaccaagaaaaccaatgtgcatgattacttcgccggcgatgcctggggtattgaatactttgccggctataaattcccgatcaatcaatacgctgttaaatctattcagccgtactttatgggcgaccgtctggagtacgtgaatggccgtaactaccagcgtattgataacggtttgggtgttagtttccagctggattacggtttccgtgttgattacgagcacgtgtttacctccagcaccgatgatctgggcgatatgaacctggtgcgtctgcgctacgacttctga

SEQ ID NO: 99327 - DNA, 783 bp, Enterobacter aerogenes; identical to SEQ ID NO: 80729

SEQ ID NO: 99328 - DNA, 987 bp, Enterobacter aerogenes
atgacgatagcgccttgcggggtgagcgtgacgcccgtcgcatccagtgccagcttgcgtgtgttgggcgcgcggccggtggcgaccagcagcttgtcggcgcgcagttcgccgtgcgccgtggtgagcacgaattcgccgtccccttcaccattgatatacgcgacctggctggcctgggtgtgttccctcacctcgatgccctccatgcggaatgcggccgtgacggcttcgcctatagctgggtcttcgcggaagaacagcgtgctgcgagccaggatcgtcaccttcgctccgagtcgggcgaacgcctgcgccagctccagcgccaccactgatgagccaatcacggccaggcgcttaggaatcgtctcgctgaccagcgcttcagtggaagtccagtacggagtgtctttcaggccgggaatcggcggcacggccgggctcgcgccggtggcgatcaggcagcggtcgaatgccaccacgcgctcgccgccgtcgttgagttgcacgatcaggttgcgattgtccttaaagcgggcggagccgtgcagcacagtgatcgccggattgccctccaagatgccttcgtacttggcgtggcgcagttcatcgacgcgggcctgctgctgggccagcagcgccgtgcgctggatggtcggcgtggtagcggcgatgccgccatcgaacgggctttcccggcgcagatgggcgatatgggcggcgcggatcatgatcttggacggcacacaaccgacattgacgcaggtgccgccgatggtgccgcgctcgatcagcgtgacacgtgcgccttgctcgacggccttcagcgccgctgccatcgcggccccgccgctgccgatgacggcgatatgcaatgcgccgctgctacccgtcttgtcgtttctgcccagcagatcgcgcatcttgtcgagcaatccgcccggcgtcgaaactgagggggcatcggccagcgtggcccgataa

SEQ ID NO: 99329 - DNA, 369 bp, Enterobacter aerogenes
ttgcaacagtgccgccgtatctgggtcctggaaccggagggacagcattacctggaaattccctaccgtaccttgtcgcatccggctgtcaccctctgggaacaacggcaggcgctggcgaaactgcggcagcaagggcgcgaacaggtggatgagtcggcgctgttccgcatgatcggccagatgcgtgagattgtgaccagcgcgcagaaggccacacgcaaggcgcggcgtgacgcggatcgccgccagcacctcaagacatcagctcggccggacaagcccgttccgccggatacggatattgccgacccgcaggcagacaacttgccacccgccaaaccgttcgaccagattgaggagtggtag

SEQ ID NO: 99330 - DNA, 171 bp, Enterobacter aerogenes; identical to SEQ ID NO: 34003

SEQ ID NO: 99331 - DNA, 333 bp, Enterobacter aerogenes
atgaatacatatattttcctgggaggggctattgtggctgaagtcataggcaccacctttatgaaatattcagaaggatttacacgcctgtggccgtctgtaggaactgcaataagttattgcgctgccttttatctgctttcccaaacattggaaaatatacctaccggtattgcttacgcaatttggtctggtgcgggaattgtactaataagcctagctggttggttggttagcggtcaaaaacttgattggcccgcaattgcaggaatgttccttatttgcgttggagttttggttattaatattttttcaaaatcttctgcgcattaa

SEQ ID NO: 99332 - DNA, 486 bp, Enterobacter aerogenes
atgaacagtcttttaacgctggcgaaggacttagagcagaaatcgaaagcgcagcagcagactaccggcgagatgctgaaagccgcattcagcgagcacgagaagtctgtcagagcggaactgagcgaaagcgagaagagaatcagcgccgccatcctcgaccacgaccggaagctgtcctcagccatgagccagcgcacgaaagggatgctgcgcatggtcagccagacgtggctgaccatcgttctggtctccgcgctgctgatagcgtcgagcgcgggcattctgtggtggcaggggcagcagatactcgagaactatacgaccatccgggagcagaagagcacgcaggccatgctgtcagagaggaacagcggcgtacagctctcgacctgcggcgagcagagacgccgctgcgtgagggtgaacccggaagcgggacagttcggagaggactcgagctggatgatactggcggggaaatag

SEQ ID NO: 99333 - DNA, 1260 bp, Enterobacter aerogenes; identical to SEQ ID NO: 64553

SEQ ID NO: 99334 - DNA, 339 bp, Enterobacter aerogenes; identical to SEQ ID NO: 30181

SEQ ID NO: 99335 - DNA, 480 bp, Enterobacter aerogenes; identical to SEQ ID NO: 30179

SEQ ID NO: 99336 - DNA, 474 bp, Enterobacter aerogenes; identical to SEQ ID NO: 52832

SEQ ID NO: 99337 - DNA, 774 bp, Enterobacter aerogenes
atgagcagatacactgaccgcataacaaactaccacgccggtaaaccaaagttctttgcccacgtcgacctatccaccaggccactgagtgatgtttccgatgccatgtcacggctaatacccgattttgatattgataccgccgtaggcgtgcaactcgacgttgtgggtgaatgggttggtcgttcccgtcgcgtggctacaccggtaaccgggatttatttttcgtgggacaccgagcgggttggctgggaccagggggtctggcagggcccatatgacccaagcgacggttttatcgatctcagtgatgaaatgtatcggctaatgctgaaggtgaaagtggcgataaacaactgggatggtcagaatgatacgctgccttcaattcttgatgccgctcttgccgggtccgggatccgcatggctattgtcgacaaccaggatatgtcgatttctatctggatactcggtgacccatcggtagccctaagtgaaatagaccggttaattctggatagcgccgtcaataaaggcccctttatcatattaccggcaggttacgtaccatcgcgctatgacattaacccgattgaccaggttaacagcgagctatggtgggcgattcaaaacggttatatgacggttaaggccgccggagttcgtgtccgtgaaatagagaccgtcagtgatggttatcagttttttggcttcgatatcgaaaatgaatatatcgctggtttcgaccgcgggtcatggggagagagattttaa

SEQ ID NO: 99338 - DNA, 1197 bp, Enterobacter aerogenes
atgtctttggacctcgacacactcggcttatcggcaacggtaaccgctgaggggataagtgcgcccgactatcagaccgttctggacaccatcactggttattttcagcagatttatggcagtgatgcctatcttgacccggacagcaaagacggccagatggtcgctctggtggctctggccattcacgatgcgaataacacggccatttctgtttaccggtcattttctccgtcgacggcgctggacgatgcattaaccagtaacgtcaaaattaacggcatcactcgccgtgctgcgacaaactctacggtcgatgagctgatcgagggtgaggccggaacgttaatcacaaatggctctgtgaaagatgccaacggcatcatctggaatcttcctgctcaggtgacaattggtattgatgggacggttattgctacagcgacgtgttctgttgctggcgctgtggcggcccctgccgggtcagtcaataagataaacaccccgacacgaggctgggtatcagtaactaacccgcaagcggctacggtaggcgttgctgccgaaacaaatgctgaattgcgtgtccggcaatcacagagcgttgctttaccgtctctgacgccgtttgaggcggtagatggcgcgatagcaaatatcagcggcgtaacgcgacacaagctgtatgagaacgatacagataacactgattcaaatggcctgccgccgcactcaatcgcggccattgttgaaggtggtgatgcgacggtcattgcgaacagcattcgtggtgtgaaagggcagggcgtaacaccctacggtagtacggtgattgttgtgcctgataagtacggaaatcctcacccggtaggtttttcaaggccggtcgatgtacccatttacgtcaaaatcactatcgacccccttactggctacacatcccaggttggcgaagagataaaggcggctgtatctgcctacattaactctctggcaatcggcgccagcgtccttctcagtcgcgtttactcaccggctaacctgggcgtcgttagtggaggtaatgccaggtattacgacattaccgagttgctgatcgggacgtctgccggtggcgtagccgcggcaaacgtggatattgcctttgatcagtcagcatcctgcgccgtcagcaatattaatctggtggtctcatga

SEQ ID NO: 99339 - DNA, 354 bp, Enterobacter aerogenes
atgcgataccgtcgagaagatgacgatggggattataccttcggtcagggtgataatacctggctggttaactcccccgaggctgtcgcgcaggccataaaaacgcgcttcctgctttggtacggtcagtggtttctggacaccacagaaggtacgccctggattcagtccgttctgggtaagcaaaaaccggatacctacaaccttgctatccgtaagcgaatcctcgaaacgcagggggttagttcaattactgcatttaataccaccgttgacagccgcacacggcgtgtaacgtttacagcaacggtggaaaccatctacgggacaaccacagtaacttcggaggcgtaa

SEQ ID NO: 99340 - DNA, 654 bp, Enterobacter aerogenes
atgggcgtatcaagccaaacccgtagtggggcgctggcggaggttctggcgtctgagcgaaagacgcttagcgagcaaatgcgcgtagcactgccggggatcatccagtcattcgacccagaatctttgacggctgttgttcagccagcgatccgctacatcgagcgcgacaacgacggcaacaaaagcacgaaggattatccgttgctggtggatgttcctgtcgttttccctcgcggcggaggctgcacgctgacttttcctgttgaggctggggatgaatgccttgttatctttgcggaccgctgtattgatttctggtggcagagcgggggcatacaggatccggtagacgggcgcatgcatgatttatccgatgccttctgcattgtcggcccgcagtctcaggccaagaaaatcggcggtatcagcaccagcgcagtagagctgcgcagcgatgacggggaaacaaagttgagccttaatcctgccagcggagctatcaacggcacggcgccgggaggttttaacctgaacgggcttaaaattctttcggacggccgcctgcagctggtggatggctcaatcgttgataagcatacgcatggtggcgttgagcctggtggcagcagtacagcaccactgggaggatga

SEQ ID NO: 99341 - DNA, 318 bp, Enterobacter aerogenes
atgggcttcagatttaggaagcggatacgcatagctccaggcctagcaatcaatatcagcaagagtggcgttagtacgtcgattggcccaaaaggcgccactaccaacataagtggaagaggaataaaaaccaccgttggaattccgggatccggtttgtcatacaccgttggcccagggaaaaaatctggaaaagctacatcggaagaggaattttcagaacaggaaccaacggctcaaagggaagggatccattggtggaggcttgcagttttcatcattgccgccatagttctatcgcaaatatttaagcagtga

SEQ ID NO: 99342 - DNA, 1068 bp, Enterobacter aerogenes
atgtctcagaactggatgcggcacttcgaattgcagttagtcgattcgaaggggaatgctactgattttggtagctttaagagcacttttactatcgactggtttaacctcagcagcgaaacgcgagtaggaacttttaaaatctataacctttcagctgataccgtaaaccggatcgtcggagaggaattctcccggattagggttatcgctggttacgatggcattgcagctgacgttcccgccagccaggtaggcgtcgtcaggacagtaaaccccgatgaagtcgggcagatggatggtcgaaattatgggctgattttcgacggggaaatccggtacaccatcacagggaaagataaccccgttgatagctttgtcctcattcaggcggctgattctgatcgggcattcgccacctcgatcactgcgcagacgctggcggctggctatacggtctctgacgtcaatgcagtgctcatgaaggacttcaacgctaacggggccacggaaggaaatacccctgcaatgcctgcaacggtgtttcctcgcggcagggtgctttttggtatgacccggcatctgatggataacgtcgccgagcaatgcaaggctgactggatgtttgtcgacggtaagcgggaaatggtggcgaaaaatgaggttgttcacgaagccattaaactgaacagcgccaccggccttgtgggtatgcctcagcagaccattggtagcggcgttaacgtccgttgcctgattaaccctaacatccgcgttaatggcctgatcgagctgaatcaggcttctgtgttccgtaccgcactggggaatagcgatatcgccatgacgcaggggcgtatcactgaccagaacaacaacggaaacatcaccattgaaggcaccactgcgcagcctgccagtattgcgactgacggcgtttatattgtccgtggcattatgtacactggcgacacaaggggccaggcgtggtacatggatatgatgtgtgaagcgcgtggcgcgatggatctaaaaactcaatcagcactggagagaggcgctgggtga

SEQ ID NO: 99343 - DNA, 303 bp, Enterobacter aerogenes
atgacgatcagcgaaatccctctttccccggaaaaccagcgattctccatatccgtggcaggtcaaagtctgcaaatggctgtgacctggcgtgctgctttctggtgtctggatattatggatagcagcggtgcggacctgataaaggggatcccgcttatcaccggcaccgacctgctggcgcagtatcgctatctcgggcttggcttttcgctttatgtgggctgcgacaaccagtccagcgaaaatcccactgaggccgatctggggatttatagccatctttatgcggtaacggagtaa

SEQ ID NO: 99344 - DNA, 576 bp, Enterobacter aerogenes
atggatattctttctactctctttcagcagcagagcaggcggatcgggctgatagtccccagtgttgttatttcagaaaagcacgatgactctcttgaaataaccgagcatcccgtagaggttggtgcagcaatttccgaccatgcatttcgacgtccttcggaagtggtaatgcaggtcggttttgctggtggcggttccttacttgacttcgtagatacatcttcgctcgggctgagcgtaggtattggcccgaaggagacttatcaggagctgttaaatctgcagagcagcagggtgcctttagatgtggtgaccggtaagcggatttacaccaatatgttgatccgtgcgcttgaggtcactaccgacaggacgtcggaaaatattctctctgccgtgctgacgctccgggaagtgattatcacaagcacaaccaccacgcaggtggctccaaagtccaatatgaagttaggggcgagcacctccgccgtgcaaaactccggggtgaaaacgccagtgcaaaaaaatgaatcaatattgagccggttaagtggctttgtagcgggagggtaa

SEQ ID NO: 99345 - DNA, 1917 bp, Enterobacter aerogenes
atgaacgctgaaacgctcaaggactttctgatctcgcttgggttcaaagttgatgaggctggcgccagaaaattcgatgccgtcgttgccgggacaacgcttaaagcgattgaactgggcgtcaaagttgaggcggcggcactttccgtcgttgcattcaccgcgaaaattgccagcggtctcgacgacctgtactgggcctctcagcgcacaggcgcgacggtggagggcattaagcagattgggtatgcggttagtcaggttggcggcagtgtcgacggggcccgcggctctctcgaaaatcttgccaggttcatgcgtaacaatcccggcgctgagggttttctgaaccggctgggggttcaaacgcgtgatgccagcggtaacatgcgggatatggcgacgatctttaccggcgtcggccagcgtcttagcagcatgccgtattaccgagctaaccagtacgctcagatgctgggtctggatgaaaacaccctgatggcaatgcgtcgcggtatcggccagtttagtggcgaatacaccgcgatggctaaggcgatcggctataacgccgatgtggccgccgtcagctctaataagttcatgacctcgcttcgctcttttgggctgatggcaggcatggcgcgggataaaatcagctccagtctcgctgatggacttgctggctctctcgacaggctgcgccgccagatactggaaaacttcccgaaaattgaaggcgcaataaccggtacggtgaaaggaattctctgggctggcgagatggtaggcagggtaatttaccgcctcatccagttgggtcagggtatcagcgactggtgggactctcttgataagcagtcgcagcagctgatcgaacttattggagcgctaaccgcagcgtggtggatgctcaaccgcgctatgctcgcatcgcctattacgtgggttctcggtcttgccgcggccatcgctttgctatgggaggattaccagacctggaaggagggcggtaagagcctcatcgactgggggaaatggaagcctgaagtagacgcagcactgaaaatggtcggtgacctgaaacagactgtcctcgatctcggaaaagcgctggcaaagttgctcaatatcgaccctaaatcctggtctttaaaatgggatttcagcaacttcattacccagatgggtgagtttagcaagatgctgagtatgatcggcgacctgcttaacgctatcaaggacggtcgctggtctgatgctgcaagtattggcagggctcttctcaaacaaggcagtaaccagcctgatgcgctgccaggcgtttctgacagtgccaatagcgcagctgactggataaaggataagacaggatttgacccgcgcagcataggccgtttcttccgtagcgaggggaatacgcttgcagatcgcaacaataaccccggcaatattcggcccgtaggcggtggtggttttcgtgcgtttggttctgcgctagaaggctgggaggccatgaaaaaccagctcatgcggtactttactggtaaaacgaccgggcgccgcctgcagactatcatggatatcgtcagcacctgggcacctgcggccgataacaacgatcctgccaaatatgcccgtgatgttgctggctggatgggtgtatcgccgacggcagcattaaacctgtccgaccccaatacgatggctatgctcatgcagtctatggcccgcaaagaggggtattcgaactggaatagcccgcttgcccatcaggctgctggagcgcaggtgaatcagcaaaacacctacaacatctatggtggtaatgctcaggaaattgggcaggaagtcagtcgccgccagcttgatgctaatgccagagtgctgagaaataaccaaactggagcaggatga

SEQ ID NO: 99346 - DNA, 153 bp, Enterobacter aerogenes
atgcgcccggtggatgccgggcttatcccttacaccgccctgaaagatggatcagtagacctggctgatattgcccgtatgaatgactggctggacctgaaagccgataacgaaaaccgtatagcgaaatggagagaggctaatgaacgctga

SEQ ID NO: 99347 - DNA, 450 bp, Enterobacter aerogenes
atggaatttgaaatcaaaggcgttaaataccgcaccgcaaagctcgatgttttccagcagttgaaggttagccgtaaactgctgccggtgctggccgggctggtttctgactttggtacgctgaaatccatgatggtcagagacagcgagggcaagctggttttcggtgagaaaagggcattcgacgctctggatatcgtcctgccgaagattgccgatacgctggcagctctgcctgaagaggacgttaacgcggtgattcatccgtgcctgggcgttgttatgcgccagcatgaaaaagggtgggtgaaaattttcgatcagggcgcgctgatgttcgacgatatcgacctgttcacgatgctgcagttggtggcgcgggtggtcgccgacagcctgggaaattttttgaaagaactccccggcagcgggacgcctacccagccatag

SEQ ID NO: 99348 - DNA, 441 bp, Enterobacter aerogenes
atgtctacgtattcgtttcttgatgtttcggcctctctcgcagggcctaccgggttagttgagcttggctacggctcagcgaacgccgaagagggcattactgtcacaatgacagaggccaaaaacaccatgaccatcggcgccgatggcgaggtgatgcacagcctgcacgccggaaagagcggcactatcacggtaactttgctgaaaacctccccggtaaacaaaaagctctcgctgatgtacaacgcacagagcctgtcctcggcgacgtggggcaataacgtcatcgtcattcgcaacaaagtatcaggtgataccactacagcgcggtcttgtgctttccagaagcaacccgatcacgctaacgccaaagtcggcaatacggtttcctgggtctttgactgcggcaagattgatcagctgcttggggagttttaa

SEQ ID NO: 99349 - DNA, 1152 bp, Enterobacter aerogenes
atggaaaaagggcttccccttaaccgtatcgctaacgtgacggtgacgctttctgctcgggccgcgcaggggcgcaattttggctcaatgctcatcctgggcgactcaactgttattccgatttctgagcggttgcgcctttactccagcgctgatgatatcggcgatgactttggtgtagacagccaggaatatgcagcggctgttatctggttctcccagcaaccgcagccgactcttgtgtatgtcggtcgctgggcaaaaacgctggccactggcgaaacaggcagcgcagaaagcctcctgcaggcggttaacgctttgctggactggaattcatggtatggccttcatcttgccgtgccggtagcggattatccttccgacaccgacattatcagtgtggcggcggctatcgaagccgcgagtgtatcccgcatctttggcgttacctcggcagattcaacgattcttgactcggctacctcgacggatctggcttccaagctgaaagcagcgaaatacagccgtacctttatccagtattcgaccagcagtcgctatgctgcgctgtcctcgtttgcgcgtgcgttcactgttgacttcaccggaagcaacacgacgatcaccctcaagtttaaacagttgccgggcgttacctacgaaaccctgggcacctcgcaggctaacaacctggaagcgaagaactgcaacgtttacgtgtactacgaaaacgatacagcgattcttgagcaaggcgttatggcaaacggcgatttcttcgacgagcgccatggcctcgactggttgcagaacgccgtacagacggctgactacaacacgctctatacgagcacaaccaaaatcccccagaccgacgccggtaccacaacccgtatcgccaacattgagctggtgctcgataaggctgtgcaaaacggtctctttgcgccgggtaaatggactggtggcccgattggccagctcaataccggtgacatgctgacgaagggctattacacctgggcagaaaacgttgatgaccagcttcaggtcgatcgcgaagcgcggaaaggtgtgccaattcaggttgccgggaaactggccggagccgttcattacggcaccgtcgcaatcacggtcgtgcgctaa

SEQ ID NO: 99350 - DNA, 552 bp, Enterobacter aerogenes
ttgagtaacgacagcacagaggctgggtatctaacccccgtcggggatgctcctgattacgataaggagctggaaaagcaactgagtcgctgggtaagaggcgttacggggattgcggttaacctggtattgccccggtttaccgatccccagtccaaaataccgccgaacggtgagacgtggtgcgggtttaacttttccacgctctcacgccccggcacacctgcaaatgtccaggtaagcgaagagcaaagcgagcaatggtcatgggagagcatccaggtgcttttctgtttctatggccccggcggttccgggatggccacgcggtttcgtgacggaatgtttgtagatcaaaacgcagatacgttgcgacgaatctcaggtttgtcgctggtgagcgctgatgatatacgaaacctccccgaattgatcaacaaccagtgggtgcgccggtatgaccttgccgtgaccctttcccgcaaaaacacccgtacctacaacgttaaatctgtcgttgaccctaacgtcacgatagttaccggagactaa

SEQ ID NO: 99351 - DNA, 405 bp, Enterobacter aerogenes
atgccgtttctcgatgtgactgatgttctgcttgatccggactttgtcgacctgtctctggtgtgttatcggcaggtgcagacggtggacgaagataattttccgaccaataccgcgcaggctattccgttctctggtgtcgtaaccgtcgaccgctcgcttgaggctaagcgaatggccgccgggcaaaacatcaatggcgccatcctcatcgttacccagttcaggctaacgcaggggatgcctgccagtgactcaacgccagaactcgacgctgatatcgttttatacagcggcagacggtaccgcgtgacctttgtcgatccgtacacccgatacggtgccgggttcgtgcaggcacattgcgagctgctggagtttaacggaggtattcccgttgagtaa

SEQ ID NO: 99352 - DNA, 507 bp, Enterobacter aerogenes
atgaaaagcgggctcacaattcgggaagacaattacagtgtcgttctggatgcgctgaaacaactgtcaggcactgatgtgctggttggtatcccggcaggtcctccgcgcgatgatgcgccgctgagcaacgctgagctggggtatctccagtccaccggggcaaccgtagagatagacggggagaccgtaactctgccgccaagaccatttctggacatgggcattgaggattcccgggataaaacgaccgagcgtttaaagctggccgctcagtctgcgcttgaaggtaaggcagatgtggcgtcgatgcatcttgaagccgcaggccagattgcgcgtgatgcctcaaaggctgtcattgaggcaggcgatcgtctgaccccactatctgaaaagaccatcaagaaacgcagagaaatgaaaccgcctatccctggcgataagccgttgcgtgcccgcggattccttttcagagcgattcagtatgtcgtgaggaaaaaataa

SEQ ID NO: 99353 - DNA, 420 bp, Enterobacter aerogenes
atggcaagaaatcaaagtctgccgacgcctgagcagttcagggcaaccttcccacagttcgctgacgaaacaaagtaccccacgccaatgatccaggctcgactgaatcttgctgatgccatgttgagtgagtcgcgctttggcgtggatatctttccctacatcgtcgggctgtatgttgcgcactacatgtacctttacgctgccgatatgcgtggtatggctgtgggtactgctggtggtgtaaatagcggcatacagaccgcgaaatcagtggataaggtttcagccagttatgacgcaagcgcaaccctggaccctaatgccggtttctggaacaacacccgttacggatcggagttctgggaatacctgatgatgtttggtgccggagcggttcaactggggacgccggaatga

SEQ ID NO: 99354 - DNA, 282 bp, Enterobacter aerogenes
atgaaaaagatttacgtactctccccgtttaacttcaacgacggcaaagagcaaaagcatttccaggttggcttccacgacgtcgatgacacggttgctgagcactggttcgtaaaagcgcactgttcaccggatggcgaagcgccagcgattgcagaagacccgcgcattgctgagttggaagcaaaaatcgctgagaaagacgcgcgtattgctgaactcgaagcgaaattgccggagactaccgataatggcaagaaatcaaagtctgccgacgcctga

SEQ ID NO: 99355 - DNA, 942 bp, Enterobacter aerogenes
atgccaatgacatttgaccaggcgacagtcgacggcactggtgcctttcttgtccatgagctggagcgtctcgatcagacactgaatctgccgctggtgaatttcacctggtcgcgcgatatccagttgcgtgaagacgtgtctattgctgatgagatcagctcgttcactaacaccacttttgctgctgccggtacgccgaatgccaacggcaaaaactggcttagcaaagccgcgaccgcgatggctggacttaacgtcgacatcgcaaaaactggcttcccgcttactctgtggggtatggagcttggctggactgttccagaactgcaggcagctgcgcaagttggtcgcccgatcgacacgcagaagtacgacggtatgcagctgaagtggaacatggacacggacgagcaggtttatatcggcgattccggtctgaacgttaaaggcctgatgaacctgacgcaggtaacgccgaccaacgcagcgaagacctgggcgacctccaccgctgacgaaatccgggcgagcattaatgccgggctgagtgcagcgtgggccaactcggcttactccatggtaccgacggacctgctgatcccgccggagcagttctctctgctggcaagcaccatcgtatccagcgctggtaaccagtcactgctgacctatctggaaaccaacaccatcgcataccaccagaacgggcgtcctctgaacatccgtccggtgaaatgggcgaaaggtcgtggcgtgtcgaactctgatcgcatgatgttctacaccaacgacaagaaatacgttcgcttcccgatggttccgctgatgagcgtgccgatccagtatcgcggcctgtatcagctcgtaacctattacggcaagctgggtgcagtagagccggtttatccggaaactctggcctacgtcgacggcatctaa

SEQ ID NO: 99356 - DNA, 495 bp, Enterobacter aerogenes
atgggtaatacatttctttaccggatgcctgcgggcatcgccggggcaatttctcgtccgcaggatctgacggttgaacctcaactgctggactcctccaaccttttccccgcttacggccttggcggcaagatttcctccgggaaatttgtgccaatcgctgcgagcgatacagcgtcggtgctggtgggcatttacgttcgtccgtatccgaccgccagccagccggataaagtccagcaggtaggcagcggtaaaaacttcaccggcgattgcctggtacgtggttacgtcacggtaaacatcggcgcggatgcatccggcgttgcgctgcatggcccggtctacatgcgagtcgccacaccatccgcctcaagccctctgggcgcgttccttgccgccgctgatggctcgaataccgtccagatcactaacgcttacttcaatggccctggcgacaccagcggcaacattgagctggccttcaatatttaa

SEQ ID NO: 99357 - DNA, 1203 bp, Enterobacter aerogenes
atgaaatatttctttaaaacccgcctgggcaatacccgctttcaacttgctgatgggtcagtcctgtttaaggacgtcccgatcgcaaggactggcgagcaggagtacgacgccacagagcggcctgagcttgtcccaaacgacagggggaaggtcatcgtacgccgggcaccagaagaggtgttcagcgagcgagccatggcgtcattcgaaggaatggcggtcactatcggacatccgcgagattttgacgggcagatcatctttgttacccctgataactggcgccagctggctcacggccacatccagaacgtacggcgcggcacggacgataagaccgatctgctgctggctgatgtcatcgtcaaaaccccggaagccctgcaggccattgatgatggtgatgacgaggtcagctgcgggtacgacgccgattacgaacaaatttcacctggtctcgcaaagcaatctgcgattaccgctaaccatctggcccttgtccctaacgggcgggccggtttccgttgtgcaataggggattctatgccaagcactactaaaaactggtttaaccggctcctgaaggcccgtaaaaccggggacgctgccgaaatggcaagtctcattgataacccgcctgatgatgtcacgggcgataacgatgtatcgacctctatgacacccggcggagtgatcattaaccttgcgccgcaaaatccactgccgggcccggcattacctggtaccggcgatggcgaggaagaaattcctgcatggggtaaggcgctgattgaggcggtagccaaactcacgcctgcggcaactgctcctggtaccggcgatgccgaggacgaagaggagaaaaaggaagaagagggtaagcttaccggcgatgccgcttaccgcgccgatctgattcagcctggcatccagttgccagaaaaggcgaagccgacagcattcaagcgtcaggtgctcgcctctgccgatcaatctctggtgcgctctattgtcggtgatgccgatatcagcaagctgaaaaaagccacggtggatatggctttcacagctgtttctgagctggctaaaaaccgcaataccaaaaccgtcgacagcctgcaaacgcagactgccaccactgttaaaaccattgccggtatgaatcaggccgcgcaggaattctggtctaaacgaggctaa

SEQ ID NO: 99358 - DNA, 195 bp, Enterobacter aerogenes
atgaaaaaggtccatatcgaatcaaagcgagccggcgaccgcagggttatcgaaatatcgataggcggcatcaccgcgcgttaccgcgccattggcgatctctcagagttaaaagccacaggtcgcggtaacgtccgccaggttaaggcgctgctacgtgagttcattcgaaactccgaccccgcgctcatttag

SEQ ID NO: 99359 - DNA, 573 bp, Enterobacter aerogenes
gtggtgatcgacgactgggccgaaatggtcggtcgaaagatgtttgcccaggtggagcgtgaagagtggaatcagtggcgttctgtttcggaagaaatatccgctggtctgcgtgacgtgattagtaacactccagtcggcatggtggcgcaagacatcgtttaccgacagattcgctacatgaagtctctgccattagaggcggccggacgtgtcagggaaattcaggagcgtgcgatacaggctgtcattcatggtgagcgccccgatcagctttacgagatgatcatgcaatccggcgacgtggcggccagcagggcgcggatgatagcccgcactgagataggccgcgccactaccgcattaactcaggctcgggcactgtccgttggttctgaggggtactggtggcgcatcaagggggctggtaccaggccatcgcaccgaggaatgaaagataaatttgtgcgctgggataacccgccaacgcttgacggtatgaccggccacgccggatgcctgccgaactgcgactgctggccagaagtgcaaatacctgaccctgtaaaataa

SEQ ID NO: 99360 - DNA, 1452 bp, Enterobacter aerogenes
atggcgaagaaaacaggacgagtcgccacggcggattcgtacgataactttgttgcccgtgtcggtatgcagcagcctaatcagcatgccgcatcgacctacagggcgaactataccagccgcaaccgcctgctcatcgagtgggcttatcgttcctcctggattattggcgccgcagtcgattcgaaagcggacgatatgaccaaaaagggcgtgcggatcaccagtgagatagacccgaaacgccgtggcattctggaatcgcggttcgatgagcttcagctttgggattgcatcaacgagacgctgaaatggtcccggctgtatggcggggcggtggcactgattctgattgaaggtcaggcaccgctgacgccgctggtgctggataaggttggcaagggcagctttaaaggtctggctgtacttgaccgctggatgattaacccgcagctcaccaggcgcattaaggcgcttggccctaacctcggcaagcctgaattctatgaaatcgtgacgacagcgcaggggcttcctccttggactgttcaccacagccgcctgatccgtatggatggtgtgaaactgccgtaccagcagaaaatcaccgaaaacgagtgggggatgtccattgttgagcgcatcttcgatcgcctgacttcctacgatagcaccagcgtcggcgccgcccagcttgcctacaaggctcatttgcgaacggcaaaaattaaaaagctgcgtgagattatcgccacgggcggcaaggcgtttgaagcgcttatcaagaatatggaaatggtccgccagtaccagacgaacgagggtatgtccctgtttgattcggaggacgaatttgaaacacattcttattctttcgcgggcctgtctgacctgcttagcgagtttaaagaggatatcgcgggcgctgttggcattcctcttgtccgcctgttccgccagtcaccgaagggtttttcaaccggtgacgctgacctcgcgaactactacgacgacgtgggaacgcttcaggagcgagatttacggcctcacatccgcctgttattcgatgtactgcatcgctcagagtttggcgatccgttgccggaagatttcacctttgagtttaaccccctgtggcagatgagcgacaccgatcgctccacggtggcgaccaacacgactaccgctctggcaaccgcggtgcgtgatttgggaatgtccccggctgctgcgctgaccgatttgcgcgagctgtctgacgttaccggcatcggtgcttcaattagcgatgaggatatccagaatgcggcgaaacagtggcaggagactgaatctgaaaccagccctccgccgccgatcggaggtccagtatcagaaaagcctactggcgatagtcgaccagataaaccaaatcgttacgggctcctacgatggttcacaggcaagcgctga

SEQ ID NO: 99361 - DNA, 207 bp, Enterobacter aerogenes
atgattaccctttccgctcgcccggaatcgctgaccttcgcgccccagcacagcgcgctgatcgtggtcgatatgcaaaacgcctatgcaagccagggcggatatctggatctcgccggttttgacgtctccgccacccggccggttatcgataatattaatctcgcggtggccgccgcccgcgccgccggcatgttaattatctga

SEQ ID NO: 99362 - DNA, 393 bp, Enterobacter aerogenes
atgcctaaacaggtgataattccccccggcactgctacgccgattgccccctttgttccagggacgctcgccgacggagtggtatatgtctccggcactctgccgttcgataagcaaaacaatgtgatctaccccggcgacccaaaggcgcaaacccgtcacgtgctggagattatcaaaagcgttatcgaaacggcggggggcagtatggcggatgtgaccttcaacagtatctttatcaccgactggcaaaattacgccgcgattaacgaggtttacgccgagtttttccccggtgataaaccggcgcgtttctgtattcagtgcgggctggtgaaacccgatgcgctggtggaaattgccagcgtcgcccatatcggtactccaacatga

SEQ ID NO: 99363 - DNA, 1128 bp, Enterobacter aerogenes
atgttaagccccctgctccgccgttatacatggaatagcgcctggctatataacgccaggatatttattgcgctttgtggcaccacggttgcgccgtggtggattggcgaagtcaaactcaccatcccgttaacgcttggggtggttgccgcggcgttgaccgacctcgacgatcgccttaccgggcggttacgtaatctcgctattacgctggtctgcttctttattgcctccgcgtcggtggagttactgtttccatggccgtggctgtttgctattgggttaaccctgtccacgacgggttttatcctgctcggcgggctgggtcaacgctatgccaccattgctttcggcgccttactgatcgctatctacaccatgttaggggtcactctgtataacagttggtacctgcagccgctctttttgctggctggcgccatctggtacaacgtattgacgctcgcagggcatcttatttttcccatccgcccactgcaggataatcttgcgcgcagctatgaacagctggcccaataccttgaacttaaatcccgactgttcgatccggatatcgaagatgaaagtcaggccccgttgtacgatctggcgctcgctaacggcaagctggttgcgatgcttaaccagacgaaagcgtctttactgacacgcctgcgcggcgaccgcgggcaacgcggcactcgtcgcacccttcagtattatttcgtcgcccaggacattcatgagcgtgccagctcatcacatattcagtatcagacgcttcgcgaccatttccgctacagcgatgtgatgttccgtttccaacggatgttgtcaatgcaggcgcaggcctgtcaaaaactttcccgcgccattctcttacgcatcccgtatcagcatgatgcgcactttgaacgcgcctttatgcatctggacgcggcgcgccgcaagatcaggtcaaagcgctgggttttctgctcaataacctacgcgctattgatgcgcaattggcaactatcgaatcggtgcagaccagcgtgctggccagcaaccatcccgaaaatctgcttgccgacgatcgccctagcgggtttagcgatatctggttacgactgcgcagcaatatga

SEQ ID NO: 99364 - DNA, 483 bp, Enterobacter aerogenes
atggcgaatcaggatgccttgacggcgaccgccaaccgccgggcgctggacaattttttagcgcaggcctgggaacgtaaagagccgctggcgctgatcatcctcgatgtcgacttttttaaacgttataacgatcactacggtcaccaggcgggagattactgcctctcctgcatcgcctccgtgctgaaaatgtcggtacgcgcgcaggaggatatggtggcgcgctatggcggcgaggagtttgtgattgtcctgccgctgcaatcattagatagcgccacggcggtggcgcagcggatccaacagaagattcgcgaagcggcgctgccgcatgccaaatccgatgccgggccgctagtgacggtcagtatgggtattgtcgcctcggacgggcgcgtcccggcgtcagagttaatcgcgcaggcggatgctgcgctgtataaagccaagcaagaaggacgtaatcgatggtcttattag

SEQ ID NO: 99365 - DNA, 294 bp, Enterobacter aerogenes
ttgataacttacctaagaaggattggtttcgcgttagcccttgcctctggattattctgcgctataaccatcgctgatggcgtcggtagagtttacagaagtgatctagaaatgatggtgtacttagtattattagtatccatttataattgtgttgcttattttatattcgaaataaaacccgatggtaaaaatggcgaaactaaggggagttttatttcgttatggttaaaaagaaaaaaacttgaagaacagaatcggataaacgagctggaaaataaaaataacaattag

SEQ ID NO: 99366 - DNA, 150 bp, Enterobacter aerogenes
atgtccctcagcgagctctatttgacggcactcgttctcgatcaaccctgtgattgcttcgttgagcgttccgccataagtcggcatgttgagaacaactccaaatccggggatttctttttggattggcttcgcatccttgggagctga

SEQ ID NO: 99367 - DNA, 1542 bp, Enterobacter aerogenes; identical to SEQ ID NO: 30088

SEQ ID NO: 99368 - DNA, 177 bp, Enterobacter aerogenes
atgtctgtaaatactgaaacgaaccccgcgcaggggcaaaccgccgtaatgaacaaagaaagcgtttacgcttctctgtttgaaaaaatcaatctgagcccggcatcaagccttggcaatattaatgtctttctggacgatgcggcgctatcagaggccactgcggggaacgcctga

SEQ ID NO: 99369 - DNA, 873 bp, Enterobacter aerogenes
atggcacaaccgcaaccgctgtttgattacgtcgggcatctgccggaatgcccaacctggagcgatgccgagcaggcactgtactgggcggatattctggagtgcgaaattcaccgctacgatacacgcagtaaagagcaccaggttctgcaatttcccgaagaagtgggctgttttgcgctacgcgagaagggcggttttatcgtcgccttacgtagcggtatctggctttgtgatgcccgcggtctgctgcaacgcaaaatctgtgataacccaagtaacccggatctcgcgcgttttaacgacggcggcaccgaccgggatggccgtttttacgcaggtaccttctgggggccgggggattacaatggcgcgctgctggtgcgtattgataacgacctgacgccaaaggtggtgcagtgcgatattcatggtgctaatggtctggcgtttagcgacgataagcgctggatgtatacctccgatacgccgaacgcggtgatttaccgcacgccgctggatgagcagggcgagccgggcaaacgggaagtacttcgtcgtttccatcctggagaggggatccctgacggtgcggcggttgatgaagaaggctgttactggagtgcgatgtttgacggctggcggattgcccgcttttcgccgaacggagaacaactggaagagtatcgcgtgccggtgcgttgccccacgatggtgtgtttcggcggcgcggatatgaaaacgctctatatcactaccacccgggaaaatatggacgccgacgaagtggcgcaatatccgctttccggcgccatcttcaccctgccggttgcggtggcagggatgaagaaacggcaatttattgaacgttaa

SEQ ID NO: 99370 - DNA, 540 bp, Enterobacter aerogenes; identical to SEQ ID NO: 19206

SEQ ID NO: 99371 - DNA, 195 bp, Enterobacter aerogenes; identical to SEQ ID NO: 36234

SEQ ID NO: 99372 - DNA, 306 bp, Enterobacter aerogenes
gtgaccatctcattaaatatcctggcctggcttggtccggcaattggccctgaggcgtttgaagtcggtgcggaagtgcgcgaggctttcatcgccaaagatgcccaggcgcagagcgccttccgtcctgccggtgaaaaatattttgctaatatttatcaattggctcgtcagcgcctggctaacgtcggcgtggagcagattttcggcggcgatcgttgcactctaagtgaaaaagatgattttttctcttatcgtcgcgacaagaccacaggtcgtatggcaagtttcatttggctgatataa

SEQ ID NO: 99373 - DNA, 267 bp, Enterobacter aerogenes
atgccggtcctcactgatgaagaagtgaacaccgtacgggaatcgtgccggcagcttggagctatcggccggaacctcaaccaggtggccagggccttgaacatcgagttcagggaaagtgacaagctcaagcaagaggccatcgaaaaactggccgaacggatcgaccagcatttggaccatgtgtctgagctgttcgataagacctggagccggtggcacgattgtcattttcagaagacgactgcaccagttgattgggcgtaa

SEQ ID NO: 99374 - DNA, 330 bp, Enterobacter aerogenes; identical to SEQ ID NO: 92578

SEQ ID NO: 99375 - DNA, 1317 bp, Enterobacter aerogenes
atggccgctaatcttaccgagactgctatacgcggattgaagacaaaaagcacgtcgtactacgtgtggagcaacagtactcagcgtggtaccggcaggcttggcgttaaggttcagccttcaggcagcaaagttttttatttccgttactacgttgagaaagggaagaaagagaaattcattcagttaggcatctggcctgagatgaaactggtgacggccaatgagctggcgaaaaaatatggtgcctggcttattgaaggaaaagaacctcagcaagagcttgagcaacagcgccaggccgaacagcacattatgcagatccatcgttctcaaggatcgtttgaagaactggtgcatggctatgttaacaagatgaagctcgacaataagcggacctgggccgatgtcctgaagcgtcttgaaaaagagtgctacacggttatccctcgggaaaccaaagcgaaggatgtaacacctctgcagatcaaaaccatcctctcaggcattatccagcgtgatgcggtggtccatgctaaccggattcgctcgtatctgatggcagcatttaactacggcttaaaagctgataacgatccgatgaataccagtgtgggtattacgttcggtcttgaagtaaatccggtatcggccataccgaagcagtcctcagcggagaaagtgggagatacatggttaacgctagaggagctacgttttgtcatggagcagttcgctcaggcaactaacgttgggccgctgatgcagcacctaatccgcttctgtgtttatgctggcgggcagcgaccatttgaaatgattgccagccagtggagcgcgattgactggcagcaaaagacgttgctggttatagctgatgtatcgaaaaacaagcgtgagcacctgatcccgctgactgaatcggcactacaggaattaacctcagtgaaagaactgactaaggaaagcaagagttcctatatcttcccactctcgaccaatggagagcgcccggtacgtaccgatagcctggcccgttccatcatgtatttccgtgcttttaatcctgagtttaaagtttttacggcacgagatttacgtcgcacttgtaaaacgctgatgggggaggcggggatcagcaaagagatccgcgaccgtatccagaatcacgctttgaatgacgtcagctcgaaacactatgaccgctatgattatctgactgaaaagcgcagggcgcttgagatctgggaagatagggtcaacaactatcagcgacagcaggaaaacaacgttgtgaacttgtttggacggaggtga

SEQ ID NO: 99376 - DNA, 615 bp, Enterobacter aerogenes
ttggcaaaatatgagcttaattcagcagaagagcgatatcagccaggcgctggagacttggtactggctaataagctgggaatcattgatgaacaggaaatggaggcgctggagtctggcttgctgctgatgctttatgagcagctatttattgagggccagcctcctgaggtgctggcttttgagtacatcagcaggtggcatcgccaatggttggggaatgtgtatgactgggcagggaggctccgtaatgccaatctgactaaggatggctttcagtttgcggctgccgacaggattccgctgctgcttgatggcttcgagaagcagtttctttctcagtctggtgagctgacatccctgactcgttcggagctggttagttacctagctgaatgtcacgttgagtttattttgatccacccattcagagaaggtaacgggcgtctgtcaaggctactttgcgatgtactgtcggttatggcggggaagggtttactggactacagcctgtgggatgagcacaaggcattttacttcaaggcaatacaggcgggtgtctcagggaactacagccctatgatgcaactggtgagcgatatcttgccagactag

SEQ ID NO: 99377 - DNA, 159 bp, Enterobacter aerogenes
atgacaaaaaaagcagcacatactcagatcaccagaactcaaatctaccgcgctgttgccagctcaaccgcgatagaaaccggtgtttctgtgcaaaaaattgagcagcaactcaaaaaaaatcaggcacaggctaaagccgttggactcgcccgctag

SEQ ID NO: 99378 - DNA, 1068 bp, Enterobacter aerogenes
atgacaagtaaatccgttttttttgatgcttctgagctgtttaatattcctgagcagcttgatgttcctgatagtttttgtagcattggcgagttttcaaaaaaatttaaagtgaggctggaggatatcatatctacatggctggatgataaaataagtctctatgttaatcttcgttcagaatactgccgaataattcgttatgctagtaaaaaagaatatcgttatgatacgtttgatatcagtgttggtagggatttttatcaacatgaaacaagtcctcaatctaaagtaaggaagtttattccttgtgggcaatctgaaataaatgagtacccagtttttagcggtagttcattttttaaatatgtctacaatggatattccagtggtttttggcgagtaaaacctacaaaaattacccacttagtaagagatagttataaccttagaaatgctaatgaggtatggggaaatactcctggcgaggttacagtgtatggtcgtgatgacaaagacaatctggcttttaataaagatatatttattccccatactgagctacagattgatggcgatagctataaaaaacttcttaaattgttagcacccgaaagtagtgagtttaaaaaggcagaaaaaagttatatccaaaactttatcactgctatattaatttataaacattgcagaaaacgtgataataaactgaaggcgatgactgcaacaggcatcttaaattcacttagaaattcttattgtgaagagattgaagaagttaaacggtcaacagttgatcgatggtttgacgagtatttcgataaagagagagattctctcacaccattaaaaaatggagggtggtctcaaaaaaaagatgatgttatatccattgtagccagatcgtactactggaatgataattttgatgtgatgtttgaattgattgccaatgatttgttagaggaggctgggagatttgatttacaaaaagcaattacccaaaaagaattaattgattatctaagggatgtttgttttttttctgcgcataaaactgctcaataa

SEQ ID NO: 99379 - DNA, 237 bp, Enterobacter aerogenes
atgaatacaacatttacccccccacccgctgaaaaacgacgacagatcttgcgcgattacggtgagaaaggcgaccgactggtacgggaaaaagaacgccagtatatcacgtccatttctcggtcaacagcctggaaactggaacggtcaggtaagtttcctaaacgcaagtcaattggtctgaaatcctgtggttggttattaagtgacctgctctgttggatcaatgaacgctaa

SEQ ID NO: 99380 - DNA, 1410 bp, Enterobacter aerogenes
atgtcaggaaataaatcttttcctatacatctgtttccagcaagaatcgggcatgcaatttatgaggtagagcaacaaactcaggctccacttcctttgattgcagcagagatgcttggcgtgatttctctagtttgtcagaaccagattgatgtctgtcggctgaataatctgcgtagccctgtatcgctttttattgtgacaattgcggaatcaggggaaaggaaaagtacagtgagcaagcttttaatgaagccgctgtatcaacaagaagagcagctttttgagcaatataagcaggagttcattgactggcaaaataacgtaaggatcttcaaggtagaagaaaaggccttgatgtcaaagctgaagtctgagattcgccgtggtaaagacccatcagcgacacgtgagtcgttgaaaacacagcaagccagttgtcctatagaacctgtcaggcacaagtggatatttaacgatgttacacctgcggcgctaaaagagcatctctgtgggcacaataggtcagttggcatgatgtcagatgaggccgggagtgtttttaatggttatacattaaatgagttgccactcattaataaaatgtgggatggggcaacttattcagtagaaaggaaaaatgagccagagagattaataaaagatgcccgactgacgctatctctgatggttcagcctatggtcatgaacgggtatattgagaagaaaggtgagatggcaaaagggataggattttttgctcgtactctgattagtcatccctactcaacgcaaggacagaggaaaatagctaacccggttgtttctagcgagcacttaccagtatttcacaaacgattaatggagatcgtggatgaaggcatgattcgccagggtgaaagaatttgtttgcacttttctgctgaagcagaactagcatggattgatttttataatcgaattgagtcagaaatggggtttatcggcaatctgtcagactttaaagattacgcatccaaagtagcagaaaacatggcaagaatcgctgccttgttgcactacttcaacgaagataaaggtgatatttctctttttgccgtggaagctgctatagcgatcagcctgtggtatgcaaatgaacacgttaaccttttttctaaacctaaggagtcgatgatgataaatacagatgctgatgagttgtactggtgggtaaaaaattactgtagccaaaaccttttaccgtacatcagaaaaaacactatacagcaatatggtcctaatcgattccgggataacaaaaaaatgacggagcttttaggtatgctctattctcaaggtaaaataaagacctataagaaagggaggactatttttattcagcctgtggatatattggatgtgatttaa

SEQ ID NO: 99381 - DNA, 621 bp, Enterobacter aerogenes
atggaattataccaaggttcccatggtgatcacatccttgcataccgagacagagttactcaaacagttagtaatgctatcaatcaatttcctcggacaatggcattaagggtggatcttcattatccacctatttgggataatggtgatacgatatgctgttttcctaaccttgaacctggagcgatatcgcgttttctgaattcgtttaaagcgattctggaagcatatgaacatcgcagaaagtttgcagggatcagagttaacaaaaatgttgtacgaaatgtctggacaagagaatattcgaagagtggtaaatgtcatttccatatttgcttattctttaacaaggatgcttactatcatttagggcatcttaagcataatggtacacttcgcaacctgatagttagagcctggtacagtgctctcagactagaaactgaagattgtcgtgatcttgtgcattttccggacaattgtcggtatgtacttaacgtaaatgatcctgattttgacatcatatacaatgagttgcttgaacgactggattacttgaccaagctcgatacgaaagtatttggtgagggagataggagtttcgggtgtagttggggataa

SEQ ID NO: 99382 - DNA, 993 bp, Enterobacter aerogenes
atggcaaagcgaacaaatagcgtcgataccacgtttttttctcttgagctgttgcgtcgtattccgcgcagtcagcgcattaccgcccaagagttgcatcagcaacttacagatgcgggaattgagcgcaatgtgcgtaccattcagcgccagcttgaacgccttagccagcacttcgatctagagtgtgatgatcgctgccgcccctatggctggcgatggcgggtaggttcgcgaggcctgagcatggcgcagctatcgccagcagaatcgctgctgatgcaaatggcgcaggcgcatttaaagcatctgctacccgcgcatctgatggcttcattttcgccgttttttagtcaagcgggacacactcttagccacagcgaacaggcgcagcgagagcgggaatggtcgcagaaggtgcgggtggtcgctgccagtcagtcgctcctaccaccagtgattcaggaaggcgtgtttgacgcggtcagtgaagcgctttatcacaaccgttggctgaatattgattacagcaatgctcacggtactcgccgtcaggcggaggtgatgcccctcgggctagcgcaacagggctcgcggctgtatctggtttgccgctttaaaggctacgataacgaacgcagtctggctctgaaccgcattacctcggcggtctgcagtacctttcactttgcacgccccgcagattttgacctcaaacgttacgacgatgatgggcgcttcggattcggcgaggggaggagtatccgcattcatttcaccctcgaaactgcgcgggcgcaattgttgctggagtcgccactgtcagcggatcaacaggtcagcgagcttgaagacgggcggctgcattttagcgccacggtcatcgacagcccgatgcttgatggttttcttgccacctttggcaacaccattagcaacattaaacgcgaaacaaacaatgtcagtacagaacaggaaaacaatgatgagtaa

SEQ ID NO: 99383 - DNA, 1215 bp, Enterobacter aerogenes
atgatgagtaatggtgatcgtcaactgctgccagtattacgcgatgcatcggatagcgaattggccccgctggtggaatacattacgaaggcgttcagcaacggtattgagagtaaagcacgttataaaacccattaccccgtacacagtcagtatgccgatctgattgcccatgagctgtgcgagtttggtggcaataccgtcgtaaatctgtttcgcggcggcggcccggagtggaaaaccgtggtgatcgatgtggcggacaagtttgacgcgacctacgagaaggactggagcgttgatcgtatcgaactagctgtgctggcggcaattactcgcaaggcttggtcggatatggaccaagatcaacgcaaaaatctgcttgaaaaaatggatcttactcagggtagtacgatgcttttcccagaagcaaaattaatgacgcagttgcagtctagtcgtttctcaagtttgctcttggcatcgttaattgccaacgtctttgccagccaactgctcggacggacggtggtgatgtccgcagcctcgtttgtggctgcgcgaggggccgcttctttcctggggccgattggctgggtgattactgggctttggaccgccctagatctggcgggaccagcgtttcgcgttacgatccctgcagtcgttcaggtagcactacttcgccaacggattcatgctacagcggaagccgataaagtttggtgggagtatcatcgctggcaggacgagaaagatgctgacagttgggtggcgaacatgtttcgtatggtaggactctctactgcagccagtgtaaggcgtgagcgcaatatggcgtttgagcagggagtggtggccgggcaacagcagacgagggaagaatatgcagataagctcctcaaaaaaatggatgaagttaagcgttttgaaaaacgttgtgaggcaatgctggctgttgcctttgcttgtgctaaagaggaaggcatcgcgccgtctgacgtgcgcagcgatatcgaaacctgctgcttggggatgatgagtgggcatctttcctcgatattacaagccacaattaatcgtcttattgccaatccgcctgatatccatactgcgcttgaacaagcgttagagttaggtattcaggaaactgaggctgctgagctaatgacggtgcttcgtgaggcatttagtcagcatgcaggtgcgtattaa

SEQ ID NO: 99384 - DNA, 1587 bp, Enterobacter aerogenes
atggacagaaaaacacttttattgcgtctgaaccagcagcgtcagcgacagacaagcgagctcataccatcaccaacaaaagaggtcgttaccttatccgatgtcagtgcttggcaggcacatcagcaagttcagcagtatcaacagaagtggcgcacggaacaaaccacattgatgctggctgagtgccgacagcgtcttctgcatagcattattggtccgtttgggctggggagtattgtctctgcgtgggacaaagtggggggaaatgttgataccattcataatgttcgctccggggtgtatgccacggaagaggagcaagtgcgttatgaaagtcgcggtaagtacaacagtgatccataccataagcatgacaactacaagaagaccaacgccgaaaacagtaaaaaacaggatgcaggcgaagcagtggatgcctataccggacaggcactgagcaggaataccgatgcggagcaggatcaccttatttctgcctcctctatccataacgaccctgcggtttggctggcggaagccaatggtgcggatctggcgaaccacaaaaccaatctgcatcagacgcaccactcgatcaatgaatcgaagttgcaaaagagtgcagaggagtacatagcctggttgaacaaaaaccgcgccgatcgcgattccaaaattgcccggttggaagagaaagccaaaaatgagcctctaagcaaaaaagatcagaacgcactggagaagtacaaacagcagaacgccgtcgatcaggagaagttgcgcgagctggatgaagcggcacgcaagcagtatgaaagcagtcttcgttggggctactacggtagtgcgaaattcggtgcatatttactgaaaaccagcgctgtcgaagcggggaaaatgggcctacagcaggcgattggcctggtgttgacggattttgtcgacggcctgttgttggaagttcacgacagttggcataacgggttttgtgatggggttgaccaggagcatgtgtgggaggcattaaaaatccgtgctgggcgggtggcaaagagctgtctcgataactggcgcaacgtgctaacggcgttccgtgacggggccatcagcgggatcattagtaacttgatgacaacgctgataaatactttcttcaccaccgcacgcagcctggtgcgaatgatccgtgaaggggttttttcgttgttccgcgcagccaaaaccgtactgatgcgaccagagggtacaagccgtgctgaagcactagatgcagggctgaagattgccgtcagcggcgcattcgtcattggtggcgtactgcttgaagagcacctcagcaaaactctcggtgcgctgcttaccgttctgcccggtgggctgatcactaccctagtggctgtgttgacggggtgcgtcaccggccttggtaccgtattaacggtttatatgctcgatcgattagatctgtttggtgcgcagcaccagcaggaagacaatgcagtactaacgatgttacaggacggcagggcgcaggccgatgcgcgtttgcaggctctgttgggatcggacccgaaacctgtctaa

SEQ ID NO: 99385 - DNA, 1029 bp, Enterobacter aerogenes
atggatttacatggtcatttgctttatgtggatatcacccagatctgcggcatcggctgtgcgttctgcatgtatgcggataagcacgtaacaggtaagagtatggtgctgtcaacgcaggcacgtgacaacctgtcggcgctcattaatgatccatctgtaaagcgtatttccgtgagtggcgaaggtgaaccgctcaataacattcataccttttatgacttactggcgttgtcccgagggggcaacagctttgagtttattaccagcggtttttttcgccatgagaagatggaaaagatttttgatgagatcaatcgtcttgtctccgccaagggtgatacctgtaatattcgcctgagttcagatagccaccatattgaaaaagtaaaatggcgtgcacatggatttagcctggattatgttcagcgcaaaaaaccgtcatcgctcagtttttcatttcgctcaattgatatcgatcgggccttcactcgcgaatatctggtgagtgaactggcctcatggggaattaacgccagcataaagccagtcagcgtactggaagacaaattattaataggtgcggacacgtttaacatcgactacaaaaatctggttcatcctgcaagagatacgccggaggggtatttggacttgcaggggtatattgctgcgattgagtcgaaagtggataaaccttttacctttggcagcctgaaccgcgcaccccagcccaatggcatggacgtgacaattaaacccaacggcgatgtgtttctgtacggtattgagaccgagcgtgttgcaaatatccattctgatacgatcgactggcatcatctggcgagccatgtgcgggaaaatcccttgtcgcgcgcattatatacccagccgttaaccgaattgctggcgcggctggaagacaccccgcagcttcgcgcgatcatcgcgaccgccaataatccttactggctggttaaagagatgggaaagcattctgggttgcttgaacaatggaaggccgcatga

SEQ ID NO: 99386 - DNA, 846 bp, Enterobacter aerogenes
atgattgattcgcactgccactcgttctactcgaaacatgctgtaggtaccatcgacgaacttgtttgtgcctcgattgctgcgggggtgacagtactcaccatcactgatcatgctccgttcccggtggatgcgcagaaccgtttgctggaatcggaactggagagctatttcaccgatattgataaggcgcagcaggcctataaaggcgatatcacgctgctacgcggtctggaactcgattatatgccgggtactgagcgttatacccggcaattacttgcccgctatccaatggattttgtcatcggttcaattcactacgtcactgttgccaatgagccggtggtgaaggtctgggaactgccccggttagcggcagactcctttctggacaagtactttgctcagcttgaagcattgctggaaagccggttgtttgatgcggttgggcacgctgacacgctactgcgcgcaatcccagaggatgtgtttttgcgtcgctttgaaccgttgattgcgccgctcgtacgcagcggtattgcatatgaactgaatgcttcgggcctgcgaaaatccagccttgatcctacgacgggtaaagaaattgcaggaagatggtcctatccttcccgagctttgctggagaaattactgaggaacaatgttccattgaccatcggatccgatgcgcatgatcctcgtgatgccggagcggggatcgccgagttggtggaggtcctcaggccattagggcttcaatccatcggctattatcagcagcgtcaacgcattgatgttctgttggatgaccttcaatttcacactgtgccagcgtctcgctaa

SEQ ID NO: 99387 - DNA, 1131 bp, Enterobacter aerogenes
atgaatggactaaaaaccccgcattcacttgcgtggaacacgttgcacaacgaaccgctcgcaacccagttggcaatgtttcgccaggccactgaacagatcaatgcgcaggatgttaaatccggttttcgcgcgttcgcgactgatttgctggcgcgtggtttgatcgacatgtccgattacgtcgctatttttggtggtaaggcgctgcattatctgacaccgagtgtgactggatcattttgcgatatgcgcaccggtgctgacgcgacaacattggcgggcatttatagccgtgcgaaatatggcggagtgagcgagatacgctatctggcacggtgcgttatcgactatcttgccgcagaactggatgacacctcttcttcatggtcagggttgttttgccaggccaaagaggagggagagagtgttgtgatgatgaccacgggctggcgtaatgtgccttccacggccaatgtgctctacgatatcgtggttgaggaaattaatctcacgttggcgcataaaggattgcccaccattatcaacgttaaactgcccaggattgcgccgccgtgtgaaaattatgccagcctaagccaggccgagcgcgatcgggtcaatcttgtgcaggatcatgtgattccagcggagaatttttaccgctggagcggcgtgcatgtcattttcggagatgacgtgctggtgactggggcaacggcggacaaagtgttgtatgaatcgctgtgtaacggtgcccggtcatttcgtgccatttaccctgtggcgctagatccccgggtggcattaacggatgcgtcggtggaggatcggctgaacagcgtgagcgtaaagcagcatctggatgaaaacgtcgcgcaactgctctctgctccgggctatcagcctattctgcgtgcgttgcgtctgttatttggcgaagacaaccgggatagtttaccggctttcctgccaaatgtgccggtgctgacctggcttaatctgtataaatcagcgttaaataatgagtttttggctcagcctgcatgcgcgccatcactggtgatgctcagaacatatctgatgcaaaatgggctgttgtgtgcgaaaggtaaggtgctggtgaaatga

SEQ ID NO: 99388 - DNA, 792 bp, Enterobacter aerogenes
atgacgtccgacactacccattatgtcagttactgggaaaacgcaccgggtcagaccatgccggcttatgttgccttagcactggtttctatgcgcagagctctgggcgatcgttttcttctgcttacgccgcgaacggtaagcgagcacatcggtgctgacatcatgaataaagcttgggcttttgaaccgctgagctttacgctggcgaacggcattgaagctattgtggcgaagagcgatttcattcgcatggcgtttgtgcatcgctggggcggggcatggttggatgcggatacgttgctgtttagagatccgagtgttgagttatttccgacagggctgagccataaattgcactggcatagcgagtgtattttcgcgtccctgccgggaaaccccatacttgcgcaagccttagctatagggcttgagagcgagagtcacgcttggggtaatcctgggagaatcaaaaatatcattgcccaggctgccgatgctgccatcccgattggcggggaggtcatcgatcccggataccgtcctctttacaactttgctggttgtgaggtgatgcgtcgcaccgatattgccgtcggggcatttttgattaacgacgtggccattcttaaactttacaacacctatttccggcgtaccgaagcccggagagaaaccgtggctgaattcctagcgggtggctcgctgctggcaaaactgtttttgcatattgaggcaaatgcggattactgggttgatgaaagtgacaaattgatagcttccgttgcctga

SEQ ID NO: 99389 - DNA, 1542 bp, Enterobacter aerogenes
gtgagcacattgttaaatttacagattttacgcaaagcggttttaaggctgatatttcgcctgctggcggacaaacctctgcctgcaaaagccccaagcgaaaaaacacatattcttctgcttcgctgggatgcaaaattaggcgatgccatcgtatcttctttcttttttcgcgaatcacgtaagctcaatgcccgattgactgtacttacggttaacgagttagctgaaatgcataccaacaccttcggtgtggatgaagtcatcgttacgaatccgcatccaaggcttggtgaactacgcagattggtgaaccaactaagtaatgtcgatgtcgttgttcatctggttggacgactgcaacctgccgaaatcgtttttatgcggttactccgcccggcgagtctctattctcttgatgattcactgcgctgtgtgaatcgtaaaatgggttttgctgcaaatacgctcaatatcgtggagcagtacaaatatattctgcaggatctgggcgcgaaagagatcgacacccagtacattgtgccgttgcctgccgagctgccgcctgcggcactttccccccaaatactttttaatccttatgccagccgaagagacaaggggctatccccttcccgtgcaaccgcaattctacaagctatcaccgacgagtttcccggccattccgtaggaattctttgcagcccttcaacgctgcacagcgcacagcatctggaaaacgctgttgcacgcgataatgtggcagtcttgcacgacgggctaacgcccgaaaaggttgcaggctatattctccgcgcgcgggcagttgttagtgtggatactgccattgtgcatatggctgttggcctgaaagcgaagctggtggcgatctacccgttgattgcaggtcaacacaacccatggttgccgcctcgctcaccttttacacaagtgatctacagcgagcaacagacagacacactccgtcgtacgggcaaaaaaaatatggatgctttttcgctaacgtcattaatgaacgcattgcagactctcttaacactgccagcagaagcgaaaaacagcatgtcgcttaacgccagaatcatccccgggctaggggtagcgacgggcacgctggcgcgacaactgcccttaatctgtgaaaaatttcctgaagttgcaggctgttatgccgggacgatcaaccttgaattcagcgttcctgtcgcagtcgtgcggcccgatcaccgcaccgcaccgctggcctggactcccagtggacgcaccaccgagatattcgatctactgcgcattgaacttgaattcagccatttaactgaacgcatccccgcatggctgtatattgcccacgactcgccacaccgccggacgccgaccattcacgaagcaatcgcgccacgcattaacctcaatggcgccacgcactgtcgactccacttacccgctgaggctatcgtactgggcgaaagcgatactcaggcaacggaagctatcaatttgtcactttcatcaacccagtaa

SEQ ID NO: 99390 - DNA, 2190 bp, Enterobacter aerogenes
atgacagagctctatgaacaggcgaaaaatagtctgcagggtgaggacttctcatctttcaattacctgtttacggttaacaagctgttgtccaatcctgtttcgtatgacttgggacgggacttgatcgtacgtgctctcgattcgcgcgagcggttttccgagcacaccacaattttgaaaaatatggtgagaaaatcaggtttgttcccgtacctcaaaaaagagttcactggcctgacaccagacgacctgagggtacttgagctataccgaacgccattctcggatggttacgttttccactcaatgcagttccacatattcgatctgctcaagtccggccaaaacgtggtactgagcgctcctacaagcatgggaaaaagcgcaattgtcgattcgttgctcggcatgggaacgttgaagcggctcgttctggttgttccgaccgtggctcttgccgacgaaacccgtcgccgactgcaagaacgattcggtgaccgatatcagattatccaccacagttcccaagtgtgccattccgatcaggctgtctacgtattaacgcaggagcgagtgaacgagcgtaacgacatcatcgacattgacctcttcgtcattgacgagttttacaagttggcgttccggcaactgaaaagcggggccactgatcatcaagacgagcgagtcattgagctcaacattgcgttgagcaaactgcttaaagtctccaagcagttttacctgactggaccgttcgtaaacagtattcgcggtctcgaaagacttggatatccgcatactttcgtttccaccgacttcaatacggtcgcactagatgttcagacgttcggcattaaagcgaatgacgacgaagccaagctcaaagcgctgggggagatcgtgcacgcatgcgtcgacgctacgatcatttattgcaagtcaccaactgttgccggccaagtggcgcgcgagctgatcaggcttgggcatggcactctaactaaaagtcctcatatcgactggatcagcgaagagttcgatgccgactgggattacgcggtcgcactaagaaacggtatcggcttgcattttggcgcgctacctagggcactgcagcaatacaccgctgaccaattcaatgctggaaaactacgtttcttactctgcacctccacaatcattgaaggtgtcaacactatcgctaagaacgtcgtgatctacgacaaccgcgatggaacacgcagcattgacaaattcacccatgggaacattaaggggcgcgccgggcgcatgggcgttcactttgtcggcaaaattttttgcctagaggaaatcccggaagacaacctcaatcaagaagtagatattcctctcggaattcaggacaatgataccccaatcaacctcttggccagcgttcaaccagaccacttgtctgaattttcacaggatcgttttgatgagatctttataagcgatcgtgtttctatcgaccttgtgaaaaagcactcatacttccgtctcgaacagctcgaagttctgcaaagcatgttcgagatgatggatgacaccgaattttcctcgctggtgtttcactggacccccgcgacaaacttcctcaagacctttgcaaatatcattgccaaactggttccccatacgttcagtcgtaatggagtccctgttaagcctacggatgtcatggtagccaaactagctggctatttaaacgctgaaagctattcggaatatctgaaaaatcagatcgtttacgcaagacagtgggtgtctgaaggggagaagcgcactctttccattgccctcaacaacgatttgaagctcatcaccaataccttcggttataccctacctaaggtgctcagcttgatggaggatgtagttaaacaccacgctttaaagcgtggtatacgcagcaaagtcgattacacgcacgtcaaattggcgttcgaaagcttccacctaccaccaggtgtcaatgccttggaagagattggcattcccattcagacgttacaccgactggtcgacttgctggaattttctgatcaggctgatgtggatgagttgtgccagtatcttcgggatactcaggacatttggagtcgatcgattggatatgtagatcaaacgttcatcaggcgcgcgcttggcattgaacagcattga

SEQ ID NO: 99391 - DNA, 1617 bp, Enterobacter aerogenes
atggagtcgaacgattcaggcggggtagccgccaagcacggtttcttatttcaggactgcgtagccgcttaccatgtcacccgaatgcttcgtgacaagactatccgcagtgtacgctgcgaggtcacagacgatatcgacattgtatctgatagatacatcgacttcgttcaggtaaaaagcacgggcaaagcacgttggaacatttcggacatcgttcagaattccaaaggtgctgataaaaagacgatcccctgcagttcaattttgcacaaatcaatgcagtgtgagtctgacctgtcccttggacgtaggtactccatcgtcacagaggaaaaggtcaacaaaaccctggagtacttgacgatcagcccaaacgctcggctagataagccaggtcgacaggaactcatcgatgaccttaacaaacgcacagacaattttttaacagactcaggtataagcgtttcagattggatcgatgcggctacatgggaagtgttttcatccctgcgagaacttgaacttctagggatcaagaacatacggctggcctcccatgatctacatggggtcattctaagttccgagaccgtcgctgaagacatttggtgccgcatccttgatactgtgacgcgcaagggcgagcattctcgacgcattcacagtgaggatgacaagtcctacttacgaccagacttacttgagtggttcaaacaacgtgtcgaagatgaccagtctcggtcaggacgcaaaatctacgtaaaacgggacttaccccacatcctcacgccatttagagcgcctatggcttcggtctgcgctaagcgtaaaggccaagttctacatcaacaatactcgcttaagaaataccgctacaagcacatcgcggataacgtctgccaatggttggatgaggtatttctccgaccaaaagaaatgtctgatattcataaactgacactcattgaaaagcgagagcgactaaagaattccgtcttcaaatcgcttcatgacgtcagcgaattcttggggcgagtgttgttgcatgcaacgatccggcagcaccacgaaagccagcctatcccttgcatgctatacgtggaaaaagctggggccgaaaaaattcttgaaaacgtgcatatcgttcgccgcgatccagaaggtgatcagctttggattggcttcagcgagttggtgacagatattgacattgccgtcagattgccgcagatacgggatcggttgtacgaggacatttcggattgcatcgatacagcacgcagaaagatcctcgacattaaagacgacaactacctgcttcgccacgacattgacgaaattcttgatggcagccaacctttcgatgctcacctcgatcgtttcacgtttgttctgtttgtaggctacgactcgaacctactaaccgagcctgaaacgccggggtttgaggatgacctggagaaggaaacgacagtgctattcgaaagattcgcggctgacatcatcgaggattcaccgttcgcgaatctttgcatccacgtgttcatttatccagctccgagtcttgagcggttaacccaattggttgatgagaaggtgagagaggtcgtatga

SEQ ID NO: 99392 - DNA, 1926 bp, Enterobacter aerogenes
atgccactgagtaacgatttagccttgctgaacatcgaacagttattcagcgctgatagccattatgttatccctatttatcagcgtaactacgcctggggcgcgcaggagattgaacagcttattcgggacattgccgatgctgctgaagcccttaaaaatgcagagcaacaggaagacccgaaatactatctgggcagcttggtcgtatatgtccgagatggcgctgatagcgcacaccaaggcgtaatagcctatgaaacgattgatggacagcaaaggtacacaacgctgtcgattttgctcgcatacttaaaaaaagttgcttgctgcagcgaacaagatttatccccgcttcacctaaatctcgactttgacagccgtcctaaatcagcccgaacgctacataacctgtttcaacaggctcagagcaatgatcctgaagaaccctcaatccgagcggcgtttactattattgaacgctactttgagaaagagaacatagacaccaacaacttttgccgatatctactccagcgcgtcactattttgcgggttccggtgccaacagagactgatctcaaccactactttgagatcatgaataaccgaggtgaacagctagaaaaacacgaagtgttgaaagcgaatttgatgtcagtttacagcggtgaaactgctgcaagaaacggcttttctgccatatgggatgcctgcgctgacatgaatcgatatgtgcaattgggctttagctcagaggctcgcaaagcattatttggtgagcagtggctaggattcccggcgagttttgaggtgataaaatgcgcgatagaaactaatcgtgatgcagacgaaaagctgactatacgggatattatcgaaagacgacgctttcatcacactgatgacaacgatgaaaaagcaaaagagcagcgttttgattcgattatcgatttctccaacttcctactgcatgtgctaaaagtgacagtggataatgccgtgtctttggacgataaaaagctacttcaggcatttgaaatcataaaaaatgaccgaaaaaaaatcactcagtttgcttttaacttgctgaagtttagagtcttgtttgaccgctatatcattaagcgcgatcaggctgagaagtggagcctgctgacacttgagtactatgccagagacaggaattcgagctttagctacaacaactctttcgatcaagatgaactgtctggtgtaaataaacaactagcgatgatcttgtcgatgttccatgtctcccaccctgcctatgtttataaacgatggctcaatcgctcgctggccattttgaataccctgacttcggaccaacttaatgttgacggagctgcttacctcagggaacttgaacaactcagccacgagttcctgtcagagatttgtggtgaaacggaacaattcaatgtcgaagttctgcatcgtggtaccggtgtgcagaactttgtgttcaatttactcgattatcgtttgtggcgtgagcttaatgctggccaatcatttgatggtaaagggcttaataatcccgagattaagaagcattttgacggcttccagttttcaccgagccgaacatcggttgagcactactttcctcaaaccgatccctctggcgcaaacaaaatgggggatgatgtccatcgtttcggtaacctctgcttgatctcaccaagcagcaactcgagacttagtaattattcaccagcagacaagaaaaaattctacgtcgaaacagaacgagcagagagcctcaaacaagccatcatgatgagctataaggagtggggtccggatgggcaaggcctcaacaacatagaaagccatgaacacgcgatgttgacattgctcaaagagcatcgagataagaccttaccaaccaggaaataa

SEQ ID NO: 99393 - DNA, 1341 bp, Enterobacter aerogenes
atgggaactgtatcctatcaggtaaaaaaaacgcggatgctgctagagcagcgcctcgctattccgtcataccagcgcccctacaagtggcaacaaaaacacgtcaatcaactaattgatgatgtgttaacccaccgaaataatcagagctaccgccttgggactgtggtgttgcacagggataaattaaagccagcttatgcaggtgagctcgatatcgttgatggtcagcagcgccttctgaccttaaccttgctttgctcagtgctcgatcagagtggtgagttttcaacgcccctgttggaacaatcttttgcttcaagggttagcatcaataaccttgagcacaatgccaaagtcattgagaaccgccttgtgggactaaatgataacgaacgcaaaacactacttcacttcgtgtgtgacaagtgtgaactgatcgaagtgacgctcgatgatttgagcgaagcctttcagtttttcgactcgcaaaatgccagggggaaggccctcgcgccccatgacttgctaaaggcataccatttgcgcgaaatgatggatgctacaaagcaagcggaacgactacaccacgttagtttatgggagcaaggagtcagtccggatgatgaatccgctaaccttcacctcattatgggcgagtatttgttccgcctgcgccgatggctggatggcgaatatggcgtgcagttcagccgccacaatcttgaggtgttcaaaggcgtcaacctttccacctctgattaccactatctgcagtctctgctcgccctggattttgcggttgagcactacaataacgaccctatcaggaagtgggacaagcagaataaaccttatccgtttcaggttaatcagttaataattaacggaaagcgcttttttgagtatatccagcactacaaatccctgcatcacaccctatttgaaggtgacaacgcgctgcttggcaatttcttaaaaaaacatacccgttacgctggcagttcacgcaaaggggatatgtatattaaaaatctctttatgtgtgcagtgatggcctattacgataagtttggcgataaagaattaattcaagccgcaacagtctgtttttgttggagttactacttgcgcttgcaatatcaaaaaatcggcatggacagtgttgatggttatgcgcgtgagccccgaggactattgagagtgctcgataaagcgatccacccacaacaagtcctacgctttcagccaaagcgttgtataaacattcgttttcaaaatgccaaacccgtagaagattcaatcgctcagatgcagggagatgtacatgccactgagtaa

SEQ ID NO: 99394 - DNA, 3114 bp, Enterobacter aerogenes
atgtctgattttagaactatagctgaatcaaataactttatcatccttgacaagtacttcagagcccaagaatctggtgacacctatcaaagtgagttagaactggaacgtgaggtaatccaggatcttcgcaatcagggctatgagtatctttccgttaaatcaccgacagcgatgctgatcaatgttcggcaacagcttcagagcctcaataatgtgatgtttaacgaaagcgagtggcgacgtttcaccgatcagtatctggacagcccgagtgacagtagcctcgacaagacccgtaaaatccatatcgactatatctgcgacttcactttcgatgacggacggctggaaaatatctacctggtcgataaaaagaatctcatgcgcaacaaagtgcaggtcattcagcagtttgaacagagcggctcacacgctaaccgttatgacgtcaccattctggtaaatggcttgccactagtacaaatcgaactgaaaaagcgcggcgtggcgatccgtgaagcctttaaccagatacaccgctacagcaaggaaagctttaacggcggcaactccctatttaaatacctgcaactgtttgtcatttccaacggcaccgatacccgctactttgccaataccacaaagcgggataagaacagtttcgacttcaccatgaactgggcaaagtcagataacacgctgattaaagatctaaaggactttactgccacttttttccagaagcataccctgctcaatgtgttgtttgactacagcgtgtttgacagcagtcagacgctcctggttatgcgcccttatcagattgccgccaccgagcgaattttatggaaaattaacagctcctataaagccaaaaactggtcaaccccggaaagcggcggttttgtctggcacaccaccggttcaggtaaaaccctgaccagctttaaaaccgcacgtctggcgaccgaactggacttcattgataaagtcttctttgttgtcgaccgtaaagacctcgatttccagaccatgaaggagtatcagcgcttctccccggacagcgtcaatggttctgacaatactgcaggccttaaaagaaatttggacaaagacgataacaaaattatcgtcacaacaattcagaagctgaataaccttatgaaagcggaagccgacttaccggtctatcaacagcaggtcgtcttcatttttgatgagtgccaccgcagccagttcggtgaggcccagaagaatctgaagaagaagttcaaacgcttctatcagtttggcttcaccggtacccccattttcccacaaaacgcattgggcgcagaaaccaccgccagcgtgtttggccgcgaactgcattcttacgtgattaccgatgcgattcgtgatgagaaggtgctgaaattcaaggtggattataatgatgtccgcccgcagtttaaggcgcttgaaaacgaagtcgacgacaagaaactcacggcatctgaaaacaatcaggcttttttacatccgcgccgtattgaggaaattacccgttatattcttgctaattaccgtcagaaaacccatcgaactttccctggggcgagagggttcaatgccatgtttgcggttagcagtgtggatgcggctaaagcctattacgaggcttttaagcaattacagcagggatccaacaatcatactgatgcccgtaagccactgagggtggcgaccatttattcattcgcagcgaacgaagaacagaatgcggtcggcgacattaccgatgaaagtttcgatgtcagtgccatgaacagcagcgccaaagaatttcttgatgcggcgattgacgactataaccgtcatttcaaaaccaatttcagtaccgacagcaatggattccagaactattatcgtgatttagcgcagcgcgtgaagaatcaggatattgacctgttaattgtcgtgggcatgtttttaaccggcttcgatgccccaactctgaataccctgtttgtggacaagaatctgcgctatcacggcctgatgcaggcattctcacgcaccaaccgcatttatgatgccaccaaaaccttcggcaatatcgtgaccttccgtaatctggaacaagcgacgattgacgctatcacgctgtttggtgataagaataccaaaaacgtggtactggaaaagagttacaaagagtacatggaaggctttagcgatatcgtcacaggtgaggcgaaaagtggttttatgactgtagtctcagagctggagcaccgcttcccagacccagcgaatattgacagcgagaaagagagaaaatccttcgtgaagctgtttggtgagtatctgagagctgaaaacattctgcaaaactatgacgaatttgccacgctaaaagcgctccagaaggtcgataccagtaatccggaggcgctagaaacctttaaggccgagcattatctcgatgatgagaagctcgctgaattacagaccattcgccttcctgccgaacgcaagcttcaggactaccgttcagcctacaatgacatccgcgactggcaacgacgcgaaaaggcagcgaatgataaagatgactcaaccaccgactgggatgatgtggtgtttgaggtagatttgctgaagtctcaagagattaacctagattatatcctcggtctgatattcgagcataacaaacagaacaagagcaaagacgggctgaccgaagaagtcagacgtcttatccgctcaagcctgggcaaccgagccaaagaagggctggtcattgattttattcagcagacgaacctggatgaactgccagataaggccgggattattgatgcgttcttcgcttttgctcagcgcgaacagcagcgtgaggcagacgcattgataaaagaagaaaacctgaatgaagagacggccaaacgctatatccgtacgtccctgaaacgagagtatgccaccgaaaatggtactgagctaaacgagacgttaccaaaactcagcccgttaaacccgcaatacaaaactaaaaagcagtccgttttccagaaaatcggcgcgttcattgagaaatttaaaggggtgggtgggcagatttaa

SEQ ID NO: 99395 - DNA, 1302 bp, Enterobacter aerogenes
atgagcaaaacgctaacacaaatagccgaacagttaattagcgccaataaaaaagtgcagctaatctatgcatttaatgggactgggaaaacacgcctatcgcgcgagttcaaacagctcattgcccctaaaaacagtgatgaacagactggcattgaagcagaactatcacgtaataaaattctttattataatgcttttacggaggatttgttttattgggataatgacctggaatctgacgttgagcctaaattaaagattcagcctaatacatttactggttggcttatttcactactgcaagagttgggtgaagatgggaatatcgttaaaaattttcaacgttatacaggtagtaaaaccactccaacatttaatcaagagtatgaatctaatagtaatggagtaactgttactatccctgctttttcggagatcacttttcaagttgcaaaaaatcccccttcaataccagaaacatctaacgacataacagaagaagctctctctgttgttcaaggacaatatgagaaaattaaaatttctaaaggtgaagagagcaattttgtttggagtattatatatactttattggaacaagcggtatctacgctcaatgagcgtgatgccacaaatcgtataacaaataagtttaatcagttggaatatgtgtttatcgatgacccagtgagttcattggatgacagtcatctgatagaaatagcagttgatttggcgacattaataaaaaacagcgcttacactgatggtgacgggttgagatttattattacaactcatagcccgttgttttataatgtattatttaatgagatgaacaacgatcttaagaaagataatcaagatggaacttcatcgtgggtatataaaagaggacaatcagaaaaatatagattctataagcaggcggatggtacttatgaccttgctagctctaatgaccaccctttttcttatcatttatttttattatctgagatttgtaaggcgataaattcgggaggggttaaaaagtatcactttagctttttaaggaatattttggagaaatctgctacattcttggggcatcggcattgggaggatctccttgaggcaatggcagacggagcgcctaatcaattagcaaatagaataatgaatctttctagccattctgctcatgcaggagaagagattgctgattttgaagaaaaagacgaagagagattaaaggaattggtaatatatttgattaatacttacggatttaaaagccaggaagcattaaatgtctga

SEQ ID NO: 99396 - DNA, 2148 bp, Enterobacter aerogenes
atgaccagtcttcaagaacgtgcagaacttcaccgtcaaatctgggcaattgccaacgatgtccgggggtcggtcgatggttgggatttcaaacaatacgtccttggtgcgctcttctatcgctttatcagcgaaaacttttctagttacattgaggctggtgacgatggcgtccgctatgctgcactggatgacagcatcattaccgatgatattaaagacgatgccatcaaaaccaaaggttatttcatttacccaagccagctattttgcaatgttgccgctgaagcgaacaccaacgaccggctaaacgccgatttaaacagcatcttcgttgctattgaaagctcagcctacggttatccgtctgaagcagacatcaaaggcctatttgctgattttgacacaaccagtaatcgtctgggtaacaccgtcaaagataaaaacacccgccttgccgctgtgctgaaaggtgtcgaaggcttaaagctaggtgattttaatgcacatcagattgatctgttcggggatgcttatgagttcctgatttccaactatgcggcaaatgccgggaagtcaggaggcgaattcttcacgccgcagcatgtatcaaagctaattgctcaactagcgatgcatggtcagacccacgtcaacaaaatctatgatcctgcagcaggctctggttcactgttgttgcaggcgaaaaagcatttcgataatcatattatcgaagaaggttttttcggtcaggagataaaccatacgacgtttaacctagcgcgtatgaacatgtttctccacaatatcaactacgacaaatttgatatcaaggtgggtgatactcttaaagagccacatttcagtaatgaaaaaccgtttgatgcgattgtttctaatccgccgtattcggtgaagtggattggcagtgacgacccaacgctgattaacgatgagcgctttgctccggcaggtgttctggcaccgaaatctaaagctgactttgcctttgtgctgcacgcactgaactacctgtccgccaaaggacgtgcggcaattgtctgcttcccaggtattttctatcgtggtggtgctgagcaaaaaattcgtcagtatctagtcgataacaactacgttgagacggttatttcactcgcaccgaacctattcttcggcacaagcattgctgttaacatcctggtgctgtcaaaacacaaaacagacaccagtgtacagtttattgatgccagcggactgtttaagaaagaaaccaataacaatatccttaccaatgcccatatcgctcagattatgcagatatttaccagcaaagcagatactgaccatctagcgaaatctgtaccttttgaaaacattgccgccaatgactataacctatcggttagtagctatgtcgatgcgaaaaacacaagtgaaatcgtcgatatagttaaactgaatgcgaaattggaaacaaccgtcagcaaaattgggcagttaagaaaagacattcatgcgattttgaccgaacttgaaggccgcgaagcattgtcatatcgcgaccagttgctaaattttggagagggtgaggttgagtggaagacattgggtgagatagcagagatcaatacaggacaaaagccacctgaaatacttgagaatgcaacaacatttgattatatcaacgctggaacaactaggtctggatacacaacagttagcaattgcgatggcgatacggtcactacaccttcacgaggtcaaggcggaattggttttgtaggataccaaaagatgccattttggttaggtcccttgtgctacaaaatgagagctatagatgagaaaattttaatcaataaatttcttttctattttcttcgatcaagaagcgagcttttattgagtttaaaaaaagaaggtggagtacctgctttaaataagtctgacttggttaagttggctattccacttcctaccattgacgagcaaaagcggatcgtcacaatgctagataaatttgatactctaactaactcaatcaacgaagctcttctccgcgaaatcgagttccgacaaaaacagtacggatactatcaagatttgctgttcagcttccctaattcagatgtcaaggatgtcgattaa

SEQ ID NO: 99397 - DNA, 873 bp, Enterobacter aerogenes
atgaacaattctgaaggtctgcagctgctgcagaactcactttctggcttgccgcaatgggtgtcagaacgcattctgcaccaggtaagccagctaaccagcgatgagccgatgatcggcattatgggcaaaactggagcgggtaagtcctcgttgtgcaatgccctgtttgccggtgaggtatcgccggtcagcgacatatcagcctgtacccgtgaacctttgcgatttcgtctgcaggttggcgagcactttatgaccatcgtcgacctgcccggcgtgggtgaaagcagagctcgtgataccgagtatgctgcgctgtaccacgcacaattaccccaactggacctggtgctgtggttgattaagggcgatgatcgggctctggcggtggatgaacatttttaccggcaagtggttggtgaggcataccggcataaggtgttgtttgttatcagtcagtccgacaaggttgaacccatttgcggtggtgaaaagctgtctacagagcagaaacaaaatatcagccgcaaaatctgtctactgcatgagttgttccaacctgtaaaccctgtctgtgcggtgtcggtgcgtttgcagtgggggctgcgagtgatggctgaacggatgattcgttgcctgccacgggaggccagtagtccggtggcggtacagcttagtgttccacttcgtaccgatgccgttaataaaaaagcccgtgacgattttggtgaaacggtcggctcggtattggatacagtaagttccatgcccctgataccggccccggttcggacaattatccaggctgtacgtgactccgtggtatcggtcgctcgtgctgtctgggggttttttcttctgaatacttaa

SEQ ID NO: 99398 - DNA, 459 bp, Enterobacter aerogenes
atgacgacacaaacgcaatgcaaattgatgtccgctaatgaacctcaatttgaccttactgcatcaccagtacctgacgggcagcgtctcgatttctggccgctgcactttggtgctatcacacagtggataacgctggaaccccgtattttcgcctggatggaccgcttctgtgatgagtacagcggtggtatctggtccttttacacgctcagcaatggcggcgcgtttatggctcctgatgctgacagtgacgataaatggcatcttttcaacagcatgaacggtaatggtgcgcaaatgagcgcagaagccgcaggtattgctatctgcctgattgaatacagccatcacgcctgtcgcaccgaatgcgatgccatgacggagcactattaccgcctgcgggattacgccctgcagcaccctgaatcccacgccatttttcgcattattgattaa

SEQ ID NO: 99399 - DNA, 483 bp, Enterobacter aerogenes
atgatggaacagtcacttatcccacaggctccggcacttccactgaccgcacaacgtacggtaaaacgcgccttaaccctgcttgaccgacacctgcgcgaaacaggcgtggcatttacctccactcaggctgcccgtgactggctgaaactgaaaatggcggggctggagcgcgaagagtttatggtgctgtacctgaatcagcagaaccaattgattgcccatgaaaccctgtttgccggttccattagcagcaccgaggtacatccccgtgaggtggtcaaacgcgccctgtatttcaatgcagcagcagtgatactggcgcataaccacccctccggcgataccacgcccagccaggcagataagaccataacgcagcgtttggtgcaggcgcttcagctcattgatatccgtgtgcctgaccaccttatcgtcggtggtacgcagatattgtcgttcgctgagcatggtctgctttga

SEQ ID NO: 99400 - DNA, 342 bp, Enterobacter aerogenes
atgaaacctcaacctgcaacaacttcgcgggcggtgaagccctgcctgtcacccgtgacagtctggcaaatgctgctgacccgattgttcgaaaaacactatggtctgacgctaaacgataccccgttcagtgatgaaaccgtaattcaggaacacattgatgccgggatcacgctggccgatgccgtgaattttttggtggaaaaatatgaactggtgcgtatcgatcgcaaggggtttcgctggcaggaacaatcgccttatcttcgggctgtagatattctgcgagcgcgacaggcaactggcttgttgcgacaaagccgtaacaatgcagtacggtaa

SEQ ID NO: 99401 - DNA, 834 bp, Enterobacter aerogenes
atgcaaacagaagctgaagtattaacagatcatagcgagctaatttgctcgaccagcattgaacgcatagtgacaggccgtgatacagcattaaaacagatcgagcaacttatccagcagcttgacagcatttcccggctaacctcagaaatcggcggtggtacagcgcaagattgggcaatgaaagttgggcaccgttacgacagttggatgactgaaaatactgataaagcactgcctgctatcacccgtaatatcgaccgtagtatctggcgagacttgatgttgaagtctggcatgatggcattgatggatgctcaggctcgtgaccagtggcataagaacctggagaagggggatctgcctgccatcagtgaggcgaatatcctcagtacttttgagcaactacatcggaacaaaatggatgtatttgagcgtggcattatcaatgtcttcaaaggcctgtcatgggattacaaaaccaatagtccttgtagcttcggtaagaaaatcatcgtcaacaatctggtgacgcataaccgctggggatttaatttgaactggggttggcgacgggatcaactagcggacctggaacgaatgttatttctgctggatggtaaaccgatacccgacaaccgtggcgatgtcactactcggttgatggatcatattcgggacaatccttcaaaggatgtgtacgaagatgattttttcagtgttcgttacttccagaagggaactgcgcacatcacttttaaacggcccgacctgacagaaaagatgaatgatattgtggcgaagcactatccggggatgttgtcagagagatga

SEQ ID NO: 99402 - DNA, 966 bp, Enterobacter aerogenes
atgccaaaagagaacaaaaatccgaagctgcgcaactacgatcctcgttttatctactctcttgttgttaagcgttacttctctgagatgaagacgaaggtagaaattgcagaggagctcggtctgtctcgcttcaaagttgcacgcctgattgatgaagccattgcgcaagagtatgtaaaatttactttccctaaacagcaggctctggacgaggaaatagcgcaaaatctctgtaagaaatacggattgcaggatgccgttgtgctctctgtttctgaatcctggtcttctcaggaacaattgaacgtcaagctgggagggataacggcgacctacttgagtgagattctcaaagagggtatgaagtttggtctggcctgggggcgggttctttcaagtacggtgagtcaactgacgacattacctgttctggatgtggttcagctttctggcgttcatcctggcattgaatttagtcagggaccgattgatctaatacacaaagttgccgcaatttcccacggaagagcgcacccgatgtatgtacccatgtgggtggatgacgaaagtttagcccagaaactcgctgacgatcaggccgttcaggatacgcaaaaattttactcgaatatggatgtcgttattacgggcattggggcctggaaaacgggctcttccagtctatgcgatatattccctgaagcgtggcgtgaggctttaataagccaggacattactgctgatgtatgcgtaacactggtaaatagcaaaggggaaattctggatagtccgctgaaccgcctgggtttcggcattacgacagatcaattgcgtgccacaaagaaactgattggtgtggctggaggggacgaaaaatatgaaggtatagttgcctctctcaaatcaggtcttctgaatgtactgattactgattttgatacggctattaaacttctggattaa

SEQ ID NO: 99403 - DNA, 531 bp, Enterobacter aerogenes
atgaccatcatgaaaaagtactccctcgttttgcacgagttatcctcacttgcggataaaatagatgagaaagaatttaactcactcgttgattctattatcacagccggtcatgtattccttgccggtgctggacgttcaggacaaatgataaatgcttttgccaaccggctgatgcaccttggcctgtccgtcagcgtggtaggcgaaattagctctccacattctcgcaaaaacgacctgatgatcgttggttcaggttccggagagacccaacgcctgattaaccaggtgaaaatagcaaagaacaatggcgtgtatatcgcactcatcactaccgcaccagattccactctggcgaccctggcggattacgtactcaccatcccggcaggtcacagtgcccaaccaatgggctctctttttgaacaggcttctctgctgacctatgacagtattgtgctgtcattaatggccaatcttaatgaaaccagtcagacgatgaaggaacgccacgccgatattgaataa

SEQ ID NO: 99404 - DNA, 459 bp, Enterobacter aerogenes
atgaagcttgagattctggtaaatgacgttgagggtacgatcgctgactggcatgcagcaattgagtttgccggccagaagcttttggagaaaggctatatcactcccgagtatattcaggcttgcctggagcgtgagaagacttatccaactggtttattaatggcgaacggtcagggcattgccatcccgcatgcagactatacgctggtaaaaaccaacagcataagcattgtgcgttttgataaaggtgtcgtgtttggtcagatggaagatgctgacctcactgtggaatgcagcattatgtttaatctcgcattcgccaccagcgatcagcatatgtctgtgctgcgccgcctctttacgctcttccaggatatttcgtttatcgagtcgtgccgtaatctcaaaacgcacgaagtcgggaaatatgtcgaagagatgcttgtagcatcctga

SEQ ID NO: 99405 - DNA, 285 bp, Enterobacter aerogenes
atgaaaaagattttagttgtatgcggaaacggcattgcctcctcttccatcatggtttctgtcctgcaggactacctgaaagaacagaatatcgaagcgcaggtagataaatcctcattgatggcttgcaccacggacacatttaacagctatgacctgattgtttcttcaaccaagctggataacccaggcatcactactcgtgtgattgtcggagcgggcctgttaacgggattgggcgaagatgagatttttgatgctgttaaagaagaaatgcttaagtag

SEQ ID NO: 99406 - DNA, 1371 bp, Enterobacter aerogenes
atggaactgatcacacagtttatcaatgacttgggtaactttatttttataccggtcattttccttgtactgatgaaacttctggggcgtccgctgtcggagtgtatttcatcagccattaaagtcggcatcggttttattgcattaaccatgaccatcaagctgatgcttgaaaaaatgcagccagcggtgacggggcttgctgaagccaccggctcctcactgagcgccattgatgttggcggcgcagccaccgccgtaatgggttttggctcaagcatgggggcgataattattcctctgtgcgttgcggtgaatattgccatgctggtggcccgtcttacggactgcgtaaacgttgacgtatttaaccttcaccagaatgcctcaatgggggcaattgttggcgcttactctggcagcttcctttacggtgttcttacggctgcattgttccatgtctgggcgcttattgcggctgacctgggtgctaaaaacaacgaaaaattcttcaacctgcccaaaggtgttgccatctcccacccggttgcaaacacctatttgctgttcgcttatccgtttaactggatttacgatcgcatccctggattccgtaatctgaacgttacggcggaaagcattcagaaacgctttggtatccttggcgatccgaccatggttggtttcattattggtattcttcttggcttctgtggttatggttgggaatctccgtatcacaccattatcgccagcctgcagttgggtatgtaccttgccgcagtgatgctcctgctgccacgcatgacctcaatcatgatggaaggtctggttccgctctccaacgtggcacgtaagaaactggttaaacgtttcccggatcgtgagatcactgtcgggatggataccgcactgatagttggtcatccttcagttatcgcgcctgcactgctgctgatcccggtcattgttatcctcgctgttgtccttcccggcaaccgagtgatgccgctgggggacctctcacagttcgtattctttattgcgtgcatggtaccggtttttaatggcaacattattcgtacttgggtgacttccatcatcctgtttggtggcggcttatacatcgcatcgtggatggctccagcaacaaatgaagtgtttcagaaattcggcactaatcctgatgccagcgtgatgtactcatcgcttaacccttcagctaacccgttcaccggtctctttgctggactcagccatattggcatcgcaggttatgctctcgccgctgtgttgctgttgtccgtcggctatttactcaaacagaaagcacgccgtcagttgaaaactgaggcagaaaaaacggcttaa

SEQ ID NO: 99407 - DNA, 537 bp, Enterobacter aerogenes
atgaaaacgaaaattgcaatcgcatgtgatgatgtagggtttgatcgtaaggaggagattaaaaagtaccttgaagaagagaaaaatgctgatgtcgtgtacgatcccgtaaaacgaaaagaagacggtttcaacaacttcgctcgtcttgcggatgaaatggcaggtgttattcagcgggacgaatgccgccttggtatctacatttgcggaaccggaattggctttacttgccagataaataagcactgggggattcgtgctgtagccgtcaccaacccctactcagccaagcgagcaagactcagtaacaatgctcaggtgattggtcttggctgcagagttaatgatcttgaatacacaaaaatgatcgttgatgcctggtatgacaatgcgttcgactttgccactgcaagggaaaattccaaaaagaatctactcgaagcagaacgcagcgacaacgcattgctgacgaaacctgaagatgtgcgatggaatatgggtttcagaccagatgatgagaaatctgagggctaa

SEQ ID NO: 99408 - DNA, 756 bp, Enterobacter aerogenes
atgtacctggttgatgaaaggagaaaattgatccttgaagagattatttcggctggtaccgtatacgttagcgatcttgctaaaaagtatgaggtcacttatgaaaccatccgcaaagatctcacccatcttgaaaaaaaaggactgctggttaaaagccatggaggtgcaaccttaaagcagggggcggtcgaacatcctttccaggtcagggaaaaagaaaacagtactttcaaacaagctatagccagaaaagcgctggattttatcccccccaatagctcaatgattattggtaccgggagttctaactatgaactggctaatctgttgtgcatgaaatctggctttaaaatttttaccgattctttgccggtggccagtgtgctgatcgagtcagataaccaggtctttttgttcggcggagaactgaggaaaaaaagctcttctgtctttggcgggtgggccgtgtcaatgattaatgacattaacgttgatctatgctttatcggcaccgatggcttcaacaatatgacgggcccgtccactccctcctcctcagatgcctttctggatcgaacgatcattgcccattccgagaagaaatatattctgggcgattacacgaagttccagcgcagcagcttatttaagatctgcgactggtctgagattaccgcgctaatcactaatgaaattgctgataaagacggtattgccgaagttgccaaacatacgacagtgataacctgttga

SEQ ID NO: 99409 - DNA, 480 bp, Enterobacter aerogenes
atgagcaattggttaggtgaggagaaaaaagtgggtgcaatttctatcaatgtcgcggatggggcggcattcaaaaattatgatgaagtgctggagcatattcaccagaaacatctggccgatgggattgtaagagaaacttacctccaggcgctgcgtgaacgtgaagccgactatccaactggaattttacttgacggctatgctgtcgccatcccccattgcgatagccagcacgccgtcagcccggcgatttatatcattcgtttgccacaggaaatagaagttaatcaggctgatggcgatgaaaaattgtgggttcgcctggttgtaaacctggttgttacccaacctgcagatcaattgcagttgttaaaggcgctgtttaaccaccttcagctagctgatttttaccaccagatgctggagcttcccgctgaagaagcaaaggcattgtttattaacacgataattaaataa

SEQ ID NO: 99410 - DNA, 294 bp, Enterobacter aerogenes
atgattactatcctcgtagcctgcggaagcggtgtcgcaacctccacactcgccgctgatgaagttaaatcggtttgtgctgaatacggcattgccaactttaagattaataaatgcagcatgtccgaactggcctctgaaatgcaaagcgctgatgtggtcctgacgacgaataattataaaggtgatattggtaagccgcacatgagcgtcgccggttttattaccggtattaacgaagccgcactgcgtaaaaaattaggtgaactgttaagcgaaatttccaaaggctaa

SEQ ID NO: 99411 - DNA, 1254 bp, Enterobacter aerogenes
atggaaatgttaaaaagcatcatgtttactattacaagcatgggcgctacagcaatattgccgcttgttattttccttttaggtctggtttttcgaatgaaagtgggtgccgccattaaatctggcatcactgtaggtatcggtttcatcggtctgggactggttgttgggctgctaaacacagccctgcagccagcaattacgtattactcaaaaattggcagcgggttcaccgtggctgatattggatggcctgccgttggcgcagctgcgtgggttgctccgtttgccgcaatggttattcctattggcattatcctgaacctgatcctggttcgtctgaagcttaccaaaactcttaatgtggacatctggaactacatgcatttcctggttccgggggctcttgcgtatttcgtctttgacagctttttccttgggttgggtgtcgccgtggctctgagcgtagccgcactgtttattggcgatcttattgcgccaagatggcagaagtactacggcctggaagggacgacctgtaccacaatgatccacatcggatggacacttccatttgcatgggttgttaacaaaattatcgatttcattccgggattaaacaagctggatgtggatttagagagcgttcagaagcgactgggtgtattcggtgaacccgcaatcatcggcgtgattgtcggttgtctcctgggattattaaccaaacaacccattacaaccatcgtgccaatggcgatgggcgtggctggcgtcatggtgctgttgccaaaagtggttggggtccttatggaagggcttaacccgataggtaagagtgctaaagaaatcatgcaaaagcagatgggtaaagatgcggaactgaatattggaatggactgcgcccttgcgcttggcgatccggcaacggtcactgtcaccgttattactattcccctgacaatgctttgtgcgctggttttaccgggtattcagatattcccaatcggcgtgctgatgtcaattatctacatgacgaccatgaccgtcatggtcagtaatggcaacgttattcgctcaattatctcaaccttactgttctgtgtagtggttatgtatctggggggatatgtcgcgcccggtgcaactcagttcctgaacggtgctggcgtcggcctgcatggccagggtacggacttcgtattaaccggcccatgggagattctgacctactggtttagcacagttacgcattaa

SEQ ID NO: 99412 - DNA, 645 bp, Enterobacter aerogenes
atggcacaaattttaccatcaatatttggtgcaaacatattacgtttgcaggaagaaattcagtttctggaaacggaaaaaacagaaattctgcatgttgatttaatggatggcacttatgtaagcaatatagcttttggtcctaatcaaattgcggcaatgaaaaaagccagttcaatgacatttgatgtgcatatgatgctggcaaacccggaaagaaatatcgatgatgttataaaaaccggggcggaaatgatctcggttcattatgaatcaacgccgcacgtgcattatattatccagaagatcaagaaagccgggcgtaaagccggtgtagtactcaatccggggaccccggaacacgtaattgaatatcttttagatgatattgattatatcttgattatgaccatcaacccaggtcagccaggtcagatatttattgaaaaaagtcttgagaagatcagaaatactaaaaagatggttgccggacgtaatattcagattgaggttgatggcggcgttaatgctcaaattgctaaaaaggtaaaagaagctggtgctgatttaattgttgttggtggcgcattatttaatgatacaccgagagaaagctatcaggaattaagggcagcgatccaatag

SEQ ID NO: 99413 - DNA, 753 bp, Enterobacter aerogenes
atgagtaattttgaaggtaaagtcgcgctagtaacaggtggggcacatggaatcggtaaaggaattgctaagcaattcgcggaccgtggggctcatactgtcattgtcgattataacgaagaaaatggtaaaaagacggccgaagagttaactttcggtaatgttaaatccttattcgttaaaaccgatgtatccgatccgaaagctctggaaaacgttcgtgagcaggtttttcaaaccttcggacgtattgatattttggtattaaacgctggtgtggcgtttgctaataaggttaataacatcacttttgaagagtggaataagacgattgcaattaaccttactggtctgtttaacaccgttaaagcattctacgacgacttcactactaaccatggatctatcgtttatatctcatccggctcggcgctttccggtactggcggtggcgtgagttacccggccagtaaagctggcggtgaaggattgattcgtggtctggcaaaagaactgggacctaagggtgtcaatgttaatgctatcgccccacgcctgattgataccggtgaaatgatgcgcgtcaattatcctacccaggccgatcttgatgctgttctggaaaaaattccagtgcgccgccttggcaccattgacgatgtagcaaaccttgcaatctttttggctgataaagacaactcgtacatccaggggcaaaccattctgatggatggtggtcgtaccatcgcttaa

SEQ ID NO: 99414 - DNA, 561 bp, Enterobacter aerogenes
atgagcgttctacaaaatactttaaatatcctgagcgagttgcagcaaaatgcgatgaagattgatgatgcccaggctgcccaattcgtcgcacagattaagaatgccaaacatatctttctgcagggcgcgggtcgtagcggcatcgccatccgcggctttgcaaaccgccttctccacctcggtttttcagtaagcgtagtgggcgaaatttcttctcctcatacgaaaccgggcgacctggtcattattggctcaggtagcggtgagaccggcagtctggtgagcttggcgcagaaggccgtagcctgtggcgtggatgtggcgcttgtcacaatgaaagcggagtccacaatcggcaaactggccaaaagtacacttgtattgcctggaactgtgaaagaagacaacgctcgcgaagaaggtgctttttcgcagcctatgggatcggcttttgagcaactctgctttatcacctatgacgctatcgtgcttgagctgatggcccaactcggtgaaaccagcgacacgatgtttaagagacacgctgaccttgagtaa

SEQ ID NO: 99415 - DNA, 615 bp, Enterobacter aerogenes
atgaacaaagattcttcttataacaatattggacatttagcctggtgtgctttggtagctctcggcattcaacgacacgatcggcttgttattaccgaggcgcaggaaaatatatttctgatccgctggttggccgatgccagaaaacagaagagattccccagaaatttaactgagcacatagactggctacttgctcaggggcgtcgacttggcgttcgggcacgtctgaatcagaaactgcattatttatggcttatgagcagcggcgatcttcacaatctgccggatctacttcgattgacctatgctatcgaaatggcaaaagctggcggttggcagtatgaccttgttgatgagaagaagatggcggctggtatcagcaaattccagaatatgaattcgttttgcctggaaagaacagctattgagaatggatttgattctagcgggaaacagatagccccactttatattcgggtgtttggtcaagttgagaggctgctgtcacttctggagtgctttggacttaaactcgatgcaatagaatcgtattcaaatgaattttctgcagccgaatcaccaatttttttactacagccagtgatggcctga

SEQ ID NO: 99416 - DNA, 726 bp, Enterobacter aerogenes
gtgccgctgaaggccaaagcgctggaggtgatgctggcggaccagctgagctggatcaccgcctggcgcaccgagcgctttgccagcccgcaatacgccgataagtattatcagcgcaaacctttttatcagcaggcgctgaatgagcagaccagcgcgctgccgtcggcggcggcgcccgcggaaagcgaagggccgcgagaagtgccgtttatcgataaggatcgtctggatcgcgcggcgtggggctatgactttgcccataccggtatcgtggcgctgctgggccaggtgctgctggatgtgatccccaccacgcaaaccgaccagcttggcggtccgctggtggcggcgcaggagtcggaatatatccagatcaagaaaagcggcgatgcccggcgggcggcgctgatgggctcgccgacgatgctggatttttacgataactacgtgcatgacacgctggctaaatataatcacgacccgctgcactcctcgttttcccacggttattttgcgtcgcggacgatttacgataacgatgacgatacgtgggattcggtgaaacaatttggccagcgggtaaaagcgattattgatattaatgttggcgatatattagtgcaggcgagaacggatatgaaagatttgaatacggtatcgggcgtgctgggtaaaatatatcgcgatataaaaagcgaggcttttaaaatactgcttccctga

SEQ ID NO: 99417 - DNA, 996 bp, Enterobacter aerogenes
atggcggtaatggttatcaccggcggcagcgcgggcgccggtaaagcgacggcgctacgttttgcaaaggcaggctatgatgtggcgattattgcgcgggatgaaagtgggctacaggaggccgaaaacgcatgtcgacagtacggcgtccggacacaggttatcagcgctgacgtcgctgatgctcgctcgctgcggaaggccgcggcggaaatcgaaacccagctcggcgccattgaagtgtggatcaataatgccatgaccacggtgttagcgcccttccatttgatgagtgatgaggaatttcgccgcgtgacggaggtgacctatttaggttatgtcaacggcacacgcgccgcgctggaagtgatgagccccagaaaccgcgggataataatccaggtgggctccgcgcttgcctggcgttccatccctttgcaatcggcgtattgcggcgcgaaggcggcgattcgcggatttaccgatgctgtgcgaaccgaactgatgcatcaacgcagccggatccaattaaccatggtccaactgccgggaatgaatacgacgcagtttggttgggcaagaaataaaatggataaagagatgcagcccgttcccccggtttatcagccggaggtggcggcagaggcgatttttagcgtcgttcagcgccccgttcgcgaattgtgggtgggtaaaagcaccattcaatccatcgttggccaatttttcttcccttcactacttgaccgcctgatggttaacaaagcctgggaaggtcagctgacagcacaagcgaaatgcagcgaaaagccagacgatctctattctgccgtgcggggcgagcatagcacccgcgggacatttagcgctggcgctcgccagcgctcatttaacgtcagcgccgatttgcctggtaaagtcgcctccggcgttgggatcgcatttggactgatgatattacgcggactactacgccgcccgcgcaagcgccgttaa

SEQ ID NO: 99418 - DNA, 468 bp, Enterobacter aerogenes
atgacagaaaacgctgaaatcctgacaacccgcaatgtgacactgtcaccaccaaaagtcgtcgttctggcctatgacggcctgtgtacctttgaattcggcgtggcggtggagatttttggcctcccgcgcccggaaatgggggaaagctggtatcggttcgcggtcgccgccgtcgatgatggcgagcttcgcgccaccggcggtatccgtatcgtcagcgatggcgggctggcgctgcttgatgaagcggacaccatcgtggtgcccggctggcgtggcatagaaagcgatgttcctcaagcgttgtgccaggcgctggcggctgcgtacgcgcgcggctgcagaatcgtttctatctgttccggggtgtttgtgctcgccgccgccggattgctcaatgggcggcaggccaccacccattggcgttatactgcccggctgcagcagcgttttccgttgatttag

SEQ ID NO: 99419 - DNA, 834 bp, Enterobacter aerogenes
ttgaaactttttgattatctgaagatggagtttcctggtctgacgcctgaagctaccaaagtccaccttgcaaaaacgaatgattataaagaggatccgttggttaaattccgtgaagggactttcgatgactggcaatgctggcagaagcgactggagtttcagcgaagatatgtcgtttcactgatcaggattccggagactgaaacctggctatttgcgggagcatttcagcagacaggcaatgcgggaaagaaagcctaccctgatcgtgaggaattgtattatcaataccaccttcagagaattcctgagactgaagaatacgcaggaaggatgtatatcagctttaaaaatacagcccgcaacttcattcgcctcggtgagagtattcagagcgaattggttatcagctcaatcaccccagtacgtctgaccttcggcgagtttccaggctaccgcaacgttgtgctggatcggaacagcatcggcgcgatcctcagacttaatctgcaatcctggcgcaccgcactgtccgtggttaaaggcatctatgtattaaccgatcgggatggcggaaaactctacgttggaaaagccgatggaatcgatgggatatggggtcgatgggaatattattttggttccgggcatggcggcaatgtagggcttaaggaagctttcggcacaggcgatgaaaatcgactgcagaatatcactttctcgatccttgaagtcatggatcttaatgccgaaaaaggtgaaattgaccgtcgcgaaactcactggaaacaaatactgctctcgcgggagtttggccataaccgaaactaa

SEQ ID NO: 99420 - DNA, 336 bp, Enterobacter aerogenes
atgcagtcgcatggtaaggcgttaatccagacactgagcctgctcaaaaccacaatggggcgggaagccagtgccgttgtgggtgtggtgaattcagttaatgacccggacacagtactgaaagactttattcacaaacatatcaccagaccggctcttactaactctgcgatgccggaacaggaccctgtgtttaaactggcaggtgttgcgccggattatgctgcccttgctgatttccgcaaacttccctctccggcggcccttcataaaatgaagatccggcaggaacgtgaagaactgcaaaaacgtaaccgagtcgcggaggggatctga

SEQ ID NO: 99421 - DNA, 273 bp, Enterobacter aerogenes
atggcacttaaatgtcccgaatgcggcactacggcacatgccagaacctccgcctatgaagcaccatcggttaaacgctcatggtatcagtgccagaacctggaatgttcctgcacatttaccgtactcgaaagtgtggatacgataattatgaagccccggcgcaatgaaaatgtatcagtcgaaccgaagcaacctgaaaagcagcagagaacgctcaatcgctatggctccgcgtcaaagctgtcaggccgtcagcaaatccctgtctga

SEQ ID NO: 99422 - DNA, 876 bp, Enterobacter aerogenes
atgcttactttaccctcccaacctgcagttactgctgctctaatctcagccatcgttactatttctatatttataataaagggaatcacaggttctttttgggacaaatatttccacaaatataaaataaaaattgatcatgagtatgagcaacgaaagaaaatcaaagaggccatatctaaatacaaagttccattactcagttctgccgaggatttaaatcatcgattatggaatttttcaactcactgccataaaggctggcatattcttggtccaaatgaatccgttagtgaaaagtactatttacagtcattttgttataggttacttgcatttttagcttggtgtaaaaagtttgaacgcgagtcaatttatttagacagtactctttcggcaaaaaatgacctcacctttgttaaatacataaaaacaatgcaaaacactttttcaaatgcatttatttttaatggattaaattatgatagcgagcatgccacagatcacttctttaaagatgaacttgcaatccttgttgaacatatgataacaacagaaggagtcatcacctttactgatttcaaaaaaattgataaagagcactatcaaaaaatgacattgtatatttcctcaatattaacatcacgaaactgtaataaatggtatttaatgaacggttttcacttcatattaatggcattcctgtcaaaatatggttatgactatcaaaaaaccgaattgaaaaaactcaagggactgagaaaattacagcctcaaaatataatagctgaaaatttcaatgcaatagtgaagcaaggtaagcttgatgggtgcaaagaaatgaaaaaagccgtcaatgtactgcttagtatctag

SEQ ID NO: 99423 - DNA, 957 bp, Enterobacter aerogenes
gtggtacagcaagcatggtccttcaaggcaattgaacaagaggatttaagatactggggcaatgatggttatcatgacgattcatcacttttttatcgttatgatagtttcgtagccaaccacaaaaatgtgaaaaatggcgatgtcgttattattaccaacagaggaaatgttttgggtgtatctgttattgaaaaaatagagacacaggatatcaataaaaaatgtaacaagtgtattcatcctgattgtaatgcaaaaaaaattcttccaagaaagactataaaaccagaatggcgttgtgataatggacatgaatttgatgcgccaagagtgatctttgagccagcaatagagtttgttgctatctatggcaaccagtttagagaactatcgaatattacaatgtctcaactaatcactgaaacccctcgttataatggtcaaatgtcaattcaggaagttaatcttcaatgggctatcgacttagttaatcctctatctagtgtagtgttagaccttgaagccgatgaagccgatgaagctgttcctgcattattagatgaagatcaacgacaagtgattgaacgacatattaagaagcgacgagggcaaaaaacttttcgtgaccagcttttaaaatcaaaccctgtatgtgctgttacaggatgcatgcttgtagatattttagaagcggctcatattgatgcataccgtaacgatagtcacaatcatattagcaatggattattacttcgcagtgatattcatacattatatgatttaaaccacttggctatcgatcctgataaaaaaacattgcacttctcaaaaaaagcactatctgaaaaatatagtgaatatgaaggattgaagataggagtcaagcatgagttgtctaagtcagctttatcgaaaaggtgggcgttttttataaaaaatagtgagtgtctttag

SEQ ID NO: 99424 - DNA, 354 bp, Enterobacter aerogenes
atgctaaagccaggttcaggtgtcaagagtaacgtggatgaactgcagaggagggatgactggctgacggcgctgctggcaaatctggcgcctgccgcacgcagccgtatgatgcggcagctggcgcaacagcagagcatcaggctgctgcgcaatcctgatgactgcggctatgagtcgcgcagggtgacagcccgcagcaaaaaggggcgcataaaacgccagatgtttgcaaagctttgcaccacaaaatacctgaaaactgccaccagtgcggactccgccagcgtgcagtttgatagcaaggtgcaacgtattgcgcggtgcaccactacggcttacgtgatcgtgtaa

SEQ ID NO: 99425 - DNA, 723 bp, Enterobacter aerogenes
atgatgattgagttggagtcgaaatccttatcaataattaacccggaccataaagttaaaaagaataacagatatctctccaaacatggttctgatgagtatgcagagatattacagtctttttgcgaagttctgggtgtgaaaggaagggcttttggccagctcaataaaccattttttggtatgagcgatggaaatgaaggcgtccaatggaatatttctgtctgtacgcaaagtaataatatccgtatgggtgttaatcttgaaggtataaaatacaaagattggcctatagctaagcttattaaatcagagttggcagtccctgggttgctaagtgtaatacaaaaattagattctgaagacgaaattaacatgactttttatcgggatgcctggcaggtggtttctagacctgaaattagagagaaatatataggcggcaaggaatttaacctcaatgagctgactcatggggaatgggagcgtattttaaatgaagctttaaattgcttggataaagaacgtgattataaagggagaaatatgcaggatgttacgatggtaaacaaaaatggtagtgttcttgttcgtaccatgccagtttctcctcatttaacaatatggtctccattaataattaacgataatattgatgatgcaatccgaaataagtttaatcaattgattcatattcatcgttggatgatgcagttaagttga

SEQ ID NO: 99426 - DNA, 960 bp, Enterobacter aerogenes
atgaaagagataagaaaagcgcgcccctctgccgcagattcaataaataaagttaagatgttaatagaaagatacgcaacaaaccctatactgtcaggacaacttattttcactccaaaaagagttccaccagaatttctttttaaatacacatctattgactcagcaatgaagattttatgtaacagttctttcagatattcacaacgcgaagttcttgatgatatttttgaagaagctccatgccgcgacgaaatatccagagcatttcctgggtttgaggatgggccgacacttttaattaatacacatcactctgaagaagatttaattcgcttagataaaataaagtcaatgcggctggaaatgcgtagggctggtgaaacaattcaagacagtgtagccataattgacccaaacaaaacaagcaatagttataacaaaaaattcctgcatactcttgagaatacatctaggcctttggcattatcattgacagaaaatttaaatagtaagacgatgtgggctagttatggtgacaaccatcggggcatatgtatggtgatcaatactcggtcaatgtattttatttccaacagagatagaatttctacagctggttattttgcaccaattatttaccgaccactgacagcagaagattatgcatttcgctttccttctgagcgtttctttattaaaactgatgaatggaaaactcaaaatgaatggcgacgagttgagtatgtcattgataataaagatatggattggaagaatgacatccatacattccccttccccagtagcatactaaagggcataatatttggaattagatgcgataaatttgatatggacaaaataatcaccttagttaaaaccaaatcttccttaaaacacgttgctttttataaaacaaagcgaaccattaaccatctaactcttgaggagatataa

SEQ ID NO: 99427 - DNA, 258 bp, Enterobacter aerogenes
atggactttaatgaggaaatgagattcctaaatgaaataatgaaaaaagaggtcttttcaattgataaccttggagttgccgccatccctagcaaagatggtaactcaggaactgttatgttagtacttaaacatgaatccggcaaagaatttatatgtcctatcgatgctcagctagcattagcagttggcgaacaattaatgcgtgccgcagatgccattgaaaaaaacattttcacactcaatcacaataaatga

SEQ ID NO: 99428 - DNA, 819 bp, Enterobacter aerogenes
atggcgactaaaggtccgtacgaaatacgcaaaaatctggaactcgcttccggcgatattctctacagggaaggtggaatttatgacacaacgataggactcattgactttggggacacctggtccgggggcgggaagatcgccggctatcaggaaaacgaccagattaaaaacctgtgctatgtggacgattatgcatatccgaatatggctatgctctatgatggcggcggcattcgtgttgacgagcataacgggagcaaaatcacgttgccggagtcgtttattatccctgccacctgcacaaaacaattagtgcgcatgtggtttaaactcccgacgtcggacatcggagatacaaccgttttatacaataaccaattgctggttattggtggtacgtatgcgtcaaaccagtctctatcctacctgggcgctaacaatactgcggacggactcctgggcaacctcgttgttggcgggtttggtgtgggggtggacccaggcgcagctattgctaacatcgtcaaaactggacaggttgtccaactggcatggctggccaccaaaatcgacgataagtttgtatcgtttcggatgttcgcaaacggcgcttacgttgcagatttaacacctgtcgcatttggtagtcgcccggcttcaatccctgtgcggcagctgaataataaaggggcgtcggaaaaatcggtacgtaacaccacatatcgcgtcgctatcgacgatctgactgatagcgacctcgaaccagccgatatcgttgcaagtgattacgcagataacgcatcccgctttagctag

SEQ ID NO: 99429 - DNA, 2043 bp, Enterobacter aerogenes
atggcctttaatccgccgctgggatcgaccaacgccgatgtttttatgggcaacgttcaacgtcttgatgaactggtgaacggccccgccgccgatgttcccgaccgcgccggcgacccgctttattcatggcgcctgatccggcagagccttattcctctgagccgccagtatatgacgctggctgacgcccaggcggatattgctaatatcccggatggggctgcaacctacgtgcgcagcactgatggtagttcgctggctgatgagtacatcaataacggagggacgctggaggcgaccgggcggaaaatgccatcataccagctgatagagccgctgattaacctaatcaaatctgttttgtatgcggacaatgaggagtattcccgctctccggcagattctgcaatcatggataaaaaccaccgctggttattgcagtggcatggtgatgaggtgtggctgaagaacgctgatatcaaaggaactctgaagattcaggacctgcaggcttcaggtaatatttcttttgacgatgcggtaattaataatatgaaagttgtcagcctggacgcggatacgatttctatcggtggtgttgaaatcccggtgtctctcgccagccccgatgagtacgcacgttcgcctgccgattcagcgaaaatggacaaaaactatcgttggttattattctgggagggcgataaattaaatctcaaaaaccttgcagttaaatatgggttgaccgcagggaaaatcgataccagcgagctgagcattaatggcgttcgggctcccctggattatctgaatcctgacgagtattcccgctctccgtatactgaagtggttgttgataaaaacctgcgcattatggagttcaccgatgatgacggtcatgtcgttattgccggccgtttaattaatcccgagccttcagccagtgattcatacgaggtttatgcggacgctggaaaattatatcgcatcaataaaaccacgtctgaccgcgagttaatcgattcgaacacggataattctaacgtgcaaaatgcacctgaaatattcacgtttgattcaactcgcgacgatacagttattggcaataaatggtttagcgcatacagcccctataaaccggcagcgtattacgggcgccgggccattgtcggatttggtcattcattcatggctaacccgcgattcctgcgcacgctgtctgatttaaccggtctgccgacctacaattttggccgttctggcggactgtctcgcacgatggcactgcgcgccggggcatacaccgtatactacgcgccagtaggtggcgttatccctgaatccggcagtgttgcactgactccagccgacccaggagtgttgcaggttgtggggaatgctgcagtatcagaaacggtacgcggtaacctggctggtgttgacgggacactggcatgggatggaacaactctgacgtttacccgagacgtcagtgggccggctgttgcggttccaaccgtgacgccgtttatttactatccgtacacgattgattcaacgagcaccgtagcagccggtgtgcggtacgatgcgcacggagatgccataaatctgttctggccgggtcggaatgacgccactcaatacggacagattttgagtaatacgaaaaaaactattgccagtatgaccgcacgtaatattcgttttctgctgatgccggagttccctatggcgtctgagataaacggtacgtacggaaatggtggaattttgcatttgaacagtgaatataaaaagctggccccaaacaattattgtgaaatagatggcgttgacctgttgcagaatttcaaaaatcactacaacccggcgtatgcacaggacgtcactgatattgctaacggcattacccccacatcattacgtcaggactcgctacacccgagccagacgctacaagctaacgctctgtatatcggcgcggatgttaacgcgcaattcgttgaacaagttctgttgaataaaggttggttataa

SEQ ID NO: 99430 - DNA, 300 bp, Enterobacter aerogenes
ttggaggtttttaatggtgttattgaagaggatttatcaccgatccatgacattaaaatcaagggcatattgaacggaacgcttatcgttaatggcatacatgctgatattcacggaatcgtaaacggagacgtttttgttaacagtggcggctctgtaaatgtttacggaattgtgcaagggtcagttaccaataacggcggcttggttactgttttcggaatggtcggtaaagacgtttctacagcatctggttatacaaaaatactgccggaggccataacaaactttaaacaataa

SEQ ID NO: 99431 - DNA, 393 bp, Enterobacter aerogenes
atgacccttacagaaatcagaaacgctgtcatttcccgaatggcggcacagaccgctattgcctctgatgcggtggattaccccaatggtccggtatttgaccccagcaaccgcgatatctgggcccgcctcaccaacattgcaggacaggctggcgcaaccgagatcggggatgggccagtcgtccacaggacgggcttactcatcattcagctatttgttccggttggctccgggacgttgcttctctcccggacggctgatcagctaacggagctattcgagttcaaggacgacggaaaacttagttatttcgctgtttctgctgtgccggcgggtgagaccgatggctggttacagctcaatcttcaaattccttatcgcgctctgtag

SEQ ID NO: 99432 - DNA, 630 bp, Enterobacter aerogenes
atgaatcaaacacaattccagaaggcggctggtatcagcgccgggttagctgcgcgctggtttccgcatattacagccgcgatgaaagagtttggcatcacttccgctatcgaccaggcaatgttcattgcccaggtagggcatgaaagcacgggatttacccagcttgttgagagcttcaattatagcgtggccggcttgaatagttttgtccgcgccgggcggctgacgcagggtcaggctaattcgctcggccgccggcagggtgaaccatcgttgccactggagaggcaacgagcgatcgccaatctggtgtacagcaaacgcatggggaataacggggcaacagacggctggttttaccgcgggcgcgggctcatccagaccaccggcttgaccaattaccgcgactgcgggaatgctctgaagattgatctggttaaacagcctgaattgctggcacaggatgagtatgcggcgcgcagtgctgcctggttctatgcctcacgcggctgtttgcgttatcccggtgaccttgcacgcgtcacgcagattatcaacggcggacagaacggcatcgatgaccggcgcgcccgcctcctgaaagcaaaagcggtactggtggtgtga

SEQ ID NO: 99433 - DNA, 189 bp, Enterobacter aerogenes
atggacaaacagttgtgcgagtgcaccagcaagcaaaccctgccacagcttgatttttggaaacacctcggcaactacacaatacccaaccgcgaacacgatggagaatatgatatgtgttacgcctacccagttaaacacatgtccggcgaaggtatagacagccgcatttggatcggccagccctaa

SEQ ID NO: 99434 - DNA, 597 bp, Enterobacter aerogenes
atggcgcaattgcacttagttaaacagtcccaaggaatcctgatccctgcaacgcaggagaccagcgattttctacaatcaaaatgcaagctcggcgccgttctggaagccgactataagcttgtccgcaatccggcgtttcatcgtcgctacttcgctttactcaatctcggttttgaatattgggaacctaccggcggggcgatttcgtctaacgagcgcaggcttatcacaggttacgccaaataccttgctgcatatggcgggagtgaatcggcgttacttgatgccgccgggcaatatctcgaccgaatagccgagaagcgatccggctatatcagtatttacaaatccttcgatgcttaccgggcgtgggtcatcgttgaagccggccactatgacgccatacagctgccggacggcacgctgaaaaaacacccccgcagtatttctttcgccagcatggacgaatgcgaattccaagaactgtacaaagcatcgctcgatgttctctggcggtggatcctctctcgttcattcaacagtttgcaggaagctgagaacgccgcaaaccagcttttaagcttcgcggggtga

SEQ ID NO: 99435 - DNA, 639 bp, Enterobacter aerogenes
atgaatccatggggtcctataattgcggccatgattgcggggtttatagcgttcattggcatgataataactaaggaaaataaagtctcagaatttaggcaagcatggataaatgattttagggaagaaatttcatatttaattgaagcatataaaaaatggacccttaacaataacctctaccagtctcatttaggtgtctcttatcttcatatggtcgatgaggtattggctaaatcatatagagataaatcgcagtggtatgagcaaacattgtcagatgcaattaatgagatggaaagatataagggtagaataaagcttaggctaaattcagatgtcaatcgaagaaaagaacctgaaatccgtctagacgccttacttgataaacttaactctacagaagatttgactcttgccgataaattatcaaaagatatttatcttaactcttctttaattttaagcacagaatggaaagtagttaaaaaaggggaggagtcatacgtcaagtcaaaaaagtttcttctacatttcgcgatttttgtttgcctcatcggaggcgtcggtttttgttttcatcttgagggtgcaatgaggtggataatgaataacccacagcctttaataaaacattag

SEQ ID NO: 99436 - DNA, 900 bp, Enterobacter aerogenes
atgagcttaaggtcagagcgcacaaaatgggttatgtttctgccatgttcgaattcatccgctgagccccggcacgtacttgacctggtttttggtgttttatgtctggaacgtgcaggaattcagccgcaagatattttcatctacattgacagtcccactcagtgcatggatagtttttttaatcttggatcaacgcatcaatacatatcacggccaactacggattttttcagtgatctgcttgataactcatatgataatttggtgatgtttattagtggccatggaagtccatttggtttagatgcaccaaaaccaataacaccaaatcaattgattacatctctaaagtcaacgcctgttctaaaaaatgcagtcatctatctaggccaatgttatgctggaacctttaattttgttaatgcagggaaggctaagggtgagattcttgatattatcttggtaggagccaccaaccttcatcagagtttaagtactggtacatctgaacagttttccgctcctggaattaaacttccctggatggcaaatgtctttctcctgcatgtttttaaatggatgtcttcacctcaggacattgatggtgatggaatttatacgattatggactcatataaatatgcgggcgtgtatactaatgatgcaaataaacaagtcaaaacaaatggcttcatcagtataattgatatgcttaatgattttattggcgctagagagttagcaaaagttgagcatgaagatgagcaggtcaatatcgataacaaagtggattgccaggcaaaatatgaaatgtatattaaccggctagcacttcatcatgtgcatcaggaatgttggatattaaactccaggcctgcgcagttgattgagttctga

SEQ ID NO: 99437 - DNA, 393 bp, Enterobacter aerogenes
atggctgagttacgcgcgggaggtatggcattgatcattgatagcgccacatctgaggagattggccgaggtgtgcaagccgtgagcctcatacctgttcgcggttcattcacatcaccgcacggaaggccatcaaacaacggtggcgatattccggcatggctggtaacgggaaacgttgttgcgaaattaggcaaagagtcaccgcaatgggccgggaatggctgggcgctttacccgccgcagtacctgatgccaatcgatggcgacgacttcagcaatgagggtgaacgacagaaggagaggagcatgcctaaatccccagcagaacgcaaagccacgcaacggcaaagtaaaaaacgcaaacacgctatttgctatcaacaaatctaa

SEQ ID NO: 99438 - DNA, 600 bp, Enterobacter aerogenes
atgaccagcaaattaaccagagatcagcttcgggagcgcgcccaactcaaagcaaaaaatctgacttatgcaaattcacagagtgcattcgccggtgttcgcagcgagttggaggaagagcttcagttcttgcaatgtgcgttagcatgtctggaaggagtgaacagcgagccggcgccggtagtgccggagaaatgcccagcagaaattcgctacctgatagcttcgcattctgatgcgcttttcaacgacgatgatgcacaggaaatctggaacgcctgcctcgcagccatgcaccaggttggcaactctccggcgcaatccgtttgctatctggcgcaaaaccacgtttctccggagcaaaacggcgacactccagcgcaaagccagggatggattccgttaagtgagcagatgccgccaagtcgtcatgaggttttggtcgggcgttggtggggagagaagccgcggtggtgttgcaaatgggcaacgtatatccctagccaccccgatgcgcagagtagcggctggttgatccccggcgcgtcatggacgccaactcactggatgccgctgccggcagcgccccgcaggaggtga

SEQ ID NO: 99439 - DNA, 339 bp, Enterobacter aerogenes
atgggcaaaccactaaacaaacgcgaacgcgagtttttaaagccagcaattgtccacggctgggaaatcgaaattagcccattacgtaaaacggctttatgggatggcgactctctccttccagttagagtcggcaccatggctgaaagcctgataaagcgcggctatcttgagcgaatttctatgggattcggcagggacattatccgagcgacggaaaaggctaaaaatttacgttgttaccgttgctcgtatggcaggactatcaaatacggtcagcaagcgggcccatgcccgcattgtgacggcggaatcaagccagaaggagccaaccaatga

SEQ ID NO: 99440 - DNA, 618 bp, Enterobacter aerogenes
atgactgatatcaccgagcttactagcgtacaaaaaaacgcaaatattcaccgtttatctaggctcattgactatgcatctaacgacgaattgcggcaaacggctgttgaagttgagcattacacggatcagctcatagaggcgctggagaaggcgcagcagcgtaacgccaagctggagtcttctggtaccgctcccggcatattgcgctgcactgagtgctcgttcgttcagacgaaaaacatcatcagcgttacagcagacacaattacaactgtcgaaatcgaaccggagccatgcccaaatggttgtgggcagcttcagcctgtcacctggaaagcgctggccatccaactcatgttcaccactaaacagggtctttcggatttgctggaagctaagaagcgcatagcagagctggagcgcgaacaggagcatcttcgcccggtaggtgtgatgagcgagaaggcatttcaccgtcttgaaaacagtgaatctcgctttattgcgttgtggccgcgccccggcatctttttgccacgcaagcgccccgaggatggcgtgatcgtttatgcgcgtatagctgccgccgctggcatcaaggtggaggctgagtga

SEQ ID NO: 99441 - DNA, 585 bp, Enterobacter aerogenes
atggcaactcaatttgaaaacggattaacactgagtcagcttgcagaacgtaacgctgagttggttacggaagtcgaaaaattacgtgccgaacgcgacgcgtcattgaatgaagagcgcgtatgggaaaaaaccatgatggaagtctgcggcgaggatggcccggcgtcgttcgcggcggtgattaaggcgctggctgttgagaatgtggcgctgaagaatgtttttatccagaagaaaatcccatccgaagcagtcgatgaattcttggaaaccgcagtaatggatcatgactggaatgaaacctccgagtggtcatgggttgaaaacgaaacagaggttatccacgccgttctggatgcacttaagcctgaaacccccgccaccgatgcctacctggccgggattaaggctgatgcgattaccgcttctttggatgcttgctctgactatcttgaaactgactgtgttatggacaggcttgatatcagctacgaagaagccgaaaaacgtacgtcaggagcaattgagtttcatgatgcgatcgtcgcttttgtcaatcggctgcgcgagggtgccaaatga

SEQ ID NO: 99442 - DNA, 405 bp, Enterobacter aerogenes
atgatccctaaaatctataaaggtgagttttctgtaattcaatgcaaaggggctttggcatcgctcacggtagctatgaaaagtgtgaccccagccaaaaggcagaaatccatgctcatgaaccttctgttacagattgagcgtctttctacaggcaaaagatctgttgagctgagcgtacgtaaggaaggagaactaccatcttacaacgggaagcccaaaaaaaatttctgggctatcaagaagataccaatcagaggttactattgggaatcggaaagagtaactcgagccttttttataagtcattatatttacaaggattttgatgatttacacgattccgatatcaaaaaagtctgtaacaattgggatcgaatcgagagaggattagatgactactga

SEQ ID NO: 99443 - DNA, 459 bp, Enterobacter aerogenes
atgactactgacaactatgacttcgatgacgacttcgaatttccctttataagtgaaagggaattatgctgtgcacgcttagttttcaatacaactgaagacattcttcttgccatgcaagatcaaggcgttactcaaagcactttagctaaaaagcttggtaagtctaaatcttatgttagccagttgcttgatggcacaagaaatatgactcttaagaccttagcggacatctcatatgcactaagcgttaatgtgaaagtcgtcatcagtaaagatggtaaagatgtatctcaccctattgttcctgaatgcacatatgatagatacgtctctaactccaatgatattaatctgaacgatgcaaaaataattaaaatcactattagttcaaatgatataggctgtgaagatcatggatttacaggaactgagattaatagaagcatctgctattaa

SEQ ID NO: 99444 - DNA, 414 bp, Enterobacter aerogenes
atggatttacaggaactgagattaatagaagcatctgctattaatataacctttaaacaaaactcattggttaaaggaaagggaagtataaaagtcgactatggtactgttgagtttgaagctggcggacatttggttgataaacctgaggccggtgttcttgctatgcgtgccagcccatgtatacgcggttttcaaggtgatcaagagcatattgatggtaaagaagagttttttttacagatagaaatccgcctggtatttgtattcgacagtaagagtgaaatgtcgcaagatttcattctcgaaaatagttggtatttctcatcattcatcaggacgtttttcaaaaactttgctgatgatatattaaaaaatactacactaaatggtattaaattacagctcaactag

SEQ ID NO: 99445 - DNA, 240 bp, Enterobacter aerogenes
atgaaattacagaataaattactgcgacatgttatttccgcaggcgttgtggtgttgacgtcttcttttcttgtatacgaattaatcgctacccaccgcgatatgtcaggctatatgcgatacatcatagaaaaaggagaatcgacctttctctatgataagtatcagaatcaactcatcatctctcagtttctgcgtaagctggatactgccccaaaccaaacagaggtagaacagtga

SEQ ID NO: 99446 - DNA, 168 bp, Enterobacter aerogenes
atggcattttatcaagtttcttacgatttgcaaaagcagattattacacttagcgtaacaacagaagtaaacccggcagcgactgatgctaacgttatgactttacaaggttcattatcgctcactaagttgctgcggaaatttattgggctgttctggttctggtaa

SEQ ID NO: 99447 - DNA, 582 bp, Enterobacter aerogenes
atgccaacaaagttatacaagataggtgatttggctgatattcgctcaggctatacgttccggggggctgtcgaaccggtgcctgatgggaatgtacgcatattacaaattaaggaccttgagctggattggcagagagattatgaagctttaccgacgattagttgggagcaacgtgttgaaccacctttccttagacaaggtgaaatcgtcgttgccgccagggggaaccggaacgttgcggttgtctatagcagtaatatcccagtagtagctaccagccaatttctgattgttacccttcgaagggaagagcgcgagatagctcctgaatacctatgttgggtacttaaccacccgatgacgcaacagatgtttaatcgcagtggtacaaacatccagcttgttactaaagcagcattgttggatgtggagattcctgttccacctgcgtatacgcaacgacaacttattgagcttcaacgagtctggcaggaagaagataaacttatcagtaagttacaaacgaatcgtcaccagcttgagctcggcatattgcaaaaattacttaaggataaatag

SEQ ID NO: 99448 - DNA, 1524 bp, Enterobacter aerogenes
atgagcaacaaaatcgatcaagaccgtattaacagggtgctatggggcgtgtgcgatatcttccgtggcactatcagccctgatacctataaagacttcatccttactatgttgttcctgaagtacatttctgatgtgtggcaggatcactatgatggatacaaaaaagagtatggtgacgagccggaactgatcgaagaaatgatgaagaacgagcgattcgttctgccaaaagaggccagtttttacgcgctttacgaacgtcgtaatgaacctggcaacggcgagcgtatcgacgaagcccttcacgcgattgaagaagccaacggtactaagctgaaagatgcagggaaaagtgttttccaagatatctcttttaacacagataaactgggtgaagagaagcaaaagaacgggatcctcaaagacctgttagtggagttcgctaatccagagctgaaccttaagcctagccgcgtgggcgggttggatgtaatcgggaatgtgtatgaatacttgatcggtaaatttgccgccaatagtggccagaaggcgggtgagtactataccccgccggaagtgtctgaactgatggctgaactgttagatccgcaacctggcgacactatttgcgatcccgcctgtggttccgcgtctttgttgatgaaatgtggtcgcaaggtagtacagcatcatagctctaaacagtatgagctctatggtcaggaagcgataggttcaacctggtcgctggcgaaaatgaatatgtttctgcatggtgaggataaccacaaaatcgaatggggcgacaccatccgtaaccccaaattgctggataaaaacggcgatttgatgctgtttgatgtggttaccgctaaccctccgttctcgctggataagtgggggcatgatgacgtggaaaacgataaatttggtcgtttccgccgtggtttgccgccaaaaactaagggtgattacgcctttattttgcatatgatcgaaaccatgaagccgaaaactggacgtatgggggtggtcgttccccatggcgtgctgttccgaggttctagtgaaggaaaaatccgtcagaagctgattgaagaaaacctgctggatgcggtgattgggttacccgaaaaactgttttatggcacgggtattccagctgcaattctgatctttacaaagcaaaaggtagacaataatgtgttgtttatcgatgctagccgtgagtttgaaccgggtaagaatcagaatcgattaagtcaggaaaatattgccaaaatcgttaaaacttaccgtgatggtgataacgtcgagaaatatgctcatcttgctagtctgcaggagatctgtgacaacgattacaatctgaacattccacgttatgtcgatacttttgaagaggaaaaggaaattgatctgatgatagtccgtgccgagcgtcagcaattgttaacacggatggctgagctggaagtaaaaatggcgcagtacctagaggagttgggttatgatgcctga

SEQ ID NO: 99449 - DNA, 1143 bp, Enterobacter aerogenes
atgatgcctgaaggatggcaattaagtacaatagaaaaaattgctacagtctcctcagggggaacgccaagtcgtaaaaatgcgtcctattggaatggtaatatcccttgggttacaacagctgaagttcaatttaaaacaattattgatactgctgagaagataacggtagatggattaactaattcatcagcaaagctatttcccaaagacactattctcatggcaatgtatggacaagggaaaacccgaggacaagttgcaaagttagggatagaggcaacaactaatcaagcgtgtgcagcaatccttctgaaggaaggatatgacatcgattattactatcaatttctgatacaccagtatgaacatatccgagaaatgtctaatagtggcggtcaagaaaatctaagtgctggaatagtaaaatcaattcaggttccagtcccccctatttttgagcaaaaaaaaatcgcccaaatcctttgcacctgggataaggctatcactactactgaacaactgcttaccaatatccagcagcagaaaaaaaaactgatgcaacagcttttaaccggtaagaagcgttttccggaatttagtggggaatggaaagaagtatatcttggtgatatatgccaaccgcagcaatgggtaacgatatcatcatctgatttagttgattctggatatcctgtatatggtgctaacggtttcataggttattattcaacatataaccatgagtgcgaaactgtagcggttacctgccgggggtcaacatgtggtgaagtttcattaattccagggagaagttatattacgggtaattcaatgtgtttagatagcattgatgagaatgaaaattcatatctttttttatatcaactcttgaagtttagagggtttaaagatgtgatttctggttctgctcaacctcaaattgtcggaaaggcgataaagaaaataaagctcaatatgccatcaatttctgagcaaattaaaatagcatctgtactctctgtttttgatcaacaaaatgaaaccttacaacaaaaactcttttaccttaaacaagaaaaaaaagccctcatgcagcaactgctcaccggtaagcgacgggtaaaagcggaggccgcatga

SEQ ID NO: 99450 - DNA, 291 bp, Enterobacter aerogenes
atgacggataaacatctacctcaagtcttggtgagtgtgttcccgttgtttcagtgcgatgatggccgtgcccgcattgaatgccccttccagtcagacacgctctggttcagtcaggcatccatggccgagctagacgacaaaaatgttagtgctatcaatgaacatctaatcaatatctttgcagcaggtgaacttgttcaaaattcaatcatgcgaataatccgtatagttcgtcaggaaggaaaacgtcatttttccaaagagatagagcactacaagggagtataa

SEQ ID NO: 99451 - DNA, 3282 bp, Enterobacter aerogenes
atgagcactcaacatgccccaaaatttcaggaagaatacagtgctaagcttccggctttggcactgctgaataatcttggctggtcttacctttctcctgaagaggctctggctgcccgagctggcaaacccgatcaggttgtgttgatacacttgctcagggagcaactggcaaagcgtacttttacgtttggtgggcaggaatattccctatctgacaaagctattgataatctgattgctgaagtcaacagcccggccctgaatcagggcttactcactgccaatgagcgtctctataaccacctgatatatgggatttccgtaaccgagtttatcgatggtaaaaaggcaaacccaaccattgccttaatcgattggcatcatccaacaaataatagttttgtttttagcgaggagttcacggtaacgcgggctaacggtgttgaatcacgtagaccagatattgtctgctttgtgaacggtattccactggtggtcattgaggccaaacgtccggatggtaatgctaaaaaggtgccaaccattggtgaaggaatatcacaaactctgcgcaatcagcggcacgatgaaattccacgcctgtttgtctatagccaattactgttgtcgattaatggccatgatggccgttatgggacctgtgaaacatcggctaaattctgggccacttggcgtgaagaggacctttctgatgctgaaatgtacgtcatcaagaaccaaaaacttctgcctgcacagctagataagctatttggtcaccggccggtagcggccagagattggtatcaggggttggtagctgcgggagaattggccgtgaccgggcaagataagctgttaatcagtctattgttgcctgaacgtctgttggacatgattcgcttttatacgctgtttgacaaaaaggtcggcaaggtcattgctcgctatcagcaagtatttggtatcaaacgtttgatcgaacgtattaataccaaaagacctgatggtagccgtgaaggtggcgttatttggcataccaccggttcgggtaaatcgttgacgatggtatttctgagcaaagcgctgatcttgcatgaaagcttaaagcaatgccgcattgtggtggttaccgaccgcgtcgatttggaaaaccagcttagccgtacctttatctctagtggagagctctctgggaagagagacaagtcagcggcgatcgcgacgtccggcagacgtttagcggagcagattggtaagggcactgagcgtattatcttctcattgatccagaagtttaataccgccatcaggcagcctgaatgcatcaataccagttcagatattattgtgttgattgatgaaggccaccgtagccagggtggtgaaaaccatatccgcatgaagcaggcgttgccgaaagccgcattcgttgcttttaccggtactccattgctgaaagatgataaaacgaccaataaatttggttctatcatccatgcttatacgatgcagcgagcaacggatgataaagccgtaacgccactactttatgaagagcgcattcccgatctggatgtgaatgaacgtgctcttgatagctggtttgaacgaatcaccgaagggttaagcgaccagcaaaaaaccgatcttaaacgcaaatatgccagtaaagggcagatctacaccgcagacgatcgtattcgcctgattgcattagatattgccaatcacttcgtgaaaaacatcgacgaaggattaaaaggccagcttgcttgtgacagtaaagccgctgccataaagtacaagaaatacttggatgaggtcgggctgtttgaatccgcggtggtgatcagctcccctgacactcgtgaaggtaacactgaagttgatgaatctaccgcacctgaagttgttaaatggtggaaagagaatgtcggtcaacaggatgaacaatcctacaccagaaatgtgatagatcgttttgataaagacgattcgctgaaattgctgatcgtggtagataagctgctaaccggctttgatgagcccaagaacgccgtgctttacatcgataagcagcttaaaggacacaacctgattcaggcgatagcacgagtcaaccgtttacaccctaagaagaaattcggtctactcatagactatcgcggcattcttaaagagctggataccaccatagagaagtaccagaaacttgcatcccgcactcagggtggttatgagattgacgatctcgccgggctctataatcagatgagcaccgaatacaaacgtttaccgcagctttataaaaacctgtgggcgatttttgatgttgtgaagaacaggcaagataccgagcaactgcgtcaggtattggtgccacgcattgaagaaaaaaatggcgaactggtcgatgtgcacctgaaaatacgtgaagacttctacgaggcactgactgaatttgccagttgtttaaaagttgcattgcaatcagccaccttctttgaagacaagagtttcagtgaagatgatcgccgtcattacaaagaaacggtgaagcagttctccagtttacgccagttagtgcagcaggatgccggtgagcgtatcgactatgatgagtatgccgagcaggtcaaaaagttactcgataagcatgttgttggcgtcgaagttcgggagcctgatggtgtttacgaagtaaacaagatggggcaagcacagccagatgagtggagcgaagataaaacccgtaacgaaaccgacatcataaaaacgcgtgttactcgtatgatcgagcaagaactgcgtgacgatccctatgcgcaggaggcgttctctaagctattacggcaagctattgaagaagctgagaagttattcgaacatccgctcaagcaatacatgcttttccgggagtttgaagagcaggtgcatgaacgccgcttgaatgatattccagatgtatttgccggcaaccaccatgctcaggcttactttggcgtattcaagaaaatgctacctgaggttttctcgattaccgattcgcaagttcaagataaatggataaagctggcttttgatgtggaccgttcagtcgaaacctcagtggccgaaaactcaataaacccgcagaatattgaagcagaaatcaggaaaaagctgctgccattgatgtttaaggaatgcaaagccgttggcggcggaatggaccaggcgaagaggatcgtcgagatgattgtacaaattacccgtgtcggattgagcggagtgtaa

SEQ ID NO: 99452 - DNA, 750 bp, Enterobacter aerogenes
gtgcccattcccacgcaaacgcaggctatgagctttatctacggagacgagtggatcaactttgaccgtgagcctcgtccctatgccacaagtcgcgtgttgattaaggtgcatccagattgccgtgtggttgtttctgcacctgaagaggctgatgacctggccgttctgacggcagtaaagaagcgtgggcgctggatttatcagcagcttagggatttccgcagacagcttgaatacattacgccacgtaagtatatcagcggagagagccattattaccttggcaaacaatacttgttgaaggtgattgaagaacctgcggaggtacaacgcgtaaaaatgttgcgcggaaagctggaagttaccttgcgtcagaagagccctgaaaaggtccggcaccttcttattgattggtataaaactcgtgccaaagatgttttcgccaaacggctcgaagccatgctcgagcaggctctgtgggtaaatgctccgcccccattgcgtattctaaccatgcaaacacagtgggggagttgttctcctaacggtcggctcactcttaacccaaacttggttaaagctccccgagaatgcattgactatgtaattttgcatgagctgtgtcatctagctgagcacaaccatagcgagcgtttttaccgtctgatgggacaagttatgcccgagtgggaagtagtcaaaacgcggttggatgagatggctggggtgatattttctgatttatga

SEQ ID NO: 99453 - DNA, 915 bp, Enterobacter aerogenes
atggccgttcctacctacgataaattcattgaaccagttctccgttttctggcaggtaaacctgagggcgtaccagctcgtgatgcgcatgaagctgcggcagatgctcttaatcttgatgataatcagcgagcagaggtaatagctagcggtcagttagtttataaaaatcgggcgggctgggcacatgaccgtctgaagcgagctggattatcgcaaagtttatctagaggaaaatggtgcttaacaccagaaggaattaaatgggtacaggtccatacccagccacttaccgaagagcaagtgaaccacttagcttttgatttcatgaacgtgaagttaaaacagcagcaagatgctgtcgatcttgatccaagaccagctgcactgaaccaggaagagctggcaaaaagcagtcctgacgatcgtcttgatcaagcgttaaaagagctgcgggatgctgttgctgatgagttactggaaaacttgttgcaggtatctccggcgcgttttgaggttatcgtactggatgtacttcatcgtctgggatatggcggacatcgggatgatcttcagcgcgtaggcggtactggagatggtggcatcgacggcattatttcgcttgataaattggggctggaaaaagtttacgtgcaggctaagcgttggcagaacacagttggtcgccctgaacttcaggcgttctatggtgcgctggccggacaaaaggccaaacgtggggtatttattaccacctccggctttacctctcaggcgcgagattttgcccattccgttgagggaatggttctggttgatggcgaacgtttagttcatttgatgattgaaaacgaggttggtgtttcctctcgtttggttaaagtgcccaaactggacatggattactttgagtaa

SEQ ID NO: 99454 - DNA, 228 bp, Enterobacter aerogenes
atggctactatcaataaccccattcttagtgctgaagacccgcttatagacatgacttttatcactacatataccggcatgaccgacaaatggttttataaacttattcaggatggcgaattcccgaaacccatcaaactgggacgtagttcacgttggtttaaaagcgaagtagagagctggatgcagcaacgtattgaggattcacgggggaactgtctgcgatga

SEQ ID NO: 99455 - DNA, 570 bp, Enterobacter aerogenes
atgaattacacctctaatcctttctggcaacaacgtattaccgacaccttactgaacgcccttaaggcttatccgcgggtattaatgctgagagttgatctacgactacccaatgtaccagcagctacagatgctgctgtcatctcccgatttatagactctctgaaagtgaagattgcagtgtatctgcttcgtaaacaccgcgatggcaaccgaaaacgcatgaccgacctgcgttatatatgggcaaaggaatatggagaacgcaacggtaaaaagcactatcacatggtgttgttgcttaatcgcgaagtctggtgttccgcaggcaactataacgatccagcttcactggcaggattaatcaaacaggcgtggtgtagcgccttacgggtgggtacacaggagtatgcaacgctggcacactttccggaaagcccggtgtactggattgaccgagggaataacgagcaactacaggaggcattattacgggcttcatatcttgcaaaggaccataccaaggttactggtgatggcgagcgtaattttggatgtagccagcgctga

SEQ ID NO: 99456 - DNA, 921 bp, Enterobacter aerogenes
atgctgataagggaatatctttcaacctttccattgtctatgctcgggcgcatattaatatcgctaaatataacgatagcaaactcaaatttccctcagatagccaataatgccccggcattaatagactttatttgttcggatgtcgtttctgctaaaataaaatctccttttgataaaataaataaacttgtaaaagatgtagaaagtgacgttttctccgatggttgtattgtatggcttaaaaatgatatcgaggcatgccactatttctggtggaaactgatgcagctcgaatggaaaggtgtgtttaaactgctcagagcggataatatacatctctacagtgatgtggggagtaagcagcaagctcaatgcgtttctgatacattttgtttgcccagagtcgtaggcggacataaagaacgctataaatccatttttaccttattaagtttgttgccattcaaaaatactgaaataaatcttctgatttcacatttatcctgtaactacaaaagagataaagagatatgcaggcatgaggtcaatgtcacctctttgatgaaaagcaaagagtcggtttctttttcagtttgttacttaaagaaaaaaaatatgtttctggctgatttagaacctctcacggagagtgatagtaaatacgcattaatcacacagctttatatgcttacaagagaagacaattttaaagagttagtcacttcgttgactaaagcttggtcacaaaagaaggtacgtgaaaaaagaaaagagacggataaaaaacagactgccgaacttctcggcttgagcaaagaaagcatcaggatgcttaaggaattatcaaaaaaacacagtatgggccaatcagaactgatggatctggctatacagtctttgttcgagcaaatgcaataa

SEQ ID NO: 99457 - DNA, 678 bp, Enterobacter aerogenes
atgtctgaacagggacaccgctatgatcggttggccagccgtctcgccatcctggtcagtcgcctctttatgggcgaatcactcagcgtcagacaattggctcaggagtttggcgtttctgagcgcactgttcagcgcgacttgcgtgagcgtctgcgttatctcgacatcgaatattcccgtggaagcttccggctcctggacgcacggggtccctttcgcaccaacagcgacattctccgctttgcccggataaccagcgtggcacattactttcctactctggatcccaggctgctgtcggtgttgctcgacagtggtcaggattctccatgtattatctggaatgccccgccacgtcaggcacctgcgttgtttggtggtttccaggctatcgttcaggccatcatccgtaatcgccgtgttcactttctgcatcaaggtcatcagcagtctgcagtggccccttaccggcttatctgtctggacggggagtggtacttggtgggcgtatcgaaagatcgcattcaggtgttcaccctttcagccatcactgatgtggtgatgaccctgagctgttttgtgcgaaacagccatatcactcgcatttttcaggacccgagattcattcaggccctgccgcattatcaatatatcagcgggctcatcagggaatga

SEQ ID NO: 99458 - DNA, 465 bp, Enterobacter aerogenes
atgaaaaattcatcactcagcgcgttggtgctggtctgtggccttgttccggtcatggtgcaggcttttggaaataaggacacttggtccagtggttggggccaaggcgtatcagagtttgttatcaaggggaaaggtcagtcacagttatatctatcctgtgaggattatggctcacagccggctacggtcatatttacggacgccagcgggcatgaagtcagtatggatgaagataaaaaccttcaggtcagcattgacggtggagaggccattgatatcagtgagtctggcagtcgtatcggcagcaataacctggtgctggcctggacacagttgcgtaacggcaaacaagtctcggtatccggcgaaggtgttaatccagctaccttcacgctagctggggctgcgaaggtgctgccagagtttggcacacacggctgtgtggcaaaggcctcactctga

SEQ ID NO: 99459 - DNA, 360 bp, Enterobacter aerogenes
gtgaaaatcaaacaatggttgatacccgcactgcttttattgtctgcttcggcgctggccgagccagcttctccaataaaagtggagaccagtgattatgttcatcctgccggaacacgctacgccactgtagtggtcacctcgctggatgacagtgtgagagttgaaaacattgacgttaatcggggcaactgccgcatcgacaacaaaaagtttatgtcctccgttaacaaggaaaccattctgccgatcactctgcgctacgggcagtccgtcaaagtgaatttttataatgagtgcgtggcttcggaagtggtagtcaccaccgacagaggggcgtggcgctacacctataactga

SEQ ID NO: 99460 - DNA, 213 bp, Enterobacter aerogenes
atgatttttctgaaaatgctggtgaccgctttgggtcaggttctgacctggtacggcggtcagcaagcccgacaatttattgaaatccgctttcgtcaggccggtcgcgatgacgacagcatagatgcagccagagaagcagccacgctgctggcgaccgcgctgataactgccctgatggcgcagatattacggatcctggacaacttctga

SEQ ID NO: 99461 - DNA, 750 bp, Enterobacter aerogenes
atgaaattagccagccgctttggtgcggtcaacctggttcgccgcgaccgtcctctaacccatgatgaactggcgcattacgtaccgagtgtctttagtgaagaaaagcatgaatcacgtagtgaccgatacacctacatcccgaccataacccttctcgataacctgcagcgagaaggcttccagccgttcttcgcctgccagactcgtgtgcgggatcagagcaagcgtgaacacactaaacatatgctgcgcctgcgccgcgaaggccaaatcactggcaagcaagtgccggaaattattctgcttaatagccatgacggttccagctcataccagatgctgccggggctatttagatcggtttgccaaaatgggctgatttgcggtgagagttttggtgaagtgcgtgttccccataagggtaacgtggtggagaaagtcattgaaggggcttacgaggtactggggatatttgatcgggtggaggagaagcgcaatgcaatgcagtcgcttttgttaccgccgccagcacaacaggcgatggcgaaagcagcattaacctatcgctttggtgaagagcatcagccggtgacggaatcccaaatcctatccccacgccgctggcaggatgaaagtaatgacctgtggaccacttatcagcgcattcaggaaaacctgattaaaggcgggatattggggagaacgaccaaaggtaagcgtgctcatactcgtgccgtcaaaggttga

SEQ ID NO: 99462 - DNA, 1185 bp, Enterobacter aerogenes
atgccacaactttatagctacatcaggtggtcaacagatcgccaggacaaagggacaaccagaaacaggcagcttgcagccgcgagagtatatgcggctaaagctgggctggaaatggttgagatcgaagatcctggcgtcagtgcttttcgtggcaagaataccaacacaggaaaattaggggattttatagatgcagttaaacaaggagctattgcctctgattcctggctatacgtggaaaatctggaccgcattacaagacagaatgtaactactgcacagaaactgtttattgaattgttagagttaggtttgacactcgtcacaggcatggataagcgggtatatacacttgattctgtaaacaaaaatccaacagaattaatgatttcactactgcttttcagccgtgccaatgaagaatcagaaacgaaatcaaacaggactataggcaatgttgttgctttggtcgaacgtcatcaagcaggattgccagtaaacattaagtcagttggtcgccatccgttttggatagatgattcaggtccgcaatatgaagcggttaaagaacatccggtttactggagtatcgcccgcgaagctatagacatgtttttagatgggaatggcatctatacagtaaagcgttatctcgatgaaaaatatcctaacggtttaaaggataaggagtgggattatcaagttttaaagaaaatgcgtgataatcgtgcgttgattggggaaaggactatcaatgtcggtggtgctacttacaaacttgataactactatccgtggttgtgtaaagatgaagcagagtttttaacgctggctgaacgtaagcaacaaaacaactacaaagctaagaaagacaaaacagaagaaatcaaattgttgtcagggctacaggtgttgcggtgtagtaaatgtggaggaacgatgcattccttcatgaatcatggtagtgctcgctacatctgtacgaatggggttcacctacagaaaaactgttctggctggtccatatcagctcaattagttgaacactgtacaatgatttcactcctgatcggttacatggacaagagtcgtaaggatggtattgacactactgctatagaagaagaaattagtagaaaagtgaatcgccacgggtttaacagacacctcggagtcatttaa

SEQ ID NO: 99463 - DNA, 1488 bp, Enterobacter aerogenes
atgaaacaaaacggacaagcttactcttacataagattttcatcaaagaagcaagagcaaggcgactctgtaagacgccaaaccgagcttgcagaacagtacgcacatgcgaataacttgattctatcagataagaactttcaagacctcggaatctcagcattcaaggagggaaacagaccttcactcggtgatatgctcgaagcaatagagaaaggtcagatcgaacaaggctcaactatcatcattgaatcgttagaccgcctgagtcgccgaggcatcgatgtgactcaacagataattaagtcgattctgcaacacaacgtctttatcgcttcattggtcgatggtctattactgaaccgagaatccgtcaacgacctcgtaagtgttatcaggatagctctagcagctgaccttgcatataaagagtccgagaaaaagtcacagcgtctacgagaaacaaaaggacaacagcgacaacgagcgttaaacggtgaagttatcaacaaaatcctacctttctggttagaacgaaaacaggataaaattgtttttagtgatagattggatacagtcaaaagaatcatagagttgcgacgaaaaggacttggaacaaataaaatcgctagaacgttaaatgatgaagggcataaaccattacgttctgctggttggaatcatacaactgtaggaaaaacaatcaactcagttgcactttacggtgcataccaaacatcagagacgaccaaagaccggaaagtcattctgcttgatatcatagagaattattaccctgctgttatcagcaaagatgaattcatacttttacagtctgatcagaaacagaacaaacctggatataagtctgaacacaatgccttcgctggaatattaaaacacgaatgtggaggagcccttgtcagaaaattccatgtcgtttctggaaaaacatatcaataccatgtttgtgctaacgcaagagatggaaaatgtcacgtaacaaagaattttaaaaatattgaagtagcactctttcggataatgaaagaacttaaagtcgagaagaacaccaattttgatcaaacattactagcagaacgggatgcaataaaggcgaatatccaacggttaaacgatgtgcttattgagttttcggaaccgcctagaagtgtaatacaaacaatacataacttagagaaaaaagtagaggaacttgaagcaaaaatcaagatgcagaatagtatgataatatcagagcaggcttttgattttaatttattgcaggagattcaacagccccaagaactgaacatgatgcttaagcgaatcatagaaaatataaccatctataatattggtaaaaaatggagaataaaagttttatacagaaacagacacgttcagagcttcatttgggatggtgaaaaaacgagctttatttctgatactaaaaaaatattagatctcgctaactcatggatttaa

SEQ ID NO: 99464 - DNA, 873 bp, Enterobacter aerogenes
atgaaaccgttaaaatcttttaaaatcattatgttgctatcgattactctcccagcagcagcactagcaactccaagtagcttcaatggtttccatgatattggttctatagatgaattaatggcccttccacgagaggagctttgttcgaacggcgggccgtcgcgaagtgaaatcgatctaatactccttgatgggccactagccctgcctatgtatcaaaatgatccaaatgcagctcgcttgcttctcaaagaacaatcccaaaaaatcagagccaagattaagcaaaaatgttcagccaaagatagtgtccccctacgaaaactgacgaaggcaatgcttagtaatgaggaagaaatgtgcaaagccggtgcgccaactaaagacgaactcaaggtttttataaaagaatcgaacgaaattgatattgatgagcagctaagaaaaatgccttatgagggacgccttcttatggaggagactgcaaaattaaatgggactacattccgtgaaatgttcatagatgatgtgactaatgctgcggcaaaaaattggcaaaaagcctgttcagaaaaatcatatcttaaaaagagtgaaaaaaaatccacgcaagaaagaaaggacaacgatccgccttcaaatatcaaaaacgaagataactccgatgtcagtcaaaaagcatacaacatcagcgatcaaaaattaaacgacacatggaataagttgaataaagatatacgtaagaaattactacctgcacagagagaatggataaagtcaaaatctatttgcaatggtaattgggtatgtctcactgatatgacagacaaacgtactcttgaattggaggctgaaaatgcaagccaatga

SEQ ID NO: 99465 - DNA, 351 bp, Enterobacter aerogenes
atgcaagccaatgagctggttagagtattgaaaaacgactggcaggaatcactttgtagtaacttttgccacgggaaatatagggtcggacgatttcatctaacagatgtgttcatcgtaaagtatatgatgctggtacatgaaatcgatataccagattcattggttagtaatattttcactgacatatcagatatcgtcacccgcaaggttatgtatatggaatgcagtgatatgttatcgaatgacattatgaacgagatccgtaaagcggttaaatccccaccagccaacatgagattatatcgtaatagagatcaagtaactaacatagaaatcatggaagaataa

SEQ ID NO: 99466 - DNA, 609 bp, Enterobacter aerogenes
gtgaaatcaccatatgaaagctatataaaaaaagtagttatagccgttgctataatctacggcatcggtaacatcttgtacgggctatcaactactccagaaccatctaacacacctgaaacaaatgtcgtggaaaatactaatacagccccgccacaccaaccagcggaaccaccaaaaccactgccaatcgatatattcacgaggatgtacactaccggggaagtgtatgcacgatttcaaaagcatgaattccgtgcaaaaaatgacttcaaaaattgccgattgatggttacaggaaaaatagaagatattagtactgttattttcagcaaaaagccgttggtaacattaagtattcccggttctgatgaggagctgaatttcatattcgaaaatactgactccaataacgacaaagtagcggcattggatatcggagagtcggtagtgatcgccgggatgaatgcaaataaaggatccttcggtgacatatatcttcgtgactctatactaatgtcagatatgatctccaaggaaccacataaacaacgacgaattctagtttccgatggcggattttatgacagagagatttgtcataagtaa

SEQ ID NO: 99467 - DNA, 168 bp, Enterobacter aerogenes
atggaattctctcaggatggcacggctttaaaaatatcaaccagtaacggcgataaagcctattgcgaagcgataaagtcagcagcccataaagccaaattcccggccttcaataatccggaagtctatagagattttcagaaatccggcttcgacatgcgcggttag

SEQ ID NO: 99468 - DNA, 615 bp, Enterobacter aerogenes
atgaatgtccgtatctattgccgcgcatctacagaaggccaacatgccgatcgtgcactgattagcctgcgcgaatttgcgcaaagcaagaactggcagattgccgcagagtacattgagaatgccagcggtgcgaagctggatcgcgtagagctaatgcgcctccttgcggaagctcaaccgggtgatctgcttcttattgaagcgattgaccgtctcagccgtcttaaacatgaagaatgggctgaactcaaagctacgctgaatagtaaagggctggttattgtatcaatggatttgccaaccagttggcagatggttgaaatgtccgggaatgaccttaccagtggcattctgcgtgcagtcaatgcaatgctgatcgatatcctcgcgacaatggcacgacaagattatgaaacccggcgtaaacgtcaggcgcaggggatcgcgaaagcaaaacaggcaggtttgtacacggggaaagaaaaagatctggaagcccgtgacacggttcgcgaaatgctggcgcagaacgttaaaccagctcacatcatgaaagctgcgggtatcagtcgcgccacgttttaccgaatcaagaaggagttagtaagctaa

SEQ ID NO: 99469 - DNA, 513 bp, Enterobacter aerogenes
atgagcacaaacaaagggaaagatggtgaaatgagagtgcttagactgatcacccatattgttcaaaaggaagaaaactgtgatgtgactcgtcatacaaatactaatactgccgacagtggtgcagatctagtattggagcatcctcatggctttttacctcatctgggaagtattgcaagtggtgaagataataatcaactgccagacttgtccgatgcaaagaaagtaaaaacaagaattgatgttaaaacaactgaaagcaaactggggcctgacgtagtcaagaaatttgctggtgatataaggcgtaacccggattgtgacggtcatgtcctgatgggaggaatcgacctttcagaccaggcaaaatctgatttcaaagaaattcaagatacacaggcagaggttgggaagacagttgtgtatattcctaattcaggaattgaaaaccttgagcaacattacacagctctgcctaaaagctctagtggcgatgaagatcaaacctaa

SEQ ID NO: 99470 - DNA, 459 bp, Enterobacter aerogenes
atgtctcaaagtattaatctcgttgcatatgagtctgcaagtgatggcagaatttatgaaacaaaaaccgaactgattgaaaccgcatttgttacgacggctttacttgaagagctacaaaaagaatctcctcttattgaaagaaaaatctatgagatacctaacgcagaagaacactattcgatagagtgtttcaatgattctgacattgagagaattctcgttaagttagaggagatgttcttgtccgtactggaatcagacagtgaaaagttgctgcaaaaatcagattctcaagacggaaaaagcctgccgtcaaatcagtctacttatataaaatcaagtgatattcccgagtccattaacagattcagaacccttactaatatttttaatatattttacttgaaaaataacaagtatggtggtgacacctctgttgtgttgaaattggggtag

SEQ ID NO: 99471 - DNA, 822 bp, Enterobacter aerogenes
ttgagtcagaaaattccaaattctgtaatcggtgcagtggcttcagttattgcagaacattattacagccactcaagattaaatacgctgtttatggagagcggagctcctggcgattcccccgaaggtaactgtgaaacaaaatgcagtaattggcttaaacgttgtaatgacgatacaacggttaatgctttagaagttctaggtgcagtggttcaagagtttatggatcaggagccccccccatcactattcggcgagtcatcaatttcaaaactagcagaaggccagacaagaattaccaaagcgctagccaaaaatcaattagcctatcgtacaaatggttatattactcaggctggctcgacagcaatatcgaaaaaacttgaagattatttaaaatctggcgatttttcttctattgaaaaagagtttgaaagggcagtagagcatatcaatggcgatccacatgcatctatcactgctgcttgttcaattattgaggctaccctgaagttttacattgagcgtttcagcttggctatgccgaataggctcaatgtcatgaatttgtggggcgtagtccagcctcagctcagtttgaattctgatgctacattggctgctgatcagcacaaagtattaaaaggtatttcctctatcattgatggcgtgggggcatttaggtcacacataggatcggcacatggtcgtggtactaatccgcctagtgttatagttgcggaagcacgattggtagttaacgccgcccacacgattgtgatttttgtgatggagttaatacatgcaacaaaaatctaa

SEQ ID NO: 99472 - DNA, 717 bp, Enterobacter aerogenes
atgcaacaacatcaaattcagtcccattcatcgattctatcagtcccttgcttccataccgtctaccatgagcacggtcgttacaaaatcatcaatggcggctcttttgtccatgatggtcatgaataccctattaactccaaaggatctggtgttcggcatgatatccttgtggcgatggtcaacgagctaaaagcagtgctggggctttatagccgagtgttccttacccgttttgatcttcatctccctgaattcacttctgtagaagctggtaacaaatacatacgtcaactgttcaagcgattacgtgcacgtctggagtctaggaacaacggcttttcggaaaaaataatcaactttgcttatggctgggtgtgtgaacaggaaaaagcatcacaaccccattaccattgctggattgcgcttccacataggctggtcaactggtttggtactccggacagagggatagctggtattattactgaagtctggatgaaactgacgggtggtaaagcgacgctggtaaacttgtctaaggctactaaagactatcctgatcactacgttgttcaccgtgatgatcctgagtcacttgaaggcccggtattctggttatcctatctggcaaaagagagaagtaagttgcagacgggaaagggaacacgaaactattcaacatcgaaactaggttgcaaaacgcaacactcgtaa

SEQ ID NO: 99473 - DNA, 921 bp, Enterobacter aerogenes
atgaaaatgaagaaaactctcgtcgctctgtgtttatccgcagggatgttggcatgcgtgccggggatgagccttgccgatgttaactttgtaccgcagaacaccagcgccgcgccgtctattccagccagcgcgctgcagcagctgatctggacgcctgccgatcaatcgaaaactcagaacgtagatttaactaccggcggccaacgcctgaatgttccggggattgtcggaccggtcgccgcctggagcgtgccggctaatatcggtgagctgaccttgaccctcgacagcgagctgaacaaacataagcagatttttgcgccgaacgtgctgattctcgaccagaacatgacgcccgcggcgttcttccccagcaactacttcacctatcagcaaccgggggtgatgactgccgatcgcctgggcggcgtgatgcgcctgaccccggcgttgggccagcagaagctctatgtgctggtgtttaccactgaaaaagatctccagcagaccacgacattgctggatccggcgaaagcctatgccaaaggcgctggcaatgcggtgccggatatcccggacccgatcgccaaacataccaccgatggcgtgctgaagctgaaagtgaaaaccaacagcacctccagcgtgctggtgggcccgctgttcggctcctccggcccgggcccggtcaccgttggcaataccgcggcgccggtagccgcgccagccgctgccgccccagcagccaaaagcgaaccaatgcttgacgataccgaaacctacttcaacaacggtattaagcaggcggtgaagcaaggtgatatcgacaaagcactgaaattgatgaacgaagctgaacgcctcggctcgaaatctgctcgttccacctttatcagcagtgtaaaaggcaaggggtga

SEQ ID NO: 99474 - DNA, 1290 bp, Enterobacter aerogenes
atgatgattactctgcgcaaacttccactggcggtagccgttgcggcgggcgtgatgtctgcccaggcgctggctgtcgatttccatggctacgcgcgttccggcattggctggaccggcagcggcggcgaacagcagtgcttcaaagcgaccggtgctcaaagtaaataccgtcttggtaacgaatgtgaaacctatgcggaactgaagctgggccaggaattgtggaaagaaggtgataagagtttttatttcgatactaacgttgcctattccgtgaatcaggaagatgactgggaaagcacctctccggcgttccgtgaagccaacatccagggtaaaaacctgatcgactggctgccgggctccacgctgtgggcgggtaaacgcttctatcagcgtcatgacgttcacatgatcgacttctactactgggatatctccggcccgggcgcaggtctggaaaacgttgaccttggcttcggtaagctctctctggccgctacccgtaactcagaaagcggcggttcatataccttctccagcgatgacaccaaaaaatatgcagcgaaaactgccaacgacgtctttgatattcgtctggcgggcctggaaaccaacccgggcggcgtgctggagttaggtgtcgattacggccgtgctaacccgcaggatgactaccgcctggaagacggcgcgtcgaaagacggttggatgtggaccggtgaacatacacagtccatctggggcggcttcaacaagtttgtcgttcagtacgccactgacgcgatgacctcctggaacagcggtcactctcaggggaccagcattgataacaacggcagcatgatccgcgttctggatcacggcgcgatggacttcaacgatgactggggcctgatgtacgttgcgatgtaccaggatgtggatctggacagcaacaacggttctacctggtacaccgtgggtgttcgtccgatgtacaaatggacgccgatcatgagcacccagctggaaatcggttacgacaacgtgaaatcccagcgtaccagcgaaaacaacaaccagtacaaaattactctggctcaacaatggcaggcaggcaacagcgtgtggtctcgtccggctatccgtatcttcgcaacctacgcgaagtgggatgaaaactggggttacagcaacgcctccggtctgcagaccaaagacagcagcggaagcggcgctttcacctccagccgtggtgacgacagcgaagttaccttcggtgcccagatggaagtgtggtggtaa

SEQ ID NO: 99475 - DNA, 576 bp, Enterobacter aerogenes
atgatttttggttatgctagagtctcaacgaaggatcagaatcttgagcgtcagatggcagtacttgaacctgtttgtgacaaaatcatcactgagaaagaatcaggcaaatccaccagcgaaaggtctgagctgctgaacctgctttcccacctccgcgaaggtgataccctcattactcattcaattgaccgccttgcacgtaatacccgcgatttactggaaatgattgataatctcgttgatcgcgggattactgttcaattcctcgcgaactcgatgagcttcgacaactccccacaatcacgcctgatcctaaccatgatgggggctgttgctgagtttgagcgaggtatgatcgcatcacgccgcaatgaggggattgcgattgctaaagaggcgaagaagtacaagggtaagcaaaagaataaggaattacacagtaaaatcattgatatgcttcaagccgggaagaacacaccagacgagatcgcaaagctgtgcgattgtggcagggctacagtgtttcgcgtgaagaaagaaatgcttgccagtactggcaatattacatactga

SEQ ID NO: 99476 - DNA, 870 bp, Enterobacter aerogenes
atgataatattcgaaccagaaattggcattaaagactatataaaagaccaaatggttgcttttgggtattcctataaggactccagttcatatgaagacgacttaattaaagtattctcgctaaaaagaaaaatacctgaaagtatacctagaacaattattgaattacccaacatagccatccccaatgaattgcgagcaggctatgattctttaaagaaaaaaataacatccggagagtcaatcaaaggacatctgtcaaaaagtattgtaaagacagattacaatgatctgctactgaactcatggaacattcatcacttacatctatcaaatattcctagtacgagtggtttttttgagaggactggaccagtactgtttgcaatattttttaaaaatgttgctgtcttcatagacatattatcacatggaattggttgctctgatgtctgggttaatacaaatttaatagaaaaacttcacaagtacctaccgcaatcaatagccaactttaaacttaacaatatcagaggcgaatcatactcaccttcagaaatgagagccctgcgaagtaaacattgtaactttacgattcaagtagcggatggaacagtttatggcattatggggcttatgagtaacggaaactcattttttgatatatatgcagttatgaagatcaaatctaggattgattattacaatcaagtaattaatcaagaacctgatacatttaaaaaggcattaaacataccaatagattctgaactgctgctcactattgccatggacgataacgatataatgttatacgcacctgcttataagacagctattaatatcaataatccattgataggcagctaa

SEQ ID NO: 99477 - DNA, 1626 bp, Enterobacter aerogenes
atgccatcaaacagcattccccattacctctacaagcgtaaccacacctggtggttcaggaagcgtttcgtatctgagggcaatgcaatcgaatacagactgagcctgcaaacagcaagctttcagcgtgctcgccttcttgctctgcgtttacagacactttgccaacagatggttgcttctttgggggcccccaagaaactgaagaatggcgtgatggaaaaatcagcacaagagcaaatcaaagcaaaacttcgagcaaaaattgccgaatggaccgctgaggaaacagaacattggtttagcggctctgcacgtaatgaaggcgatctgaacgattatcttgagacattagatatggttgtctctgatttgaaagaacgtatcgcttacgatgataaaccatctctgcaccgggccgaagcaagtaccgttctggacgaactgccacacctcaaagctactctcagtgagtacgattaccaagtcattgctcgcatggtggcacaagccaaggtcaaatccttgcagaatacgcgagcaatcattcttggtggtgatgctgattggcttacaactagccctgtttcctctagagagacttctcgctctgatgttcattttctcttagatatgatcaacaagtaccaaaccgagaacgcaagcaaagagcactcgcagaaaagtcaggacaaatatgctcactcgctcgctctgaccttcagtttcttcggaaatgtgcctatttcagagatctcattatccagcggtagagagtttcgtgagttacttgcctcattacctgaaaaactcaaagcaaaagaaatgctcgaaactccacttcttgagctcatttctaagaaaaaagcttccaaaactatcgcaacagctactgctaatgatcatcttgaaaaggtacgccgcttctttcaatggatgctagatacagggtatctgcctgatgataatcccatacctaaagaaccactacccgagccaaggcagagcaataaggcagcgagacatgcgattagtgacgaagatgctgtaaaggtatttaaccaccatatctttactgagcatcgaggccttgtgaccaacaaaattcaacatccacatcacttctggcttcctttactctgcctctttacaggcattcgcccgaacgaggcgtgtttactgtatgtcgatgacattgagctggtgggtaaggtgtggtgtatccgcattgataagcgttttgatgagcaaaggttaaaaacgcccaacgccttacgctatatccctctgcataagtgtctactagaaattggtttcgtgagatatgtacatgatttacgttctatggttggtggaaactgccgactattcccggagatcaaggcgattaaaggctaccactcacataaacccggagagtggtttaaccgtaacattcgcggcaagcagggcctagatccgagctcaactctttatactttcagacacgcttttcgcgacaagttagtgatgttgaacgcaacggatgaataccttaaccgcttgatggggcatcaaggtagcccctatggtagctctcttctcagtgatgtctcattaatgctagaagtgaatcgccacggataa

SEQ ID NO: 99478 - DNA, 786 bp, Enterobacter aerogenes
atgtttcggatagaatcgtcagcagtggaaagtccacaagttgtggttgaatatcataagtctaatgcggaatttacttctggggaaggcatcctgtatacagagtttatgggggaaattgccacaagacagataagtgttttggatagcttatattacccatcagcttctttgattgatgaaaatgataaaataggtttccttctttatgatggaaaaaaaagtgaattagaactatctgattcacagattatatcaaaagacgaatttgatgctgtgtggttaatagctatgaatggtcacaaagaaaaagaaatcattcaatatgtaactggagatgctgctgtcccattaagttctgccactatcattgctcatatagttaataacaaagggaaatgggggaaaggattcgttttatcattatcaaaaaaatacccggcagccaagaaggtttatttggataaatattctaacacatcagatttaactttgggtgatatacagttcatatctgtagatgaaaaggatagaatatttgtggctaatatggtttctcaagatgggataagaaaaaaccatgctgataaaaaacaatatttatcatatcacgcacttgaggaatgtcttgaaaaactatcggagtttgcattgattaatcgattggttgtacaaatgccaaaaattggagctggattaggtggcggagattgggagcatattgagagtttaatacaaaaacatttatgttataaattaattaaatgtactgttgtgatattgtga

SEQ ID NO: 99479 - DNA, 486 bp, Enterobacter aerogenes
atgcgcgagtacgtgtactatccgggaagttttcagccgctggcgctgctgacgcaggaagcgggcaggaaggagagctggcactatcattgtgacccgaacggcgcgccggtccgcctgacgtcattacagggcgagatagtgtggtcagagaagacgggcgtatggggagagaaaggggaggtctacgccgatcgtatcagcaacccgctgcgttttcagggccagtattttgacgctgaaacggggctgcactataatcgacatcgttactataatcctgaaattgcgggatttattagccaggatccgattggattagccggcgggctgaatgtttaccagtatgcgccgaacccgctgggatgggtggatccgtggggcttgagtggggtactgttgaatatcatcataagcagaagccaaataaagttaccgacattcgagaattcaaaccccagattagagccttcaatagaattttaa

SEQ ID NO: 99480 - DNA, 618 bp, Enterobacter aerogenes
gtgtggtcagagaagacgggcgtatggggagagaaaggggcggtctacgccgatcgtatcagcaacccgctgcgttttcagggccagtattttgacgctgaaacggggctgcactataatcgacatcgttactatgatcctgaaattgcgggatttattagccaggatccgattggattagccggcgggctgaatgtttaccagtatgcgccgaacccgctgggatgggtggatccgtgggggctaacgtgtataccaaataaagttaatggagatgcccgagaagcaaaactcttaacacgattgcaaaatatcttcggtgttgaaaatgttattagtcagcggcatttacgtaatgctcagggaaaaattgttggtcttgttgatgatgaaatcaaactaggtaaaacaaaaggttctcgcatccttgattttgtcgttaagactaaggatggctggaaaggaatagaggtaactagcaaaacagcttctaaaatcgcccaatcttcaaaagaggaaattattcggagtgctggaggtggttttgtccgtcatccagttacaaaaaaattgatagaactttctgacgatatatctagaataatacgtcttgattaa

SEQ ID NO: 99481 - DNA, 612 bp, Enterobacter aerogenes
atgattatattgaaaaatttagaagataagtttaataagattagttccgatagtgaaaactatattatgtcatatagtgatagtgttagactcagcgaaactaaagtagtagttagtaaaggtgcattatataatattcgaccctacgaaatcgaacgagctggatttaagataggtaagaaacttaataaattacctgcaaatgtaaaaaatacacacatctatcactttgatagtctggaacgtatatcgttaatagaaatatttggacagacatcaaatataattaacaaagagttttgtatctatgaaggtgataacttaggaaggatttattttaccagtgccggtatgctgcgaaacatctctttgtcagtatacaatgatggattgattgaaaaagatttcaattgggggatgtatgggtgcagtgtatctgattatgtttatgaagactcaattcttaagaaaatatatgttcagcaaaaagaacatgcagaatcatcttttacagaatttgaagttgtattttcgtataaaaatgcgatcatcgataccattaaaaatgtatttcctaatggttatgaagaacaacgttatcctgcacgttga

SEQ ID NO: 99482 - DNA, 570 bp, Enterobacter aerogenes
atgactattgatagctcattacaaaatttcattgagacatttcagaagagcaaaagaagtatgggtgtaatgtcctactctgaagaaaatttaggctgctcgaaccatgatattcctttacatggggatatgttgtatttttatgaacatactatccttgaagataaacccacctttggtggcgattttttcattcagataattgaaatgtatgacttaggcaatatacagtcaggctggcttataccaaatggaacaaatgattgggataagaactatgtaatctttgcagaacgtaatggcgacgttctgttttgtgatgtattagacgataattcagccgtatatggaagtgtgcaaaaaaaagtatataaattaactaacacactaggggactttttggatacatattccgctctgattgaattagaagagagcgaatttgaatgtgataccacggatgatgattttaattataaaaatgaatatttgcttagggtgaaggaagttctaagtaataatcttccaactgaattggtagataattatatgtattttttctttggctag

SEQ ID NO: 99483 - DNA, 1002 bp, Enterobacter aerogenes
atggcattagctcattgtgtttgccccaggtttatttcaagccatatatccgaccctgttattttcagtaatatattcatgggtgttctgttaaactcagatgatcaaataatattcgatacagaaggtagacttcctctggaatacgcaaagtctgtagaaaaaaatacagatgcatttaccttattgaaggtctggcaaacacagattgataagcgaaaagatggtaaagtactacttactaattgtgaaccctcagggaatggggatgttcacgaattagtttttaatttaatccaaaaagcagcaactacctttgacagggatatagttacttctaataatgaggcatatcgcccatatattgaagaattgagaaagcaaagaatatcaatttttaatcttcagaacctatcccctggaaacataaaaaatacactaagaaaaaaaccatcatttgatgaattatcaaacgatgtagcttgggcattgcatagattagccagaacaagcaataaaggtttgagtgaagatgatattaatgaccaactacgtaatatgctattatgtatgaaatatcaagtaaaagatcagaccagagaaggtcgatcggcatctggtaaaggtgccggcgagttagatcttattattgaagatgatggggaactattttctataattgaagcgatgaaacttaacagtgtaaaagctgaatatataaatgaacattataagaagttacttacaaattataatccgttacagataactaaaaccattcttttgacttactatactggctcaagatttgatgattggtgggaaggttatacaacacatatctcaaatttagatgtgaactttttcaagttcgatggagaagcacaaatcacatcaactaacattgagaacactcgatttccatctttgaaaaaattggttcaacactttgaaataaatgatcgccatcatgcttgtattcaatatgcattaaaactttag

SEQ ID NO: 99484 - DNA, 360 bp, Enterobacter aerogenes
atgttgataagaatattgtcagtactcttaacgacgatcccattaactgcaattgcgactacgattcccgatgggaaaccagaaaagccctttgtaattggtaatgaagttatttgtctgaaagaaatccagaagcagatcaccccttatctcaggtcatttgagaaagaaagcggggttaggtacaagtacagtgttaaatctggtttatcatacaaggatactatagggctacggttacagatcaaccgtgtggattcgggattagacgtgcgtgttgctgatattgattactactggctacaggagtggggcagtatgtgccagccagcgtatatggtacttgatcgtaaagaataa

SEQ ID NO: 99485 - DNA, 564 bp, Enterobacter aerogenes
atggccgggcttgtcgttttcatcatttgtgtgatccttgcagtacttactttcaggaaagtgtcacaccatttcagaaataaaggtcggggaaagtttcgtacttcgattgcagcgttagtcatgagctttattgtttttgttgtctcaataggaattggttccggtgtcgtttcacaagatataagcactgatattaatgctaaggcttcaacgactagcagtacggaaacgaaaaaagccgatgtttataaatgcgataagtttgattcgataacccaaactcgacaaggaacaaaaaataattctggttactattcagataaaagtattttagttgaatatactatctcagatgataagttgatcagtcgaatgccaattcctggtgataaagacagtactgatactgctaaattcaatgaaaccgcagaagatggatcacgaaagtatgggaattcatcaagtaactattttgtatcggtgcttaatgatagtaccataaaagtaattctcgttgattttaaccataatggaacaattacacagatttgctcgaaatag

SEQ ID NO: 99486 - DNA, 510 bp, Enterobacter aerogenes
atgacaaaaaagaaagaaccgcatgaactaaaaccacgtgggcggaaagaaaaggtacatcagaataacgaccttcgtagtcacctagcaggggttaaaaatctaaatcagctaaccagtgctgcacaaaacgttatcaagaaacatattaggactttgactgaatcaaaaggttctaaaaaaggcatggtgacaaagaatatacttatactattaaccatgatgggtgatattagcaaagacaaaactaaatcaatgctagatagtagtgaactattcgaaggtaataattattctaaatcgagggtgaacgattataagaaagtattaacaggtgtatcaaaagagctatgggggatgtttaaagatggtacaccgattcgcaccgatgacccaaaaggcggagaatatcttactggtgaagaattgtacaagttgactcgcttattagagagtaatccaacgaagaaagaactttcggatctcattaaaaaaatatatccatcctaa

SEQ ID NO: 99487 - DNA, 159 bp, Enterobacter aerogenes
atgggtgcaaattcatgtattctgggtgatgatattaccattggtaataacgttaaactgggggcaggtgttattttaatgaaagatgcaccagacaatagtatcattattggccataaaccgataattaaaaatgcaaatggtgatattatattatga

SEQ ID NO: 99488 - DNA, 330 bp, Enterobacter aerogenes
atgggattcccgtcacccgcaaaagactatgtagagcaaacacttacaataaacagactttgccagattgatgctaattgccgcgtactggagacgagttcgggttatgccgttatcgatgtttcccggcgaccaaagcagggcgatcacgtgctcgtttctttctgcgggatgattcagtttggcatcgttcgcggtcgcgcgctaattacttccgatggtgaagcgatcgaaggtgacgccctggacgatgtggaggtgaagggcgttctgacgttcctgattaaccgcgcaactttcgttgatgaagacccgaaccccgttatttaa

SEQ ID NO: 99489 - DNA, 177 bp, Enterobacter aerogenes; identical to SEQ ID NO: 99368

SEQ ID NO: 99490 - DNA, 615 bp, Enterobacter aerogenes
atggctgagtttgatgcatttcatctcgcgaggatccagttcgccttcactatctcctttcatattatttttccggcattaaccattggtcttgccagctatctggtggtactggaaggcatgtggttaaaaacacggcgcctgctctggcgccagctttatcatttctggctaaatatttttgcgattaattttggtatgggtgtggtatccggcctggtcatggcctaccaatttggcactaactggagcggtttttcccagtttgcaggcagtattaccgggcctttactgacatatgaagttttaaccgcttttttcctcgaagctggatttcttggcgtgatgctatttggctggaaccgggtcgggccgggattacatttcttttccacctgtatggtggccataggaaccctggcctcaacgttttggatcctggcttccaatagctggatgcagacgcctcagggctttcatattgagcaagggcaggtgataccagatagttggttggcgataatcttcaatccctcatttccctggcgcttactacatatgtctatcgccgcctttctaagtaccgcgctgttcgttggcgcttcggcggcctag

SEQ ID NO: 99491 - DNA, 312 bp, Enterobacter aerogenes
gtggacagcgacgcgcgcctcgatgcctggcagggcgggctggtgctgagccacaccaacgacagcggggtgaacaaggttatcctgcgctactccgacaactcggataacagcgtctacaacaaaaccgacgacctgaccacggtctacgccagcttcgagggcagccataaattcacccagcaggcgcagatcgagtatctgctggccttccacgactacgacaacggcaaggataataccgataaccgtaaaaactacggcgcgatcgtccggccaatgtacttctggaacgacgtgcactcgacctag

SEQ ID NO: 99492 - DNA, 225 bp, Enterobacter aerogenes
atgaagaatttgccggatatagcggcgggaacgtcgtatataacatccaccgtgagcggcagctactggttgctgcaacttctcgataaggtcagtcccagtcaatgggcggcaatcggcgtactggccagtattgtttttgggttacttacctacctcaccaatctgtatttcaaaatcaaagacgaccggcggaaggcgcgagaatatgagcaacaaagctaa

SEQ ID NO: 99493 - DNA, 234 bp, Enterobacter aerogenes
atggctatattgaaaaccgtagattttaaaggcattacggtagagaacgcagtatttactgtagatacgataactatccagggcgggcaactcgatttttttgtttcgatgcgtgccaaagaagatgcaccaatgctggatggcgaaaattatggatgttcgtatgacccaagcgcgggaactcctgaggaacaggcctattcctatctgaagtctcttgaaaagttttcctga

SEQ ID NO: 99494 - DNA, 522 bp, Enterobacter aerogenes
atgaaaaaactaatacctttattgctaatttttccctttattgcctttgcctccccagatttagttgaggattcaggatatatcgtcccaatatcaggcccaggaataccggttactaatccatataccgactataaggtcattaatagtatcgacaatggtaaaaaaattgaaatccatgtagctgtattacatttacgaacctataaagaaaacgcagattttagtgaatccaatactcactatgtggaaggaagcaaaaccttatctagttacgatactaatgtttacacagccgattttataaaattctcctcagaagctgctctaaactcaacaaaagaagacttaaaaaaattatattgtacgcctgacggtttttacccggtttcatctcaagagcggatattctacgaaacccgaaaagaaaataaaaaaataatgctcaattactacagtgattcaggaaaaaccctcatgtttggatttggggtttctccagaatcatgtaaatcgaaatag

SEQ ID NO: 99495 - DNA, 585 bp, Enterobacter aerogenes
atgagaagaccatcattctggcgcgccttcgcgctactcgccgccttattgctggccggctgcagccgttcgcagccggagccgcaaggccgcccgcaggcgtggctggaaccgggtacgcgcgtcacgttgccgccgcctggtatctcgccggacatcagctcgcagcagttgctcaccggcagcttcaacggccaaacccagtcgctgctggtcatgctcaatgccgatgataaaaagctcacgctggcgggtctgtcatctgtcggtatccgcctgttcctggtgacctatgatgaaagagggctgcgcgctgaacagtcgatggtggttccgcaactgccgccagccagccaggtgctggccgatgtgatgctcagccactggtcggttagcgcatggctgccgcagttgccaaaagggtggacgttgaccgagcgcggcgacaaacgcgaactacgtaacgcgcgcgggaagctggtcaccgaaatcacctatatcaaccgcaaaggtcagcgcgtgccgatcagcatcgaacagcacgtctttaaataccacatcaccattcaatacctgggtgactga

SEQ ID NO: 99496 - DNA, 156 bp, Enterobacter aerogenes
atgccgcttaccaaaacaataccaaaactgctaatggcctgcgtggcgctaaataccagcatgccgagcgtcaataaggtggtcatcatcgccagggtgaccgccagcagcgatgtcagcggcgtaccgcgcgggttgctgaaaaacagcgtgtag

SEQ ID NO: 99497 - DNA, 1692 bp, Enterobacter aerogenes
atgccgctagctttctctccctgcgtgctgatcccctgctataaccacggcgccatgatgccgcgggtgctggcgcgcctgcggccctttggcctgccttgcatcgtggtggacgacggcagcgatagcagtacgcggcagcagttggagcggctggcggcggaaaccgccaatctgaccttaatccgcttaccacagaacgcgggcaaaggcgcagcggtgatccgtgggctacaggccgcagcgcaagccgggttcagccacgcggtgcaggtcgatgccgatggtcagcacgccatcgaagatattccgcaactgttggcgctggcgcaggcccatcccgaagcgctgatttccgggcaaccgatttacgacgactccatcccgcgttcccgcctctacgggcgctggataacccacgtctgggtatggattgaaacgctgtcgctgcagttgaaagacagcatgtgcggttttcgcgtctacccggtgacgccaacgctacagctggcgcagcgcgtgtcactcggccagcgaatggattttgataccgaagtgatggtgcgcctctactggcagggaaataccagctattttgtgccaacccgcgtgacctacccgccggacggtttgtcgcattttgatgccatcaaagataactgccgcatctcgctgatgcacacgcgtctgttcctcggcatgctgccgcggatcccctcgctgttgtttcgccgcgcctcgccgcactgggcgcgtcagcaggaggtaaaaggattatggggaatgcgcctgatgctactggtgtggcggctgctggggcgcaaggcgttctcgctgctgctttatccggtggtcggcgtgtactggctgacggccgcgacggcccgccgtgcttcgcaacaatggataacccgcgtgcgcgaacagttcgccgctcgccagatgccgataccgccaacgctaaccagctatcggcacttccagcgcttcggcgaagcgatgctggataaaatcgccagctggcgcggcgaattgcagttcggccgcgacgtggtttttaccgcaggcgccgaggagacgctaaatatcagcgatccgcgggggaagctgctgttggtttcgcatctcggcgatgtcgaagcctgccgcgcgctggcgcaactacagggcggcaaaaccatcaacgctctggtattcagcgaaaatgcgcaacgttttaaacagattatgacggaaatggcccctcaggccgggctcaacctgatgccggtgaacgatatcggcccggataccgccatcctgttgcaagaaaagctggagcgcggcgagtggatcgcgattgtcggcgaccgtattgcggttaacccgcagcgcggcggagaatggcgtgtctgctggagccgttttatggggcaagccgcccccttcccgcaggggccatttatcctcgccgccattttgcgctgcccggttaatttgcttttcgctctccgccagcagggcaaactgcgcatttactgcgagccgttcgccgaccctctgctattaccgcgcaccgatcgccaacaggcattgcaacacatcatcgaccgctacgccgaacggctggaacactacgcgctgcagtcgccgctcgactggtttaactttttcgatttctggcgtctgccggatcccaaagacaaggagtaa

SEQ ID NO: 99498 - DNA, 582 bp, Enterobacter aerogenes
gtgtcgggcatccgctcgctgccggtcgtttcaattatgacggggttattactgctgacctggccatttttgatctggtttggcctcgcgcataacagcctgccatggctgttgccgctaatggcgctactgctgtttttacgctttcgccagacccggcgacagtcagggccgttgagcgtggtcactcagatcgttgcggtagccggcatgacgctgtgcattgccagctacctgctaaagacccatcagctactgctattttacccggtggtggtgagcggcgtgatgctggcggtgtttggcggttcgctgtggtcaagtatgcctgtagtcgagcgcctggcgcggttgcgggacccggttctttctgagcaagccgtgcgctacacccgccgggtcacccaaatctggtgcgcctttttcatcggcaacggcggtatagcgctggttaccgcgttatatggcgatatgtcgctatggacggcgtggaacggcatgatttcctatctgctgatgggcatgttgatggccggagagtggctggtgcgccagcgggtgattaaacgagataaaccatga

SEQ ID NO: 99499 - DNA, 252 bp, Enterobacter aerogenes
atgaccgaacaaaaagctatttacgaagaagtctccgcgctgctggtgaaggtgtttgaaatcgatccgcaggatattaaacctgaggcccgcctgtacgaagacctcgaactggacagcatcgacgccatcgacatgatcgtccatctacaaaagaaaatcggcaagaaaatcaagccagaagactttaaaaccgtacgcaccgtgcaggacgtagtcgatgcggcggatcgcctgctgaaagaagcgtaa

SEQ ID NO: 99500 - DNA, 258 bp, Enterobacter aerogenes; identical to SEQ ID NO: 87713

SEQ ID NO: 99501 - DNA, 816 bp, Enterobacter aerogenes
atgacgccgcttttccaacggttaaatcgcctgtggcgcgcagcgatgaccggattctgtttcgcactgtttggcgtcggtgggctgctgctgtcactgatctggttcaatctgctgctgatcgtggtgcgcgataactcccgccgtcgtcgtctcgcgcggcgcagcatttccgccagcttccgtgtttttcttaatgtcgtgaaagccgtcggcgtactggactaccagattaaagggcgcgagattttacgtcaggagcgcggttgcctggtggtcgctaatcatcccagcctcatcgactacgtgatgctggcctcggtgatgccggaaaccgactgcctggtgaaaagtgcgttgctgaaaaacccatttgtcagcggcgtgatccgcgcggcggattatttgattaacgatcgcgccgataccctgcttccggccagtcggcaacgcttacagcagggcgatactattttgattttcccggaaggaacccgaacggtgccgggagaaaaaatgcagctgcagcgcggcgcggccaatatcgccgtgcgctgcggcagcgatttacgcgttgtcgttatccgctgtaccgagcatatgctgggcaaacagagcaaatggtacgacccgccgcgaacgaaaccgttatttaccgttgaagtcggagaacggctacgaatagaccaattttacaatgccaacacacaagaaccggcgctggccgcacggcagttaaaccggcatattttgcttaaattagaatcaggcgttgcgcctgaaacaggaattaatgatggaagcgctctatcttga

SEQ ID NO: 99502 - DNA, 723 bp, Enterobacter aerogenes
atgaattttaccctgaacataatcgactggcaggcgagagcgcctgggctttgcgaagccgaacagtggcagcaatggtcacggtattcgcacaccatcgatccggcggccccggcggccaaactcaacgaactgccaatgatgaccgctcgccgacttagctccggcagcaagctggcggttgagtgcgggctggcgatgctgcgccgccatgagatcgacgccgttctctataccagccgtcacggcgagctagagcgcaactatcggatcctccacgccctggcgatggagcaagcggtatcgcctaccgatttcgccctatcggtacataattccgccgtcggtaatctgacgattgcggccaaaaagcccattgcgtcgtcatcgctttctgccgggcgcgacactttccagcagggattatatgaagtcatggggcttctgcaggcaggttatcaacgcgtgttgatggttgattttgatggttttctgccggagttttaccattcgcagctgccgacggctatgccgacctggccctatgcgacggcctgggttattgagtccggcggcgaatggcagtgccaggccgagcgccatgatgccgttcctgaaagccccctaccgcaaagcctgctgtttttacggcactatctgcagaattcccgtacgttcaccctgcccggcgagcgcgtgcagtggcgctggagccgcgcatga

SEQ ID NO: 99503 - DNA, 1221 bp, Enterobacter aerogenes
atgcccgaacccgtcgccgaaccggcgctcaatggactgcgccttaatctgcggattgtctccgtcgttattttcaactttgccagctatctcactatcgggctgccgttggcggttctgccgggctacgttcacgatgtgatgggttttagcgccttctgggccgggctggtgattagtctccagtatttcgccacgctgctgagccgaccgcacgccgggcgctacgccgatctgctcgggccgaaaaagattgtcgttttcggcctgtgcggctgtttcctgagtggtttgagctacctgctggcagcctggagcagcagctggccactgctgagtctgctgctgttatgccttggacgagcgatcctcggcattggccagagctttgccggcacggggtcgacgctatggggcgtaggcgttgtcggctcgctgcatatcgggcgggtgatttcgtggaacggcattgtgacctacggcgcgatggcgatgggcgcgccgctgggcgtgctgtgctattcatacattggcctcagcggcctggcgatggtcattatggcggttgctctggtggctatcatttgcgcgctaccgcgaacggcggtgaaggcaacgaaagggaaagcgatgtcatttcgcgcggtgctgggccgggtttggccttacggcatggcgctggcgttggcttctgccggctttggggttatcgcgacctttattaccctgttttatgacgcgaaaggctgggacggcgcggcctttgcgttaacgctgttcagctgcgcgtttgtcggcacgcggctgctttttcccaacggtattaaccgcctcggcggcctgaacgtggcgatgctctgttttagcgtggaggttattggcctgctgctggtgggctttgcacaaacgccgctgatggcgaaagtcgggactttcctcaccggcgcggggttctcgctggtcttcccggcgctgggcgtggtggcggtaaaagccgtgccgcagcacaatcagggctcggcgctggcgacctataccgtatttatggatttgtcgttggggataaccgggccgctggccgggcttttgatggcgtggaccgggataccggcgatttatctggcggcggcagggttggtgatggccgcgctactgttgggctggcggttaaaaaaacggcccccggtggctgaaccggaggccgctgcatcagggcaataa

SEQ ID NO: 99504 - DNA, 558 bp, Enterobacter aerogenes
atgcgcaatttggttaaatatgtcggtattggcctgctggttatggggcttgcggcctgtgataacagcgattcaaaagcgccgaccgtcggggcggcagcagagagcaataccagcggccaggcgattagcctgctggatggtaaactgagcttcactctgcccgcgggcatggccgaccagagcggtaagctcggtacccaggccaacaatatgcatgtctattctgacgccaccggccagaaagcggtgattgtgattgtcggcgacaacactaatgaagatctggcggtgctgtccaaacgtctggaagatcagcagcgcagccgcgacccgcagctgcaggttgtgtctaacaaatcgattgagattaaaggccacaccttacagcaactggacagcattatctccgccaaaggtcagaccgcgtggtcttccgtgctgctcggtaagatcgatgacaagctgctgaccctgcaggtcactctgccagcggacaaccagcagcaggcgcagaccgaagcggaaagcatcgtcaacacgctggtcattaactaa

SEQ ID NO: 99505 - DNA, 666 bp, Enterobacter aerogenes
atgaatccctttactaccgtacagcgtaagaaagcgctcgtctggctttcgctatttcatctgctggtgatcacctccagcaactatctggtccagttgccgatctccatttttggtttccataccacctggggggcgttcagttttccctttatttttctcgccaccgatctgacggtgcgcattttcggcgccccgctggcgcgacgcatcatcttcgcagtgatggtcccggcgctgattatttcctatggcatttcggcgctgttttatatgggcgagtggcagggctttgccgcgctgggcacctttaatctgttcgtcgcccgtatcgccgccgccagctttatggcttatgcgctggggcaaattctcgacgtccacgttttcaaccgcttgcgtcagaatcgtcgctggtggctggcgccgacggcgtcgaccctgttcggtaacgtcagcgataccctggccttcttcttcatcgccttctggcgcagtccggatccgtttatggccgcccactggggagaaatcgccacggtcgactactgcttcaaagtgcttatcagcattgtcttcttcttgccgatgtacggcgtgctgttgaatatgctgttgaaaaaactggcggataaatctgatttgtcggcattgcagccaggttaa

SEQ ID NO: 99506 - DNA, 804 bp, Enterobacter aerogenes; identical to SEQ ID NO: 99286

SEQ ID NO: 99507 - DNA, 600 bp, Enterobacter aerogenes
atggcgactaccgacacacagcaaacggcacagttcgcggcagaggcatccgtgagtgccgcagaggcaaaacagtacctgatcgaggtccagcagggctatcaggatattagcgccaccactcaggaagcgattaatgcggcgacagcggcagaagcagcgaagactgcggcggaaacatctgagcaaagttcctcagcttctgcagttgcctcatccgaatcggcaacggcagctgcaggttctgctgcacaggctgaagagtatgcaaataacgcttctgactacgcacagaataagttcacgttctataaaacctcaagtgaccaggatggaactatagcgggactggcggctacaaccaatgggcagtcgtttcgcgtagctcagggtgtggatggtatggatgctttcattacctaccagaacgacaatggcgtagcggtggcacaagcggcccagccaggaacagcggccgtaacaagtacagtgcgcgaatattcgacatcattgcttgctcagaatgacgtcgaggcgggtaatatccttgatggagctaaatgttggattaccagttcaattgatagcacacattgctaa

SEQ ID NO: 99508 - DNA, 195 bp, Enterobacter aerogenes
atgaattcattaacaatgcaggcattctggaaccgactggtagaaaaatgccgtcgcaggaagctgtacaggtcaatgatgattttcgtgtcgatgttactctggggagtgagtcccaatgggtggatgaaggaagcgacattcaggcaacgacacttacagctgacgcatcagggagaaagttactttatttag

SEQ ID NO: 99509 - DNA, 285 bp, Enterobacter aerogenes
atggttccgttttgcatcatggcgattgtgaatggcgggatttaccctatcgtcgtcgcccaggcgctgaaaccttttccacaggcaaccgggcgcgccgccgccctgcagaatacgctgcagcttggcctctgtttcctggcaagcctgctggtctcaagccttatcgccactccgcttctgaccaccaccagcgtgatgctgatttccatcgtcctggcaggcatcggtttctggatgcagcaacgacgcgtgcagttagtgaacgaatcgtctcacgcttga

SEQ ID NO: 99510 - DNA, 1359 bp, Enterobacter aerogenes
atgcgcattgataaagtaatcagctataaaaactcttggaatatagtaaagaataaatttagcactgagttatcagaaatagaactcggattgacagatttgtttcccgacaacgttgcctcattagttcttccagaaagaaatccacccagggaggtttgggatcagatcatgaatgacaaaggatgggaaataaaaaacagaatccattattcacctgaaggaatccgtataaatataagtcgacttgggccgattaaaaatggactaagtgttaccagcccttttggatcttttaataatataagcggatggctctttcaacaaagcacacttgccgtcagacatggccttattgaagttcctgttatgttagtgcctgttcgtgactttgcaaaaaattcagacagcatgtggattcggcgagacaattttgagatgaatttagcacagcttgaagtattggctccgctgagtcatcatcatcctttcctaattattggctatagtaatacttcttctaagcatgagcctgaaattattgagctatcatctgattcaaatattaaagatgataaatcagtaattgatcgaagcattgaatttcctccggaatatcatcaggctggcttagatattattaactattttggtacgtatttaagagagcaatatccagaagaaaatgctctggtaaaaatagaacaaaaaggtctttatgttcgactgataatagaaacaactgatgggaagtctgaagtaattgagagagctttacatgaatatgagttaataatcactgggaatgaacctcctgaaaaattcaccaagaatgataaacttgtttttgaattaaaaaatgaacttcgcattgccaagttcagaattgaatcacaacaagatctcattggcattcaaaataatagaattgagcaactctttaatatcatcagcaatggtctaacgcaaaaaaactccgtaatggtggatttcaaaccaacaataacactcaccagtagtatacaggtcaaccaatttgtggcatctgcagtaagtggtattaatgagttaatagagagaatacctgaatctgatgaagcacattttgctttgaaagatcttgagggttcattgatatcaattgaaactaataatgatcaagagtcagtaagaagatcacctgccatgagcaaattcaagaggattattgataatatcgctgacactggtagcaatctcaacctagcaataaaaaaagctgaaaagggatgggaaatattttctgatttagctaatagatataataaattagcagagtggtgtggattacctgtagttccttctgcgctgttaaaataa

SEQ ID NO: 99511 - DNA, 1473 bp, Enterobacter aerogenes
atggatattgaaaaagaaatgcagcaacaaatgcgtccttttttacctatcaaaagagtatttaataatgattttatctctttagtcacagacctaattttcctgataagaagttatggaatagataaagtcggtttttctaatattaaaaaagattataaattatttatttctgcagtacatgacggttggaaaaaagcacaaataaaaatcactcacactgtcatcaataaactcagtgaaattgaaagtctggaaataaagaaaaaagaattccatcgagaaaaaaacaaagatgccaaacaagaatgcattaacaaaatcaacattataaaatcagaaattctaattctaagacgttttattgactctatcgtttggactattctcgaagatgaacactcaacgattaggcgattacctttagatgataatcttgacaacctttcaatcaagaatttaaaagaagcaatacaaatacttgaggagataaactccaatccatttacaattggtatctcatctgatctaacaacattcatacatacaggagatttattagtaaaaaactatcttgagggcactctttctattgtcgagttgaaaacaggcaaaaaaaaccttgagttttgcgatgctgctaatttttctttagattcagaatgtcctatttttgatgaacaatatacaaaagagttatcgcccgtagatttaaaacactatcaaagaacgaaaaaacaactacaacatatgaaagatgtcacaaacacaataaatacaggagaaggatatgatcactttcataaacaaacagtaaaaatccaagataagaactatataccaaattacttctcagaaaaaataatggattcttggagacgcatatctcttggaaaactttgggatatacatgtaatagacgaatgtttattcattggaacttacaaaaacgttgaaatgggatttgtagggttcaatagctggatgaaagtctcaaatttcaatggcactgtatttaacatcaatgatagctttaaattaaaattaaccaagccattgttaaacttgaaccttcccaatgagactatcatagatattcttcttggcgaatttattgttgttttatgtttagacactgaaaaattttacaatgaagcaaataagatacacccggggattttgaagaaaaaaaaggtaactaacagtaaactaaacccgatggatttggttactgtcaatgaagaggccatttacagtgaaaataacggacaagaaatttatttaggaactggttttcttagcagaattattttcgattttcagcgtccgaaaaatatcataaattggatttataaagatagtgatgtaaaaagacgtgacaataaagaaaaaaacaagaaaaagaaaattactcaaaacgccaaaaaaagcaagtcaaagaaagctaagcttagtaggaggaaacaaaattaa

SEQ ID NO: 99512 - DNA, 1014 bp, Enterobacter aerogenes
atggcagtcagcaaattaactaatggaaagtggcaggcacaggtttttcccaacggtagggatgggcggcgtattcgccgccaattcgcgaccaaaggggaggcaatggcttttgagcgtcacataaaagaacaaactcaggacaagccttggttaggggaaaaaacagataagcgtcgagttaccgaactcgtagatacttggttcaatgcacacggcgttacactctctgatggcctcaagcgtaagggcgcaatggaaattgcctgctttgctatgggaaatcctcttgcaactgaattcaacgccaagctttttgcaacctaccgcgagcaacgtttaagcgggaaaattacacgttcggatcgtgtaaaaacggtggctccccgcactgttaatcttgagctggcgtatttccgtgctatgttcaacgaactaaaaaggctggatcattggagtttgccaaacccactcgaaaacgttagggaatttaaaattgatgaggctgagcttacatggcttacagttgaagaaattaagcaattgctagctgagtgtgagaaaagcaaagcgacagatttagttactattgtcaaaatatgccttgcaaccggcgcaaggtggggagaagcggaatcactgacaggcaagcaaatcagccccggaaaaatcacttatattaaaaccaagggcaagaaaaatcgtgccgttccgataagtgatgaactttatgaaactctccccaaaatacgtaattcaaaaccaatatttacgaagtgttattctgcgtttcgcggtgcaattaagcgagctgggattgaactgcctgacgggcagttatcacacgttctaaggcatacctttgcaagccactttatgatgcgcggaggtaatattcttgtactacaacgaatacttggacatacagatatcaaggtgacaatgcgatacgcccattttgctccagatcatttaactgaagcaatatctttgaaccccttaaatggtatatag

SEQ ID NO: 99513 - DNA, 900 bp, Enterobacter aerogenes
atgactcaatttagcgctttcaactacacacaaaatagagataaagccattgctaacttaatcaacctgattgagggaatgacctgtgatggaaagttaagcgaaaaagaaatgatattccttgatacatggctcatggaatcagacgttctttctcaaaactatttcgtaaattgcattagagaaaagatcagtgaaattctttctgatggtgtggttgaaaaggctgaactggatgagctgaaagacctgctccatgaaatgcagcgcggattgatggacactcctaacatagacctttactccgcagattctgacaagcacttgttagaaggtctctgtaaggggcttgcttccgactatcatttaagcgatgaagaaatccgctatttaaattggttcttatcgacaaatgcagctttaaaaagcaactatcccggaaagcatctctacgaactcgtgcaatccatccttagtgatggagtgataaccgaagaagaacgcaccacattattacaagaaataaccgccttcacaggctctaatatttcagaaggtattgtggatggatattcaacaacatcacctattgacctaattgatgcgttcacccctacaaatagtaaagtttgccttactggtaagtttctgtgcggctcccgtagacaatgtgaaagtgaccttataaagcttggttgccaaattgttgatcgcgttactcaagacttggactatctaatcattggagcgcttagctctaaggattggaaatttcaaagttttggaagaaagatagaacaggcaattgattatcgagataacaaaggcgttcctcttaaaattctcagcgaagaacactggcaaaccctaatgcgtgatgctaattctaaaactcaatag

SEQ ID NO: 99514 - DNA, 615 bp, Enterobacter aerogenes
atgccaaacacaaaagagaccccaaaagcgatctcaaaatacaatttccaatcacaaagtggtggaaaagaggcgataacccgcatccttaaagcctatggattcagtaccagacaggcactgtgcgatcacctcggggtatctcagagcacaatggcaaaccgctggatgcgtgatacttttcctcatgactggctaattgcatgccatcttgatacgggtgcatctatgctttggcttaccaccgggcaaggctcccccatgacaaaagccgacattgatagcgaattgcctttgcaattaaaagaaatctcaaatgggattttctcctctactgagcaagttcgttacgattctcgcctcatccctcaagacgcatcgtcaccattcattgtgaagtttgaaaattcgttctatctagtggacgagttcaggggagaaatcaacgatggagtctggttgattgaaatcgatggctttatgagtatcagacaagtttatcgtcttcctggcggacgcttacgcgttgagaacggccccgcatcctttgaatgcacaccatcggatattgagaccaacggcagagtgattagcaaaataacgtttactgaataa

SEQ ID NO: 99515 - DNA, 510 bp, Enterobacter aerogenes
atgtttgattatcgcgtttccaaacatcctcactttgatgaagcctgccgcgctttcgcacagcgtcacaatatggcgaagctggcagaccgcgcaggcatgaatgtccagacactgcgcaacaaactgaacccggagcaaccgcatcaacttacggcgccggaaatttggatgcttacctatattacagaggattcaacactcgttgacggtttcctggctcaaatccattgcctgccatgtgtgccgctgaacgaagtagccagcgagaaaatgcctcattacgttttgaatgctacagcagagatcggtcgcgttgcagcaagcgctgtttctggcgaacaccagacagcaacggaacgccgccaggttatcgaaagcatcaattctgttactcgtttgatggcactaacagctgtttccctgcacgcgcgcctacagtacaacccggcaatggcaagtgctgttgatactgtgacgggcctcagcgcttcgtttggtctgatctga

SEQ ID NO: 99516 - DNA, 201 bp, Enterobacter aerogenes
atgctgaataaagaaccttcattcgcttcgctgctggtaaagcaaagcccggcaatgcactacagccatggctggattatcgggaaagatggcaagcgctggcacccgtcccgctctcaggaagaactactggcagggctgaccactaccaaacaggtgaaaccatggctattgaaggtacttctgcgactgttccactaa

SEQ ID NO: 99517 - DNA, 852 bp, Enterobacter aerogenes
atgagcactatcctgaaatgggcgggaaacaaaaccgcaatcatgtccgaactcaaaaagcacctcccagatggccctcgactggttgaacctttcgcaggttcctgcgctgtgatgatggcaacagactatcctcattatcttgtcgcggatattaaccctgatttaataaatctatatcgggagatagcaacaaacgcatcagattttattgagcgtgccaaacatctgtttaaaatattaaatagtgaagatggttattatgatagccgggattcattcaatcatgataaagaccctgaatggcgcgcgccgctgtttttattcttaaatcgccactgttaccgtggtctttgccgttataacaaaaagggtgagtttaacgccccttacggtaattataaaaaaccgtattttcctgaaaatgaaatacgctcttttactgaaaaagctacccgcgccacgttcatttgcgccagctatgacgaaactttggcattattagtgcctggggatgttatttattgcgatccgccttatgacggtactttcagtggctatcacactgccggttttactgagaacgatcagtatcatctggcctctattcttgagcgccgtgcatcagaagggcatccggtcatcgtttcgaacagcgacactttcctgactcgttccctgtatcgcaatttcactcataaccgcattaacgtaaaacgcagcattggtattgctgcaggcgaagggaaaaccgcagacgaactgattgctgtactcaaaccgaaagtatgggctggctttgatccagccggcggccctgattactcggtcgtgcatgaggtgcgcgcgtga

SEQ ID NO: 99518 - DNA, 207 bp, Enterobacter aerogenes
gtgagtcatcacgaagttgaaaagcacggcggtgcagaagattccgccgctgcttttgcctggaatgtacctaaaaaggcgattaacccctacatggacccggcggaagaatcgccggtttctgcgctttcaaacctgattactctctatgctgcggataacgagcaggagcagctgcgccgcgaggccctgagtaatgaggtctag

SEQ ID NO: 99519 - DNA, 228 bp, Enterobacter aerogenes
atgcgcaaagcatgtattgagcttatggcggggactaatgccgcatgcctggttgcaggcgaactaggcactggtcgctgcctttacctagttgtagtaatggaagacatattcggtaagcctacaaaagaacaatggcttaaatctttaaggctttgcgaggccaaggctgttgaactcaagtatgaagttgcccgcattcgcggcaggagcctggccggtttgtga

SEQ ID NO: 99520 - DNA, 1149 bp, Enterobacter aerogenes
atgaagaagctaactctgcggcagaggacgagggatgttaaacgctcaataatgtttcgtcgcgggcaaaccggaataaggacaaaaggtaaaagtttttactatgaagttgaatggagaaaggctaattattggatcgaggagcaatcgagccaaggattagatgtacaatttgtcagcaagaagaaaaaaggattaattcttacgttgccacctgttatggatttttcagataattatgctgtaactgtccagcatattaacgcaattaggatgttatctgagaggaaaggccttcctaatcctggctatcagttagcttccgttaatttttgtaacttgaagaaaatttcaacttctgccgctcttgttcttacagcagaattatctaaatgggatgacgcattaaggcaacgtttaacgccaaaaatagctggctgggataggaatatacttcgaaacttttatgaactaggtttttttgacttattcaagaaaagtaagaatttaaaattagattttggcaatgaatcatcgaccaataaagggaagcgatttgtaaaatatctcaaaggcaagtgtggagaggttgctaaaactaaagttttaaaaggtgaaataattgatttggttggcgagtcaatagaaaagtggacttttcttcacagcggtttgagtgaggctatcacaaatgtttcacatcacgcttatcctattgagtctggatataaagaatatgataaaaattggtatcttacgggatcatataatattggaagtaaagaacttaaaatagtattttacgatcaaggggtaggtattccgaaaactcttcctgcttccaaagtatgggaaaaagcgctaacagtgctagccaaaatttcatcgctggagcgttatcgagatgaggagcttctgaaagcagctgttgaacttgacagaacaagtacagaggaagatgaccgaggcaagggattgcaagatcttcttgagttcattaaccaacgtgaaaatggttacttatcaataatgagtcttaaaggtctttataaacactctatgaatcaaggtattgccaagattaaaactgaaagttttgcttcaccgatttgtggtacacttataatctggagtgtatctctcgattga

SEQ ID NO: 99521 - DNA, 405 bp, Enterobacter aerogenes
atgaaaaatttagaaatcaacattggaaaagagttttcttctactccctcagggcgtttttatactgatatgactgatagtagcggtgagcaatttagagaagaattattatggccaaaactacaacaactcgaaacaaatcaaaaaattaaaatcattttggatgatgatgttgaaggctatggttcttcttttttagttgaaggctttgcaggaattgttaaatatggatatatgaataaagaagctcttttagataagcttgagctttttcaagttgatccagattttttattattcaaaaagaaaattattcaatacattaatgaggcagtgtttaactccaagcaatatgagtcaactaagccagaatatttggaaaaattaaaaaaacgtaaggggtaa

SEQ ID NO: 99522 - DNA, 645 bp, Enterobacter aerogenes
atggacatgctttataattataatttcatgttaaacgctaatgaattatatattaaggcaagttacgaccctcaacagtatggttttttatatcaaaatagttctgcggataaaatagaatttatacatgttttaagtggtggcttatcatctgttgctcaagcaattaacaattcaggaaatggcacattaagtgatggcttaattcttgctttaactggcgctttaagtgcttttgcttttaatttaattcagaaattacttgacgctaagtctgttcgtttgactaagtccggtgatgcaatgttattgcttataaaagaatttgaagaaattgctgtgagatattgggttagagggcataattcctcagatgatgatgcggagagcaatacatgcgaccaaataaatatcaaggctatgcttatgactcttgacaaaaatgtgaatttgatgcttgagaatttaccattcaaaaataaggaggttaataaacagaaattaagtgcattctcttctgatgtatatgatttggcgtcaggtgacgattttgagtctgaaatgaggcctcccaataaagcaaaggcctttgcaatatcaaaaagatgcagtgaggcgaaggctatcattcttggattgatttag

SEQ ID NO: 99523 - DNA, 396 bp, Enterobacter aerogenes
atgtacatgaccgacgccgctcagaaccaggaggacgtgaacaacatccgccaggcaatgaaaagcgccaaagggccaggcaacttccgcaacttgtttatgtactcgcccaatggcaaaaaggacgggattcagatcatcccgctgtcagaggttgcggcaaaggatgagtttctgaatattaagaatgtgagtcgggacgatatgttggcggcgcaccgcgttccgccgcagatgatgggtatcatgccgagtaatgttgggggctttggggatgttgagaaggcaagcatagtatttgtaaaaaatgaattagaaccattacaaaagagaatgttagaattaaatacatggctcggcactaatgttatttcatttgaaaattacactctctaa

SEQ ID NO: 99524 - DNA, 219 bp, Enterobacter aerogenes
atgtttgactctatgtggggaacattaatattagccgttttaattttgtttggtttgttcttatattgttatcgttcaggctccaattatgataagtttaaggcaaatggcattcgtaccgaggctaaaatattaagcatggaaaaattggcgcgagtggctgagggagcactaaacttaaaatggaattatctttcaatactgactcaggtctggtga

SEQ ID NO: 99525 - DNA, 1362 bp, Enterobacter aerogenes
atgaaagtgtggccggcgtcattgcagtcgcgcttaatgataatgatttttctcgctctgctgctcgctaatgccctgacgctatcgcttctgctctacgagcgcatgagcagtgcccgtagcgtcatgctgggcaaccttgaatacgatgtcgccaccagcgtggctatccttgatcgtcttcctgcgcaagaacggccgcattggttggcgcgtctggcgcgcggtaactaccgctatcagctttcagccggacaaactggcgattatcccaccagctggcgtacccgcgatgcggtacgctcgttacaggaagccctgagcggtcgctatcctgtgagtattatcgccgtccctggaccgcgcgaacatattcaggcccacgtgaccctgcgcgacggcgcgccgctaagcattgacctgtggccaaagctgccggccatcgcacgttggctaccgctggtgctggtcgcgcagtttctgttactgctattttgcgcctggtacgccgtccgccaggtggtcgcgccgatgacccgctttacccgcgccattgatacgctgcaaccggctactccggctactccggctgcagggccgctggccgagaagggaccacaagaggtgcagcgcgcggcgcgcgccttcaacgcgatgcaaaagcgaatacaggaccatttgcaggatcgcgcgcggatcctggcggcgatctcccacgatttgcagacgccgattacccgcatgaagctaagggtagagatggccgatcaaccggcactccgcgataagctgttacaggatctcgatagcatgacccgactggttcgcgaaggcatcgcgctggcacgagcggccgaaccgctggcagaagcgccgcagcggatgagtcttaatgcgttactggatagcatcgcctgtgattatgccgatatcggtaaagcggtcagttttcgtgccggtaaaggggcggacgtcatgacgcttcagccgcaggcgctgcggcggatcatgagtaacttaatcgataatgggctgaaatacgccgaaaaggtggaaatcagcctgagttatccgccgaatggcgatgttatcattcacgttgttgatgacggccccggcatcccggaaggagagctcaccgccgtactgcagccgttctatcgcctcgagcagtcacgtaatcgcgataccggcggtaccggtttggggctggcaatcgccgcccagctcgccgggcagatgcagggaagtttgaccctgcacaatctgcaacagggcggtcttgaggcgcgcgtacgtctcaatgccgccgttttgtatccttctgtatccattccaactgcagataaatccatatactaa

SEQ ID NO: 99526 - DNA, 738 bp, Enterobacter aerogenes
ttggaacgtattgaccacatcctggttgtcgatgacgaccgcgatatccgcgaactgatcgttgggtatctggagaaatcgggctatcgcgccagcggcgctgctaatggcaaagcgatgtggtctgtacttaaaaaccatcaaatcgatttgattgtcctcgatatcatgctgcccggcgacgatggtttaaccctttgtcgccagttgcgcaatgatggccaacaggatatcccggtgctgatgctgaccgcgcgtagcgaagatagcgaccgtatacttggtctcgaaatgggggccgacgattatctggtgaaaccgttcgtagcgcgtgagctactggcgcggatcaaagccatcttacgccgcgcccgcgcgcttccccccaatttacaaatcagcgaagccggcaggcttatcgcctttggcgactggctgctcgatacctcggcgcggcatttgatggacaagagtggcgcaattgtggcgctaagcggggcggaatatcgcctgctgcgggtgtttcttgatcatcctcaacgggtgctcaaccgcgatcagttattgaatcttacccaggggcgagatgccgaactgtttgaacggtctatcgatctgttggtgagccgtctgcgtcagcgcctgcgggaggacgcgcgtgagcccgcctatatcaaaaccgtgcgcagcgagggttatgtgctgtcagtgccggtgtcgatccgcgtggcgcgataa

SEQ ID NO: 99527 - DNA, 705 bp, Enterobacter aerogenes
atgatgttaatttcacaacgatacaaacgcgttatgcaatttgttttttgcgcaacactcatttgtttaacgatgggttgtgctacaagagcgcttaataatcatattcaaagcaaagaatcggggcgaacggagtataactcagacaaaattgtcggcctcgcattagggaaagacagttctcatcaacagggatgggtctttattggcgaacattttgattatctgctgaccagtggcggagaagggatcgttgcgatgttgaaatcaaaagatattgatcgccaactgatagaaattagaaatgttggtcaattttatattagcaaagatcatttaaacttcagcggaaatattcaccttaattataataagcgtgatataaacgcaaagacacagcaggtccttgaggataatggttttacgtgttatggggataatccaagtcatggtccctgttatgcctacatgggcaatctgaaaggaagtattcataaaaaaaataaagtacaaaacaatgccgatatcttgttctttcataaaccatttaccgtcaccttttacgcagataacgggctttccggcgcacgcgctttgtatcctgtaacgattgccattgatgtggtgacttcacctctacagttattaggcaccgctattgggctgggtatctatgttttcggtagccaacccagttaccattag

SEQ ID NO: 99528 - DNA, 546 bp, Enterobacter aerogenes
atgcccttacccgaacgttttaagccagccaagataaatcgccagaaacttaaagaactaacggacgcagccgaagaaatgctgtcgaaaattgatagcggcgcagacgaagatgatgaggggctaaaagcgatgattgatgactggaacaggcaggtagttaatccgtatgaattctctgatttccgtgacttttcctcatggaccgacgcaaagaactttacccggatggcatttaatcaggagaaatacgttgcggatttaacctgggacgaactcgttcagataattagtttcgtgtgcaatgctgaaggcaaggaatcggaacaaagctacgcgctgggattgctggagaaaaactttgatgccaatccgtccgatctcatctactggcctaatgaatggttccagaataaagacatgctccatgtagatttgacgcctgaagaaaccgccggatacctgatggcaagatctggccggcttctaagcgatgcgccacaaatcgagctgagatacccgatcccacccaacgcagcaagttaa

SEQ ID NO: 99529 - DNA, 489 bp, Enterobacter aerogenes
atgaacttaggggctagtcgtgccgatatcacagtaatcaatgggttaatgcatggttatgaattgaaaagcaaaagcgataatcttttgcgtctacccactcaggttgaatcctattcatcgattatggacaaggtaaccttagttgtatcagattgccatgcaactgccgcagaaaagatcatacctgactggtggggagtaaaaattgcaactgaaggctctaggaatgccgttcatttacggactctgcgtcttaatcgaatgaatccaaacgtcgataaagttgccctagccatgttactctggaaggatgaaatgctgtctattttggccactcagggtctagagcgtggcctgaaaagcaagccacgcagagtactgtgggcgatggttgcagaatgcatggaaacccatcagctaagagatgaagtgcgtacgcgccttaaagcccgtacaaactggagagttgataaacaacttttgtaa

SEQ ID NO: 99530 - DNA, 1101 bp, Enterobacter aerogenes
atggaaggtgtttcttacgtaccaattttaaaaacaaaacgcgcagagtttacagcaaccgcacagctatctaaatcggtcaaagtgaaaattattcctctttttgaaattgaacctgttccattagacccagacacagacgttccagataagagttataatgaaatgttgagtgattttggaaagaaaattgctactgcatgttctgatatttcccttatttaccttgatgggatacttgttgaagagcaatttattgatttaggtgatatttatccaatcaccaacgctgtcaatcaggcgcgagctgcaggggttcatgttattccggtaagttcgccaactcgtaacgaaaattatttaaaagcgattgatggtcttgtgaaagatgaagtgtgtttacgattgactgtgactgatattgctaacccccagatgatatcagcttatatttctaggttgaatatcccctgtcaaaatattgatgttgttatcgatctgcgtgactctataacagaagattcattgggagcaaaccaaagccaaacacttgctgcaggacttattaacaatcttcataatatacatgattttcgtcgcgtaatattagctgccggttcatttccagttgaccttagccaaatatccgtaggtatatattcgcaacctcgtttcgaatggtctctgtggaaagatttatgtcaaaaatcctatttgacgcgagaagtaatttacgcggattacgggattcagcacccagattatactaggctagcaacacggtttcctagtgtcactgcaagtgttcgttatacaggagatgatgatttttgggtttttagaggaagaaaagctaaccaatacgggtatgatcaatatggcgcgcatagccaacaaattgttgctcatagagaatactctggagcaacattcagtgtagcggataaagatattaatgattatgctctagtttatgcgcagtacctgcaaaatccctctcagagttataaatttggtagccctgaagtttggagacgaattggccaaaaccaccatattacaaaagttgtttatcaactctccagtttgtacgggctttaa

SEQ ID NO: 99531 - DNA, 192 bp, Enterobacter aerogenes
atgttaataaaggttatcagaattgttttaagtaaaaggagttctctcaataaattgatctggctcgtgaaattcgggtttttattgtgtcgtattggaggaaaacagatttgtctgatatacgtttattggcatctacagaatgcggtaggtgaagaaaccatcatatcatccggggatttgcaggagtaa

SEQ ID NO: 99532 - DNA, 300 bp, Enterobacter aerogenes
gtgtggcaggcaatatgcagctcaatcagtggactggtcaggatggcggtacacagcaaggccataaggttattgcggatagtgtactcagtgccagaacggtacgccaaggcggtagagcaggacaacaaggacaggctactgatgccctacgccgggcccatgaacagcaaccgcctgccactgggtatgaatgattcgaccagacgctgccgtatgacgatgatttttgataagagcatcttccagcaagagactatcgacattctgaaatggtttctgaaaagcgcccggaactag

SEQ ID NO: 99533 - DNA, 909 bp, Enterobacter aerogenes
gtgaaatatcttcccaaattaaaccagctgcaggcgctacggcaggtggcgcgtagcggcagcatccgctcggcggcgcgtgaactggggcaatcacagccggcgctgagccggacattacgtgagctggagcaaatcctcggcacgcaactttttctgcgcagtaaagaaggcgtcgccctgaccgaagcgggaatcgctttcttacagcgcgcggagtgggtactggaggagctgcggcgcgcggcggatgaggtggaacagattaaccatgtcacccacggtcggctgacggtcggcttttcgtcgttaattgccctgacggtatttccgcaagtggccgaagggtttaagcaggcgctgccgcaggtgcagatgacggtgaaagaggggcagctttcgtcgctgctgccgggcgttcgcagcggagagatagacctggcgatcggatcggtcgacccgatgcatccgccggaaggggtgatgctggaaccgctgtttaccgcgccgttctgtgtcatcgcgcgcaaggggcatccgctggcgcacgagagcgatctgctggcgctgcgtaaagcccgctggctgctgccggagtcaccgatgggctactaccagcagttacaaaacgagctgattcacttttatcgccaggtgtcgattaccccgctgcgcaccgactcggtcattgtcggtttgcagatggtactggaatccgattatttgaccatcgtcgcgcgcgccatgaaccagccgctgctgcttggcgaaaagctggtcacgctgccggtatccacgctcccggcggcgcagtattgcgcggtgtggtcgcaaaaatcggcgctcaccgccaatgcccggctgtttctcaatcggctgcgaagcgcctgtcagcgctacgcctggtaa

SEQ ID NO: 99534 - DNA, 765 bp, Enterobacter aerogenes
atgagaagagtaagacaccttttatgggtgctgctggtggttattctggcggcgctggctggcggctactattggctgcattccggtaacccgaacgcgttacgtcatattgtcctgcagcagtgcgtacccaatcagcagcaacatcaaaacccgtcgccgtgcgcggaagtgaacctcaagggcggctacgtgttgtttaaagatcgcaacggcccgctgcaatatctgctgatgccgacctaccgtattaacggtaccgaaagtccgctgctgttggatccgctaacgccgaatttcttctggcaggcctggcaggggcgcgaaatgatgagccagcgccgcggcgcgccaattgatgataacgtggtatcgctggcgattaactcgcgcagcgggcgcacgcaaaaccacttccatattcatatctcctgtctgcgtcccgatgtccgcgcgcagttagataatgatgcggcgacaattagcagccgctggctccctttgtcgggcggtctgcagggccatgaatatctggcgcgtcgggtaacggaaaccgagctggctcagcgcagcccgttcctgatgctggcggaagaggtaccggaagcgcgcgaacatatggggcgttatgcgttagcgatggcgcggcaaagcgacggctcgctggtgctgttggcgacagagcgtaacctgctgactctcaaccgtgcttcggcggaagaaattcaggatcatagttgcgcaattcttaacgcaaaccactag

SEQ ID NO: 99535 - DNA, 498 bp, Enterobacter aerogenes
atgaaaaaaatatttaatattaaatttattatattttttgttattgtttgtgttttctttagtattgtgctgctgctgctaaaaaacaagataatatcaattgagtttcctagaggtgctgttttaaatttttcatgtaaagcatatggtagtatttatattaatgggtataatttgcaatatgttgaagactataggttttataatgcgaggaatggttactttgcggtgagtggtaagatatttgaaagtgggaggtttattggtataataggattaaaaacttcgttttcatatatatattataatgggatggtaacaatgagaacaaatgattctgttatacaggtagataatagtattagcaaagatgttttattggatattataccaggtgcatttttaaacagggataatatacaattaatagcattattcaaattggggggggggtatagaatagactataataattacccaacagcatattgttattaa

SEQ ID NO: 99536 - DNA, 654 bp, Enterobacter aerogenes
atggggcgctggcttgctggcaggctcatgaaagagctagggctggtcagttgccagcagccgactcaccggtataagcgcggcggtcatgagcacgttgctatcccgaatcatcttgagcgacagttcgctgtaacggaaccaaaccaggtgtggtgcggtgatgtgacctatatctggacgggtaagcgctgggcgtacctcgccgtagttctcgacctgttcgcaagaaaaccagtgggctgggcaatgtcgttctcaccggacagcagactcaccatgaaagcactggaaatggcgtgggaaacgcgcggtaagcccgtcggggtaatgttccacagtgatcagggcagtcattatacgagcaggcagttccggcagttactgtggcgataccggattaagcagagtatgagccggcgtggaaactgctgggataacagtccaatggagcgcttcttcaggagtctgaagaacgaatgggtgccggtgacaggttacgtaagcttcagcgatgcagatcacgcaataacggactatatcgttggatattacagcgcactcagaccgcacgaatataatggtgggttaccaccaaacgaatcggaaaaccgatactggaaaaactctaaagtggtggccagtttttgttga

SEQ ID NO: 99537 - DNA, 1188 bp, Enterobacter aerogenes
atgagtgcttctgttcataatcccgatacatacatgtttgattttcgacagctagtaactaatggaagaaaaaaaataggtatacttatcggagctggagcaccggtaagtattaatattggaaaagacgaaaaatatgaacctttaatacctaacattgaaggtttaacaaaacatgtaaaggactcccttacaaaagaattgttagatatatttgaaatccttgagggtcccagtggcaaaaataacctagaaaaaatattatccgatgtaaggactcttgctgatataatcgggcaacatagtgttcatggaggcaatgctgaaacatataaaaaattagagttagatatttgctcaaaaattaaagaagtagtcagcaaacctcttcctgatagccaaaacccttatagtgaattgatatcttggataaatggcattaatagaaactatggggttgaaatatttactactaactatgatttactttgtgaagatgctttagaacgttctcaaacgcctttctttgatggattcactggttccagattctccttttttgatcccgcaagtatttcaacaaatgacctgccaccaagatgggtaaggctgtggaaattacacggttcgataggttggacaatgcggcctaatggacaagttaccagggttccggaatgtgaagtttctaatatggtgtacccttcgcatataaaatattctcaaacccaagcggctccattctcagccttgtttgaaaggcttaaaaacttcattatggaaccagacactttattaattacaacaggattctcatttgccgatgctcatatatcatcaaaaataagcgagtgtctttcagcaaacccgactagcgcggttatagccttccaatataaaaacattgaagaagaatcttatgctgtagacttagcaaaacgaacgccaaaccttagtgtctattgtagggatggcgcagtcattaatacaataagtgccccctggaaaacaggtgaactgcctagtaaaaactggaattatgttagaaaagaatatttgaatgataataaagagtttatcttaggagattttaaaggacttgctagattcttagcaattgccggaggagaagtttcttcttcaccaatactttttgaaagcaaatctgaggataaaaatgatgactaa

SEQ ID NO: 99538 - DNA, 1791 bp, Enterobacter aerogenes
atgatgactaaaatggctatggcatccacgtcaattggcgtcataatctcaatctctagttcatcagtcacgattaggctttcaaaaaaagtaaactctgggttattagtacttgagggaaggacgcataaggtcggccaagttggaagttttgttaggattcctcaaggttataatgacttatacggtgtggttgggtccagtaatgaaaatgctattatcgataataatgaaatagtctcctccgatagcagaactattgttgtcgagttaataggggaaagttcatgtggtttttttgacagaggtattagccagtatccgtctgtcggtgatgatgtccacatggttttggactcagatttaaagatagtttatggttcaaaaagtgacaatttggtcacagttggaaaattagccagctcagaaagcatagatgttaatttagatatagataaacttgttacaagacactcagctgtagttggctcaactggttctggaaaatcaaccagtgtatcaggtctattgcgctcaatttgtcagttagatggtacggacaataactcggcaaggatactactagttgatatgcatggagaatactccgcagcactaaaagatatatcaaaagtattttctgtcgacccaataggtgaagaatgtaagttaaagattcctttttgggcacttccaacagagaaacttattgattttttatgcggtaatgtaaatgaagccagtaaaaactcaatgattgaattcatcaccgaaaacaaaaaagaatcaatcaaatccaataatataaaatatatcaatgaaagtaaggtcacttctttcaccccactcccttataatcttaaaaatttatggtataaatttactttcgaagatacagtaacttatctggaaaaggattttattcgccctgcttttaaagataacattcaaggtgacgcatctactctggaaccaccaaaatttatcccgccaggaacggcaagcaacccgccctttaagaaaggcagtcatatgctaacaaagcaattaaatcttatgaaagccagattgcttgacagtcaatattcctttttcctttcacctgaaggatatacccctgacgaaaatggaaagattactaatgatcttgatcatcttctaagtgagtggttaaaccatgaaaaaccaatatcaattttagatttatctggaatgccttcgaatcaattagatatgcttttaggatctatagtgagcattgtatttgaagcatctatttgggggcgtaatttagatgctggattgaagcgtaacccagtacttttcgtgctagaggaggctcatagatacctttcaaacaatgatgatggtctaacaaaaaatcttgtacaacgtgtcgctaaagagggaagaaagtttggcgttggcctaatgattattagccagcggccatccgaagttgacgataccattttgtctcaatgtggaacattgtttgccttaaggttaaccaatgcaagcgatcggtctaaagtaaaagctgcaatgtctgatggtctaagttctctaattgactcattacccatattgaggacaggggaagcaataattattggagaggcagcaaaactgccttcacgatgtaaatttaagttaccaccagacggcctttatcctgacagtcaagatcctgacgtcagcaaatcatggtcaaaacctagggatcccaagaagaattacaccaaagttatcgaagcatggcgtttaaacaaaccaattaaagaggattaa

SEQ ID NO: 99539 - DNA, 300 bp, Enterobacter aerogenes
atgcagcagaacggcgcggagctggccgccgcactggcaccagaactgatggggattaaaaaccagcccgcgctgttaaaaagtcgtgcgcttgaccgttcagtggtatatctacgtgaagcgctttccgtctggctgaccgcagaaaatgacattaattattctgcacaggacagcgatattttaactgctatcggatacaggcctgacgcgccgccgcgggatgataatcgtgaaacattcacccctgcacagaacatgatttacgcccaccgacgcgccggactggccgcgcagtag

SEQ ID NO: 99540 - DNA, 921 bp, Enterobacter aerogenes
gtgaccttcgtgccgctaaaccccatcccactgaaagatcggacgtcaatgatctttctccagtacgggcagatcgatgtacttgatggcgcatttgtgttgatcgataaaaccgggatccgtactcatatcccggtaggatcgatggcctgcattatgctggagccggggactagggtttctcatgctgcggtgcgcttggcctcgaccgtcgggacgctgctggtatgggtgggggaggcgggagtgcgggtttactcctccggtcagcccggtggcgcacgggcggacaaactattgtatcaggctaagctggcgctggacgacgatttgcggctgaaggtggtacgtaaaatgtatgagctgcgttttcgtgaggcgccgcctgcgcgccgctctgttgagcaacttcgcggtattgaaggttctcgtgtgcgggcgacttatgcattgctagcgaaacagtatggtgtgaagtggcacggccgtaactacgatccgaaagactgggagaagggtgatgttgtcaaccgatgtattagcgcggcgacatcgtgcctgtacgggatttcagaagcggccgttctggcggcaggctatgcgccggccatcggttttattcacagcggtaagccgctttcgtttgtttatgatattgctgacattattaaatttgattccgttgtgccaaaagcatttgagatcgccgccagtcatcctgcggagccggataagcaggtgaggctggcctgtcgcgatattttccgcagcacaaaactgacaggcaaattgattcctttgattgaagaggtgttgtctgctggcgaaatcgagccgcctcagccgccgccggatatgctgccgcctgcgatacctgaacctgtatcgatgggggatagtgggcatcgagggcatggctga

SEQ ID NO: 99541 - DNA, 651 bp, Enterobacter aerogenes
gtgtacctcgcaaaaataacgctgcataccagtcagctttcaccatcacagctattacaactggtggatcgcggtgaatatgtgatccaccagtggctttgggagttatttcccggtgggcaggagcggcagtttctttatcgccgggaggagcttaagggggcgtttcgtttctttgttctttcccttgagcctcctactgaaagtgagatttttgatattcaataccgaccgtttgcaccgaccctgagcacagggcagaccttgcattttagcctgcgggctaacccaactatttgtaaggccggtaaacgtcacgatctattgatggaagcgaagcgccaggtaaggggacaggttaatggcccggatatctggcagcatcagcagcaggcggcgcaggactggctggcgcgtcagggtgagcaaaatgggttttcactgcgagaagtgaatgtggatgcctatcgccagcagcaggttgtgcgtgcaaaatctcgccagctaatccagttcagctgcgtggatttttctggcgtgctggtggttaacgagcccgggttgttcatgcaacgtctggcccagggatacggtaaaagtcgggctttcggctgtggattaatgttgattaaacccggaggcgacgagtga

SEQ ID NO: 99542 - DNA, 747 bp, Enterobacter aerogenes
atgagccaatatctggtttttcagcttcacgggccaatggcctcctggggcgtagatgcgcccggcgaagtgcgccatagccacgagctaccctcgcgttcggctctgctgggtttcctggccgcagcgctgggtatccggcgtgatgaagaagcgcgcctgaacgagttcaatcagcattactcttttctgctgtgcgccagtcaggaccctcgctgggcgcgagactatcatacggtccagatgccgaaagaagtgcgtaaagcccgttatttcagccgtcgtgaagagctgagtgatccagaactgcttagcgcgctgatctcccggcgggactattacactgatgcctggtggatggtggcgcttgtgcaaacgacggatgcgccttattcgctggagcaactgcgagatgcattactacgccctgtttttcctctgtatctggggcgaaaaagtcacccgttggctttaccacttgcgccattgttgctggagggtaccgcaccggatgtgctgaacgaggcgtatcgacagtatcgggagaagttcaacaagataaatatccgactagcggaactgcaacatgagtgctggtgggaaggcgagcatgacggtctgaatgctaataaagacttacgtcgtcgcgatagaccgatgagccgccggcagtggacgtttagcgagcgtaccgttaatcaaggaccgctgttcatcaaggaggaattgtgtacctcgcaaaaataa

SEQ ID NO: 99543 - DNA, 1059 bp, Enterobacter aerogenes
atgactacattcattcaactacatttactcaccgcttatccggccgccaacctgaaccgcgatgacaccggctcgccgaaaaccgttgtgctcggcggcgcgacgcgtttgcgcgtttcttcgcaaagtctgaagcgtgcatggcgcacttctgaactttttgaacaggcgctggcgggaaatattggtatccgtagcggacgcattgcccgcgaggcggcgaagatccttattgaaaacggtattgatgagaaaaagaccatcgaatgggcggcaaagattgcggattacttaggtaaggcaaaagcagataaaaaagcaaaagatccgctgaccaacacagaaaccgaacaactggtgcatatcagcccggcagagttcgatgctgtcatggccctgacgcatcgtctggcggaagaaaagcgtgcgccaaacgaagacgagctggctttattgcgccacgatcgtatggccgttgatatcgccatgtttggccgcatgctggccaataagccggaattcaacgttgaagctgcctgccaggtcgcgcatgcgtttggtgttagcgaaacgatcgtagaagacgatttctttaccgctgttgatgatcttcgtaagacttcgctagaagatgccggtgctggacacctcggcgaagccggattcggctctgcgctgttttatacctatatctgcatcgacaaagacctgctggtgaaaaatctgggtggtaatgaggagctggcgaataaaacgctgcgcgccttcactgaagctgcgctgaaagtctcgccaaccggcaagcaaaacagcttcgccagccgagcctatgcgtcctggacgctggcggaaaaaggcaccgaccaaccgcgttcgctggcggcagcattttacaatccgataaacggcactaaccagctggacgtcgccataggacgcatcagcgaactgcgtgaaaatatgaataaagtctatgggcagcaaacgaagtccattggttttgatgttatgcgtcagcagggaagcatgaacgacgtgcttgattttatctgcgcgtaa

SEQ ID NO: 99544 - DNA, 555 bp, Enterobacter aerogenes
atgagtattgtaaaggacgaccataaggccacgctgcgtcgatggcatgaagagttgcaggaaaaacgtggcctgcgcgccagcctgcggcgcagcaaaacggtgaatgaagcctgcctgtcagaaggatttcgttccctgctgatgcagactcacaccttatggaaagtcgaagggcaagagtggcgttttaccgcgctggcgataaccgcagcgctggccgcacacgttaaatctattgatgaacggcagaagtttgctgcccagttaggtcagatgatcggcaataaccaggtcatgtcggagctgcgtttttccagactgtctgcggtaaaaacgcctgacgaattactgcgtcagctactgcgcgccgttcggttgcttaatggagtggtgagccttccttcattggcagacgacgtcttccactggtgtcgggaaaacgacgaactacttaaccatatccgccgccaacaacggccgactgaatttatccgtatccgctgggcgctggaatattaccaggccggtgaagctaacaacgatgatcaataa

SEQ ID NO: 99545 - DNA, 1557 bp, Enterobacter aerogenes
atgtttccgatgaatttactgactaccccctggcttcccgtgcgttttaaagatagcactatgggttatctggcaccagtcgatctggcggatgaaaacgtggtggatatcgccgctgcgcgggcggatttacagggcgcggcctggcagtttctgctgggtttattgcagtgcagcatggcaccgaaaaaccattctcgctgggatgatatctgggttgagggattggatgcagatgcgcttcagcgagcgttgacaccgctggagcctgcattccagtttggcgctgatacaccctcttttatgcaggatttcgagcagctaagcggagataaggtttctatcgcctccctgctaccagaaatccctggcgcgcaaaccactaagtttaataaagatcattttgttaagcgtggcgtcacggagcggttttgtccgcactgcgcggcgctggcgttattttcgttgcagcttaatgcgccatcgggcggcaaaggttaccgcactggactgcgcggcggcgggccgatgaccacgcttattgaattgcaggaataccagggcaaccgacaaacgccgttgtggcgcaagctgtggctcaacgttatgccgcaggatagcgccggaatgcctgtgccagaaaggtatgatgaaacgattttcccgtggctggcccctacgcgcaccagcgagcttgcaaatgccatcactacaccagagcaggtgaatccacttcaggcctattgggggatgccgcgacgcgttcgcatcgattttgacgtgactcattcaggccgctgcgatctctgtgaagcccaaagtgatgaattgcttagcgggatgacagtgaagaactacggcgttaactatgcgggctggatgcatccgttgaccccttaccgtctccctctgaaagagggcagcgagcgttattccgttaagccgcagcccggtggccttatctggcgcgactggctgggtttaaatcagaaaggcgcttcggaaaataacgccgaatatcctgcactagtcgttacaacatccagcgcgcgcagccttaaggacgtaaaagccgggatgtggggctttggctatgatttcgacaacatgaaagcccgttgctggtatgaacatcattttccgctgttattaacagaaaatattattcccgatctgcgccaggcggcacaaacggcgtcacgaaatcttagcctgctgcgtagcgcgttaaaagaggcctggttcgatgatgccaagggcgcgcgcggtgatttcagctttattgatatcgaattctggcagcttacacaggggcgttttctggagcttgtgcacgaccttgaaaacgaccagagcgcagacgaaaagttgaagcgttggcaaactaacatctggctgtttacccgtagctactttgacgaccacgtttttaccaacccctatgagggtatcgatcttaaacgcatcatgaccgcgcgtaaaaaatatttcaccaaatcggcggagaagcagagcgctaaagccgccaaagcgaaaaagcaggaggctgctgaatga

SEQ ID NO: 99546 - DNA, 2664 bp, Enterobacter aerogenes
ttgacaatatttaattattggggtaaatcccggcgtggtgataatgaaggtggtgatgattatcacctgctgtgctggcactctctggatgttgctgcggttggttattggatggtgcagtataatatctgtggtatcgcggattaccttaaaaaaatagggctacatgataaggctaaggctgcgcagttttttgcctggctactctgctggcatgatacgggaaagtttgcccattcttttcaacagctttatattcacaatgatttaaattcacagggtgaatgcttcaaaaattatgaagccataccgcatgcgactttagggtattggctgtggaataattatttaaatgagtgttctgatctttttcccgtgtcatctctttccgagcgtaagttaaggcgcgttattgcgctttggatgccacttacgacaggacatcatggacgaccgccttcttcaatgacggatctgaaaaattttcgtcagcaggataaagaagcgacccgtgactttcttgtcacgattaaatcgttattcccgctaattgagattcccgaattttgggatgatgatgacggtatcgaactcattaaaaagctgtcatggtttatttcagccatcattgtgttagctgattgggtaggttcttcaacgcaatatttccctcgtattgccaggtcgatggatgttgatgagtactggcagcagcatgcgctggttaaagcaaaattggctgtatctgttttccctccatcttctaacgttgcccctttttccggcataacaacactgtttccctttattcaacatccaacgccattgcagcaaaaagcgctcgagctggatatcaataaagaaggtccgcaattatttattctcgaagatgtgaccggtgctggaaaaacagaggccgcgttgattttaacgcatcgcctgatggctgttggcaaggcccaggggctctattttggcttgccgacgatggcgactgctaatgcaatgttcgatcgtatgtcggagagttggctggcgttgtatcaaccaggttcacggccaagcctggtgctggcacacagcgcgcgtgggttgatggatcgcttcaatcagtctctctggtcgggagatttatcgggttcagaagaacccgacgagctccaaccttccagccagggttgcgccgcctggtttgccgatagcaataaaaaagcgctgttggctgaggtggggatcggcacgctagatcaggctatgatggcggtgatgccgtttaagcacaataacctgcggatgttagggctgaataataaagtcctgctggcggatgagattcacgcctatgacgcctatatgtcgcggattctggaaagtctgattgaaaaacaggccagcgacggcaataccacgattttactttccgctacgctatcacagctgcagagagacaggctggttgccgcctttgcgaagggggcgaagagtcggatggaagcgccattattgggctatgacgattatccctggcttacgcaggtgacgggttcggcggtgatttcccagcatgtggaaacccgcaaagaggttgaacgcagcgtcaaagttggctggatgcacagcgaacaggagtgtattgaacgcattgaacaggccgtcagtcagggaaaatgcattgcctggatacgcaactctgttgatgacgcgatgggtatttatcgccagcttcttgccagaggatacgttcctgccgaaagcctcttgttattccacagccgctttgcttttcacgatcgtcagcgcattgaaaaccaggcactggcgcagtttggtaaaaaaggcggtacgcagcgggccggaaaggtattgatcgctacccaggttattgaacaaagtttagacatcgatctggatgaaatgatctccgatttagcacctgtagacctgctgattcagcgagctggccgattacaacggcatatccgcgatcgcaacggtttggtaaaagccgccggacaagacgagcgtgccgtgccggaactactgatcttcgcgccggaatgggatgatgtaccgcgagaggactggttttcaggcgcgatgtgcaacagcgcctacgtctatcccgatcatggccgattgtggttgacccagcgtgtgctgcgcgaacagggtgaaattagaatgccgcagtcagcaaggctgctgattgaatcggtctacggtgaagacgttgatatgcctgaggggttcgcgaagacggaacagttgcaggaagggaaatactactgcgaccgggcatttgctaagcaaaatattatcaacttcgcgccgggctacagccctgaaagtagcggttttttgccggagaaactttcgacgcgtctggccgaagagtcggtttcattgtggctggcgaaaattgtcgatggagcagttaagccttatgcccctggagatcacgcctgggaaatgagcgtgctacgggtgcgtcagggttggtgggaaaaacaccggggggatttcactctgcttgacggagagcggctccggcagtggtgcgttgagcagcatcagaatcaggagtttgccgtggtgattgtggtatcggaggttgagcagtgtggatattcagcggatgaagggttgattggtaaggtggactag

SEQ ID NO: 99547 - DNA, 1266 bp, Enterobacter aerogenes
atgtttgctctggttgatgtgaacagcttctatgcgagctgcgaaaccattttcaggccggatctgcgagggaagccggttgtcgtattgtccaataatgatgggtgcgtgatagcgcgttctgccgaagccaagaaacttggcatcaagatgggggatccgtacttcaaatgcaaagaccagttccgccggcaaggtgtggtttgcttcagttcaaactatgaactctacgcggatatgagcaaccgggtcatgacgacacttgaggaaatgtgccccagagttgaaatctacagcatcgacgaggccttttgcgatctcactggtgtacgtaattgccgtgtgctggaagagttcgggcatgagctgaaagataccgtttaccgcaataccaggcttccggtcggggtggggatcgcacaaacaaagacgctggcaaaactcgccaatcatgcggcaaaaacgtggaaagccactggcggggttgtcgacctgtcgaatgtggaacggcagcgcaaactgatggctttacttccggtggatgaggtatggggtgttggacgccgtatcagcaaaaagcttgaggcgatggggataaaaaccgtcctgcaattggctgatacggatattcgcttcatccgtaagcacttcaacgttgtgcttgagagaactgtccgtgagcttcgcggtgagccgtgtcttgagctggaagagtttgcgccagtgaaacaggaaattgtctgcagccgttcgttcggggagcgcattaccacctatgaacaaatgcggcaggctatctgttcatatgcggccagaggcgcagaaaaactgcgtggtgagcatcagtactgtcgttatatctccaccttcgtgaagacatctccctttgcgctgaacgaaaaatactacggcaacagcgggtccattaagttactgacgcccacgcaggatagtcgggatatcatcaatgccgcggtaaagtgcctggatgcgatatgggtcgacgggcacaggtatcagaaagcggggatcatgctcggtgatttctttagccggggtgtcgctcagctgaacctgtttgatgacattgcgccaaggcagaacagtgagaaactaatggaagttctcgaccacctcaacgcaaaggacgggaggggaactctgtattttgctgggcaggggatccaggccacctggcagatgaagagagaaatgctttcacctcgctatacaacccgcttctctgatttaccggttgtcaggtga

SEQ ID NO: 99548 - DNA, 3225 bp, Enterobacter aerogenes
atggtctttaatccgccgctgggaacgaccaacgccgatgtttttatgggcaacgttcaacgtttagatgaattggttaacggtcctgctgccgacgttcccgaccgtgccggagatccgctgtactcatggcggggtatccatcagaaccttattccgttgagcaaacagtatatgacgctggccgacgctcaggcggatattgctaatattcctgaaggatcgaccacgtactaccgcagcccggatgatagtgcactggctatcgaggttattaataatggcggtacgctggaggctacagggcggagtatgccatcgcaatatgcgatgtatgcacaaaacttgattgataactcacgcgcatcggattctgaaaagctcccaacgctatttactggccccgattcaggagggaagtggggggcagccagtgcagagatggtcgctcatggcgcagttcagtcagttcagtgcccggccagaccttcaacttcagatccggcggttaactatgtgttccagcaggagctctggtatgcaaccggggggcagtatattgctgcctccttcctcttcaggggggatacaaccttagcattctggaatttgcagccagccgctgcgggaacactggtttccaccaggacagatgaccttggtgatggcacctaccagatcactgtaatctataaactggcgggggtgtcacctggcgtcgctcaatatatttatttcggatgccagcagcgcggggccagtaccagcccatgcgagatcgctttcccgcaaatggccgtagcagaccgcccgatctttggtgtcggtggtgacatgactatggctgatcggttgaatatttccggcgtaatcgcgccaaatctgatcaccaacagctacgcggacccggcatatcagatgccccgcttgcgggttggttctatcggatggagtgcggttagctcaattgcagacacaacaattaaaacggcgcttacgaatgccggtgcagtatcgtgtcttattgctaaccctgtcacagcaggtacaacggcagaggctcttgttgagccattcgtttacgacaccattgctcgcggccaatatgcagcagcgcaattctatgtgtacgtcgttcctggctcagggctgaccgccaaagacgaagtgaagaaagccagcgtgttttttgctgatcaggatatgtctgtagcggaaatcatccctgatgtgattagtgccattacacctaatctgttcaaggttcgtgctacctaccagttcaaagatcagaaaccccgccgtgtggcaatgggggtgcgacagacaagtaccgtcagcgctttctatacattcggtttcttctttgcgtgttcaggacagcctatccgggaaattctggaatcacaggcgcgtgatacgcagtttaatgagcgggtcgacgggaatgcgcgaaatattgcatttaacccgtatggagatactgcgcagcaattgctcccgctattcggtactgatggagtatggaagactatcgcacaattgcctgcagcagttcagtcaattgcgcagtttggtgcgaaaggggctgtcccggcgatgcgtgttaccgcgacaccgccaggccaattccatgatgcactggttaacgtttccctggatagtgttaaggcaggcgaatatgtagccgttgagttctgcgtttatgtcgctgctgattccggtgctaatgttgaagctctgctagcgaatgccgcgagagcctttttctggtacagcgcaaccgattttgtgcaggtatttgcatctgtcagggagcgtctggcggcgaacacttacaaaatgttcgcggtgtaccagtacacccagaacgcgacaaaagtctatttcggcgcccgaaatcagactgataatgcagacttctacgcctttaactttttcgccgcgtcgtcctcggcggctattttaaacatcacgaaaggactggttcgcgacccgcaattaacaccatggattaacggattaattgcgcagtcagctaccccgtacccgccgctgttggcagtgaataacccggtagctggcgctgaggatttgatcctgttacctgaccgagtatttgttcatccgacagcaccactccagttacaggcgccgcaaatgctgatgaactggaccgcagatatggggcaattcctggactggacaatcagaggtgtaagcccggaaggcatcccttacagctacgaattcaaccgcacagtggatttggagccgtcgaaacatggtaccgccgttcgggtcagcttccataaccggcagaaatcggggcagtggtccagccgtgataccactctggtcagaggcccgtccgtcgtcagtgccaccaaaaacaccgggaacatgggcgattcgttgactaaccgtaatatcgtaaacccgttaacccagatgctgcaggctgctggggcgacaatcaaccagatcgggactatgtcgcagggcgggggcggtaaaggcgaaggtcgtgaatcgtgggcggcggctaattttgttggctaccgcaatgtgatgaatggttcgccgattgtgataagtgcggataatccgtcgaacgtgaacaaaaacccgttcctgttcccggctactgatgcacaaaaggcggcaaatccggccatgtgttttctgaataccggcgcagcggctgagaagtcctatgcggagacgcagacaggaacgttttacaccttcgatttccgtcgttatctcgaccagcagggctttgccgatcctgatatctggtctatcgcgctggcatggaatgacgggacctacgggcaaaccccggcgcagtacatcgcgcagatccagtacatggttagccagattaagctggcctgtccgaactgcattgtagctatcgcaccgtacagccatgcctattcaagccgtgagcgctggaataccgttacatcgcaatacgtccgtaatgtcattggtgcatttaaaggccgtcaggcggagggcatccacatcattccttcgtgggcgctgatgccttcagattcagcatggagcaccgacggcgcgaatattacgcgcgacccgcaaacgggtagttacaccgagccgcggggcgataatattcactgggatagttggggccagaagttgatggtaactaacattctgtacccgttcttcatctgggcctgcgttcagtag

SEQ ID NO: 99549 - DNA, 207 bp, Enterobacter aerogenes
atgcaatggacatcagtaaaatttcaattaccacagccatccaaacaggtttcttggtatatcgtaaatacggataaaggtgttggttttgcggaattcaatcccctaaccggatttaacgatgtcgtgattattgataacagccagtattttggtcttgaaataactcactggatgcctttacctccgccaccgtcaagcaattaa

SEQ ID NO: 99550 - DNA, 264 bp, Enterobacter aerogenes
atgacgctacttcgacactctttgatgtgcgatttcaataccctcactaaaggataccgactgattgtggtctcttatagctataagacgatcagtcaggctattgagttacacaatagaaatcgcaccaccacttcaaaggagaaatacatgatcgaattactaaaagcgttagcgccattcgcccccgcaatcaattgcatcgtccgcctgttatgtctcatcgttgcgaaacattgcggcgtccttcctcaattttcctaa

SEQ ID NO: 99551 - DNA, 378 bp, Enterobacter aerogenes
atgagccgattaactgcaatcatcagcgctgtcattatctgcctcctggtaaccatggcatgggctattcaccattaccgcgacaacgccatcaccttcaaagagcagcgtgataaagcaacggtcagggcggaaaccgccgagaccgttagctatagcgtagtcactgcaatgaacctcatcaacgacatttcccgggtagcccagaatgcaaagaacgaactttcccaggcaggtgagcagcgtattatctacatcaagcaggcgcttgaaggcgatcagtgcgctaagcagcttgttcctgctgccgctgctgacagcttgcgggaatacgcggacggtttacgtgccggccccagcggtgccgataagcgctga

SEQ ID NO: 99552 - DNA, 567 bp, Enterobacter aerogenes
atgaaacttttttcgccgctaagttatatccttatcaagcatgaggaaaagaaatggtatgatttcagagtaccctgtgcggtgtcatttattgtaacagttgcatatcattatcatgctaacaaaatagctttgatagcaaccaatggacttcttcttcaagttaacggtttgcttcaggttctgataggtttttacatagctgcgttggccgctgtggcaacctttgcaagcccatcaattgatgaagtaatggctggtgatcctcctaccttagtggaaaaatttcgtggtcaaaaaatcacagtggagctaacccgcagacgctttgtttgttacctatttggataccttgcccttgtaagctttatgcttttctgtctcggaatggtttcaatattggttggtaagccattccatttatggttactaacgtttttgtcttcagaagtaatcatttggcttaaaactattttcgtgggagcgtatttattcatattaatgaatatcataactaccactctgcttggactttactttcttgctgtgaggtttcatcagtcataa

SEQ ID NO: 99553 - DNA, 1038 bp, Enterobacter aerogenes
ttgccttaccctcattaccgcttcccgccttgcgcgggttttttatttgtgatcactttattttttttattgctaagttattgtataggcaagaacaaaaaattaagtggtgacgatgtgctttccaacaatgaacgctgggtttctttttttgactttgctttgacgcctacacatgctgcggctccaagtattcctattacggatatacttacgaagctgaatctgctggtgaattccggaaatgccgtgaagctgtacaataatgggaatagggcccttagaatttcagaaatgaagtatgttactggcgctgctcaaggcaccatgctaattcaactcagtgataagaatggttctgatcctgtttttggtgagttgacaacaggtaacctaagggttgaacccaaacttgcaggggaaggcatcgcagtgtcttgccatattgtgatttccactactgttgagcctcattcatctgaccattacaaaacgcttgtagaatccgttccgggcataagtaaatctgttcttgaaccatttttaaacgcaatgctcaaagaggcgtttactggatgtgagttcaaaaaccccgcaactaaggccatgtgccaacataggccaaagctagatatatactctcacggctcacagacattgatggatgccttaaaaggggcaaaacttcataatgtcaagcttgtgagcacaagaaggaaaggtggtttagatcaaacagcgtacactgaactctcagaaagatcagtaaggtacaaaatcattaagcaaccgccgttaaaagacaaagaaagattgttagagattttgcgaaggaaaggtcaacaatcaggatactcaaaagtatcaatcagttactctaaagacggtaaacaagctagcttggatctggaccgtaacgaggatgcagcaactaaactattcactaaaagtgagaaaatcatattaggcaatttaatcaaccaatgtgagagcagagtgcatcttcagcttgaaacaaagatgattggattgctttaa

SEQ ID NO: 99554 - DNA, 582 bp, Enterobacter aerogenes
atgtttgagaatgaaatttggaagccggtgccggggtatgaaggccggtttgaggttagctctcttgctcgcatccgtagcttgtctcgcaaagttactacgtgcgggcgcgataagaagacgtggactactaggacaatcgctgggcgaattcttaagggatgcacatcatcccaatacatcagggtatcactttctaataaacacgaaatgctgcatcggttcgtggcgctcgcgtttgttccaaatcctaataactacccgcatgttaaccacatcgatggaaataagcacaacaatctgccagagaatcttgagtggtgcacgcatgctatgaatatgaagcacgccaatgaaaccgggctatccaacaagaataaaatgcctgtaattgcagagagagatgggttcggatactggtttccatcaatgcaatcgaccaagaagtacggatgcaacccagcgttagtccacgcgtcgatcaacggaaagcaaggtgagcacagggggatgcagtggagttattgctctgccacatccaactgcgaataccagcaactgcgcgataagcaggaggcctga

SEQ ID NO: 99555 - DNA, 432 bp, Enterobacter aerogenes
atgagcatgaacaaagacggcatccgtctacacaaatccaatttttccgccatcgggcagcagatacagccaatgctggaatctggcgagtgctatcgcctcatcatcaagccctggaaggacaagcgcagcctctcccaaaatgcccttctctggatgtggaatgttgacgttgcatctgccatcaaccggcacgctgaaagcaagctaaccgaggaagaccttcatgaatttatgaaggatatgttctgtcccgccaagcctgtaaccgttcttggtgaaaccaagatggtgaagtccaccaagctactcgacaccgaagaaatgaccttctacctgcgccgcattgaggtctggtgtgctgaacgcggcatcaaattgcggatccccgccaactccgaatatcacgaaaaaggacacgatcatgtttga

SEQ ID NO: 99556 - DNA, 186 bp, Enterobacter aerogenes
atgtcaaagccactcacggatgcagagctaaatgccctcatcgaaaaatcgcaggcacattcagaagtgatgtctgaattgggttcagaacaggaagcagaggagtctgctcagatactaagcgcattatctgagttgaagcggtacagggaaggggatgctcctctggaggatagcgatgcgtaa

SEQ ID NO: 99557 - DNA, 321 bp, Enterobacter aerogenes
atgtcgtacataatgccagaaaagggacagttgaatcattatggtgtggaagcttttggaatctctcttacaagtcgacacggtaaggcgctggaactctctgaaatgcttcgttttgcatattatgtagcatctgctggtcttactgatcacatcgtaagcgttttctatgattcagtatcttgctgctgtaattttgagtttgtacaaggatttgacaaatattcagaagtggcggacaaaattaaacaatgtgcgctacgctctattgggcaatttgaatggtttgacatgatcgaacacggcgactttgacggttga

SEQ ID NO: 99558 - DNA, 174 bp, Enterobacter aerogenes
atgactgatatcacccgactgttagccagcctcaagcgtcgtgctgcccacgcaaaagagtttggtcacgatgtgctgtttgtaaagttagaagatattgatgcgctggtagaggcgctggagaaggcgcggctagcgccgaaagatgatgagccactgtgtcatatcaaatag

SEQ ID NO: 99559 - DNA, 696 bp, Enterobacter aerogenes
atgagtcatccagtagctctaaatgaatttgattttaatggtaatgcagtcagaactatgactgatgatgattcagaagtgtggtttgtagcaaaagatgttgcagacatccttggctatgcgaagacaaacaacatgacagagcgtcttgatgaagatgaaaaacggacgctgtatatagcagcatcccagaataatcaaacacttataaatgaatccggactgtacaatgctgttatgggatctcagaaggatgaagcaaaacattttaaaaaatgggttacttctgaggttcttccatctatccgcaaaacaggcggatataaaatggtgccgcaaacctatgctgatgcacttcgccaactggctgaccaggccgaagcggcggaacgcgctcagatgatgctggaaaagaaagatgatcagtttaaatctgtacgcggcgcttatggcaaccacgtaatgcagcataacaaatacgttcacagcaagggtgagggatttaggcatgccacgattgctcatgtgaagagtgtaatccccggcaagtacagctggcagatgctggctaactattgcgcctatcatgagttatcagtggaaattctcaccccgcattatcaatctgtacctctgaactcctacccagcagaagcatggatggcgatctataacattgacatctcgaaattctga

SEQ ID NO: 99560 - DNA, 192 bp, Enterobacter aerogenes
atgaaaagtgcatatccaatgaaaaagattggtcaggtttacgaatgcccactcgatggcactcttcttgaggtcacttacgcatggaaagatggcagctcaatgatgaggcacttaaatggaagtcgatctggtatggaagactgcattaacggtcaaagcatattcattttggtgaaagatgtcgaatag

SEQ ID NO: 99561 - DNA, 195 bp, Enterobacter aerogenes
atggatgaatacttcgtgcatggcgcgattgagcgcgatggtgaagttgagcgagtgagtgatgaagaagcgaagttctggacggtttacaagcgcattggcgagttgagctatgcggtgttcgactgctgcacaagaactgatgcagaggcggcgtcgaatctccttaacaagttgaaagcagcatctgaatga

SEQ ID NO: 99562 - DNA, 318 bp, Enterobacter aerogenes
atgacaacagagtttcaagcccttcccgtagagcgagatcaatatggttactggactcacccactctacgatgaattttgcaatgggcgtgaatttatctctcctgatgaattcaacacctggctggagaagaacggcctcgaatggaaagtaatttaccgcgatgaggatgacgttgaccccgatgtcgacggctatgacatttcagcgtggcaaccagaaactcccgctggtgatggttggtttgtcggctcaattcacgaaacggaagatggcgcagtctgcatctggctgcgcaacgcaggcggtacagcatga

SEQ ID NO: 99563 - DNA, 513 bp, Enterobacter aerogenes
atgcagcaggcaattttagacatgtgctgcgggtcgcgcatgttctggttcgacaagcaggacgagcgcgcggtgttcagtgacatccgcgccgaacagcatgatctttgtgacggtcgccaactggtaattagtccggaccttattgctgatttccgcgccctcccctttgccgataacactttccctgtcgtcgtgttcgatccgccgcacctcgagcgtgtcggtgataacgcatggatggggaaaaagtatggtcggcttaacaaagaaacatggcgcgatgatctgcgtgccggcttcgcagaagcatttcgtgtgctgtggccacacggcgtgctcatcttcaaatggaacgaaacgcagatcccggtaagcaatatcctgtcgcttaccgatgagaagccggccatctggcagcgcaccggtaagtcagacaaaacccactgggtgattttcgtcaaaggtggtccacatgttccagctaattcagcggggtcagatttacgctga

SEQ ID NO: 99564 - DNA, 240 bp, Enterobacter aerogenes
atgttccagctaattcagcggggtcagatttacgctgaccagcacggttggcccgtcatcatccacagctgcacatcacagatagtccgctactggcgacagggccggataaacaccgcttcaatagtccgttttaacaatgattttgagcacctcgatcaccgtgaggcgacgcagatacgtgccgaactggagacgagcgagcatatcaaattgctgcgcgcccagcgtgcggcatga

SEQ ID NO: 99565 - DNA, 213 bp, Enterobacter aerogenes
atggcaacctataaacagattcaggaatatgtaaaagcacataacggtgtcagtattaagacgtgccatatcgctcatgttaagcatatgcatgggttcataatgaagaaggcaccgaaccgcatttctcctgactcaagggtgtatgaatgcccggataatttcgtgccgcttatcgagcaggctatgaaacactttgggatgatttgttaa

SEQ ID NO: 99566 - DNA, 363 bp, Enterobacter aerogenes
atgttttattggattttattagccttagctatcgtcgccgaaattaccggcacgttgtctatgaaatgggcaagcgtcagcggcggtcatacaggttatattttaatgctggcaatgattgcgctttcctatattttcctggccttcgccgttaaaaaaattgctctcggtgtggcgtatgcgctatgggaaggtatcggtattctgttgattaccgtatttagcgtgctgctgttcgatgaaagcctgtctatcgtaaaacttgccgggctggcaacgttggtcgcgggtattgtgctgattaagtccggcacaaagaaagcggtgaaacagcgtgaggagacagctcatgcaacagtttga

SEQ ID NO: 99567 - DNA, 315 bp, Enterobacter aerogenes
gtgtttagtggttttgtggtgttttttcgcagcctgagctttctgcgctactggtttagcggcagttttgtggtgctttttggcagcctgggctttctgtgcagccggtttagtggcggcttttttgtgtttcttggcagcctgggctttctgttctgcagccggtttggcggcagctttgtgatgttttttatggtgagttgtcttggcagtggtgctgtgagttgcagcagcaggtgcctgagtggtgcttgctgcatcagcagcgaaagcagcggaagacagacccatagcagcggcaacgaccagagctaa

SEQ ID NO: 99568 - DNA, 276 bp, Enterobacter aerogenes
atgagtatttactttaatgagcacggtagcgcgattggataccaggtagagggacgttggacaatcaagggcgattatttgcaaatcgaacatagccccaacatcccaggtggcttgtacaaaattaacgataataaggtgaaattcccactcgactacaaagaggttgaaggagtgatcgatactgagaaacttacttttactgtgtgtggtaccgtatataaaatgattaaaccatctgaaccgtttgccatacctgtacgttttcctacctaa

SEQ ID NO: 99569 - DNA, 327 bp, Enterobacter aerogenes
atgcaaaaagaacactttaaagcaaatactcaatataacgactacaaaggcactgttgcagcggacagggctgatcaagacagcttcagtgacttcctgagagctaaaggaattctgaaagaaggtgagatagttaaaggtatttccttctactcagcagagcgattctttgatgtcgaggcgtatgtaactgatgaccagcagggcttacgtagagaaagagtagagataactcttgatgaattttttaaaacgttcaaacgtttctcaatcaaactatctcgggatggggaactcgatgatcaagaaatcgagttcagggagtaa

SEQ ID NO: 99570 - DNA, 1314 bp, Enterobacter aerogenes
gtggcgcaggcggtaacggcggcgatgcaggggctggcggggggcaacctggcgcaggcggcgagcggggcagtgagtccgtatgtggcggaaatcattcacagccagacgacggacagcgcgacgggtaaggtgaatgtggaagccaatgcgatggcgcacgcggtgtggggagcgatagcggcggcatcgggaaataacagcgcgctggcgggagccgcgggcgcagtgagcggcgagctgctggggcgctggatagcggcggaatattatccggatgttaagacagaagagctgtcggatgagcagaagtcgacgataagcgcgctgagtacgctggcggcgggactgatgggggggcttagcggaggcagcagcgcggatgcggtggcgggtgcgcaggccgggaagaacgcggtggagaataattacctgagtacttctcagggattggaattcgataaagagatgcaggattgccggaaatccggtggagactgccaagcggttgtcgacaagtggaaacaggtcagtgatgagcaaagcgcgcagcttgataacaaactgaaagacaatccgcttgccgcgcaagtcgtggataaagagttagcccttggcggcattgaaatgacagaacgcccggcatggttaaactacctccccggcgtagatgtgatgtctgatgagcaggtgaaagcgtatgttcagtactggaatgcgcaagatctggcaaagatagatacgaacagccctggctggacaaaatatgcggcgtttgtttccgatcctgaaaatcaggcgctgatagcttcggctggtatgctggctaaagatctgacgcaagcggcaatttcatttatgggccgtaataccgcaacggtcagcgtcagtgctgctgagattgggttgaagtggggacaaggcaatatgaagcaggggatgccatgggaggattatgtagggacgtcattgccagcagatgcgcgattgccaaaaaacttcaaaacgtttgattactatgatggcacgaccaaaacggcggtgagcgccaaatcaatggatactcagacgatggcgaaactggctaatcctaaccaggtttacagttcgattaaagggaatattgatgcagtggcgaaatttgaaagatccaggctttcgggtgaaacattaacatcatctatgatttctaatagagaaattcaactagctattcctgctaatacgaccaaagctcaatggacggaaattaaccgagctattgagtacggtaaaagccaaggtgtggcagttaaggtaacacaggtgaaatga

SEQ ID NO: 99571 - DNA, 687 bp, Enterobacter aerogenes
gtggcagggcagttcctcgggaatgcggccagcggtctgctgatgggggcgaacggcagcggcagcgacagtacgctgacgcgggcggcggtgagcgagggcagtatcgttatccgcgacggcgcgaatcagcagcaggacgtgacggggttaagccgggatgcggcgcatgcgaaccagacgctgagtccgatatttgataaggagaaagagcagaaccggctggcgacggcgcagaagataggtgaaatcgggcgccaggtgagtgatgtgctggtgacgcagggcaagctgaacgcgcaggcggcgcagagcgacccggcggcgcgggcagcggcgcgggcgaagctggtagcgggagggaatgccagtccgagcgaggagcaaatcagcgcgcaggtgagccggacggcgacggcggactacgatacgggcggaaagtaccagaaggtggcgcaggcggcgagcggggcagtgagtccgtatgtggcggaaatcattcacaggcagacgccagactgcgatacagactgtaaaggaaaacttgctgaagatgtggcagaagggaatgcagtagtatcagcccatcaggcagatactgttgggttaggcatattgcctaagggggctttggtaacagctgccatcggtgggggaaaggagttgaactccttattgaaaagttaa

SEQ ID NO: 99572 - DNA, 1596 bp, Enterobacter aerogenes
atgaagaggactatcctattttgtcttatctctgtcatgttcagcaatgcttacggacagcatttaacagtggaagagagacttgctttgcttgaaaaacaactccaggaaaatactgctgaattaaaaagcacaaaagcagagttaaccaagtataagcaagctgataaagcaaacaaaaacacgaacaactcagcagatgaaaaatatcaaccaacaacaaattcttctacttcaactattgcaacaccatcgagtaatagcaacaaaacaggcagtagtggcacaactaaagttaataatgatcttacgttgaaagaaattagtgactttgttaaaaacgatattgggttttcatacaatggttatttccgttctggttggggaacggctaatcatgggtcgccaaaagaatatgctattggttctcttggtcgttttggtaatgaatatacctcatggttcgatcttcaacttaagcagaaagtgtacgatcaggatggtaaaactgcacatgctgtcgtcatgctggatggtaatgttggtgagcaatacaataatgctgtctttgataaaaatacagagaataacttacaattttctgatatttatctgacgacgaagggatttcttaattttgcccctgaagctgatttttgggtaggtaagcactatctgcctaagtatgagatacagatgcttgactggaaaagcatcagaacagaaagtggagcagggctcggtatagaaaattggaaaattggctctggaaaatttaacgttgctattgtgcgccaggacctgaacgctcgcgctcttgattatgacacatcaggaaattcattacagatcaatacgaatgcgcttgatatacgctatcgtgaaattccattatgggacaaggcaacattagaacttgatggtcggtataatatggcgaacaaatcagatgtcgtgaagtcaggagagtctgatggtcagtattatcaggtaaaagatgcctggttggcaggtgcgattttaaggcagaagtttgcaaccgggggttatgaagaattaaccttgcaagctgccgataactctattgccagttcttttgcaaaaatttcctcggcaaatccaacatttgggaatggtgataactattatggaaatcacactaatggaaaggcattaagaataatttctcaaggggagctttaccccacaaaagacactattattgcacacgcactagtgtattcaaatggtaatgatatatttagctatgatactggcgctcatacagattttgaaagttttcgaagtgtcatccgtcctgcttatatctgggataaattcaaccagaccggggttgagctcggatggtttagacaggataacaaaactcaagagcagacatttagtgagtccggttacaaaacaacgttgtatcatgcactaaaggttaatacatcaatcctaacctcaaggccagagattcgtttctatacaacgtatatcagggcaaatcagaatgagatatcgaattttaaattcaacgataataaaaaagaacaattatcgattggcgctcaggctgaggtgtggtggtaa

SEQ ID NO: 99573 - DNA, 1869 bp, Enterobacter aerogenes
atggatcatctaaatactggccgtacaattctcaaattagtcggcggagcaggtaacatcgaacatattgaacattgctcaaccagattacgattaagcttgtatgacaatgctaaagttgacgtgtctggcctcaaaaaattacctgaggtaatgggggttgtgacaaatgtgcagtgtcagatagtcattggcaaagatgttatcaacgtgtttgatgctattagatcattaatgggtaatgatgctgacgcgaaacagaaaccagtgatgaagaaaaaatggaacgcatggttgattgattttgttatcagtatttttcaaccactcatccctgcaatcgctggtggcggcgtgctgaaatccattttaattattatgaatatggctggatggctgactaaagacagctcgacatatcaaattttggactgcattggaaccgcacctatttattttttacccttacttatcgcaatcactactgcgaataagcttaaagttaatccactagttgccttgactgctgtctcagtcttgttgttgcctacatttactacactggcaaaacaaggtgcaacgttaatgaccttcgatattacgaacgtctcctatgcagcgcaggtatttcccgcaatcctttgtgttattttttatgcacaaacggaatctctttttaatcgttacacgcctaatgcattacgtggtttcttatcgcccatgttatcgctggtcacgacagtccccgtaacattgcttatccttggaccattaggttttgaaatgggttctctgttaactcatcttatcctttggatgcatggcaaatttggattcatcgcaacaggtttacttgcgggcgggttaccatttattgtagcggctggaatgcataaacctttcctcccttacgccataatgtcaatggggcaaacgggtaaagaatctttgtataatccagcttccttagctcacaatatagctgaagcaggtgcctgccttgctgtttctctaaaaagtaaagataaaatgtttaaaggtactgccctttcctcaggaatatcagctctgtttggcattactgaacctgcactttacggcataaccttactgcatagaccggtactgatctctgtgatgttaggtgcaatggtcggtggctcctttatgggatttatgatggtctcagcttatgcaatagtagcgccgagccttgccagtatctcaatatttgcttcccccgataatccaaccagtttgatatatgcaatcatcggtgcatttgtttcattctgcctggcatttttatcaacattattcttttggaaagaaaaaacggcaacaccccatccagaggaagaaaagcctaaatttgaggagactgaagccactgctaatccagttttaatgagtgactttacctttaccagtccggttgaaggtaaagtgatccccctgacagatgtcaacgacgatgtattttcttcaaaaattatgggggatggtatcgctatcgttccaactgtaggagcactctatgcacctgccgatggcattattgagcatgtgttcgaaagtggccacgcagcaagcatgatgactgaccatggagtagaggttatctttcatattggaattgatacgatacaaatgaatggcgaaggctttcacccgaaaattgtcgatggccaacgcgttaaagctggtgaattattaatcgaatttgaaattaatgaaataaccaaagcgggttatgacccagtcgtaataatggttattaccaatagcgatcgttttatgatgaagccgtcaaacgatcataccaatacactccagcaatttaatattttttcattaaaagaggcttaa

SEQ ID NO: 99574 - DNA, 1461 bp, Enterobacter aerogenes
atgtcgaaatctattcttcccaggaattttttatggggtgcagccattgcagcaaatcaggcagagggtgcatggaacgttgacggcaaagggccttccgttgcagatgctgtagcctataaggcacatttgagcacaagcgattatgccggccatatggccgtatctgatgaaaacgttagtgatgcgcttaagggaaagaatgataaaaattatcctaaacgcagaggcatagatttttatcatcgttacaaagaagacttagccctttttgcagaaatgggtataaaagtcctgcgagtatcaatcgcatggtcacgaatcttcccaacaggtgaagatgaacaaccgaatgaaatgggattgcagttttatgaagatatgttcactgaaatgcgcagacttggcattgaaccactggttacgctatcacattatgaaatgccattagttttgagtgaaaaatataatggctgggtccaccgaaacgttgttgatgcgtttgtgcgctattcaaatgtgtgctttgaccgttacaagaatttggtacgttactggttaacgttcaatgaaattgatagtattcatagacatcctttcacgacggcaggtgtccgcgaagaaaaaagtttaccaggagaaagcacccaggatatttatcaggcgttgcatcatcagtttgttgcttcagcgttagcgacaagagactgccatgaaaaaataccaggtagccaggtaggatgtatgcttaccaagttaacgacttacccattgacctgtcatcctgatgacgtggaagccactctgaaaaaaaatctggaaaactatttttattcagatgttcagattaaaggtgaatatccaccattaattaagcgggaccttgaactgcggaacatcaaaataaaaatgcagccggatgatttggaaatattacgtcgctatactgtagatttcctttcatttagttattatatgtccatcactgaatccgttcagtccgatgcggaacgcacagcaggaaatactatcatgggtgtaaaaaacccacatctaccggcttctgaatggggatggcaaatagatccggtagggcttaaaatatcgttgctagagctttacgaccgatatcaaatccccttattcattgttgaaaatggatttggtgcaaaagatacagtggttggtgggaagattcatgatgattaccgtattaattatttccgtgcgcattttgagcagatgattgaagcggtcaaagaaggtgtcgatttaatagggtatactagttggggaacaattgatattattagtgctggaacgtcgcaaatgaccaaacgctatggttttatttatgtagatcaagatgacgaggggaacggttcattgaatcggttacgtaaggactctttctattggtatcgtaaggtcatagcgactaacgggactgatttaagttaa

SEQ ID NO: 99575 - DNA, 834 bp, Enterobacter aerogenes
atgaaagttaaaaagtccttaaacaacagcatgctgcttgttgagaatgacggaaaagagattatactctttggcaaaggcataggttttaacaccaagcctggtacaattatcgacttgcaaaatgtagagcaggtctttatgcctttggataccctcaagtcgcgacattatctgtcactaacggacacaattcccgcggtattttttgaaattacacatgaaatagtcaaactggctcaagcacgttataacgaaaagcttaattcagttttattatttactctggcagaacacttacattttgctgtcgaacgctgtaagacaaatacgaatattgcgaacaaactgacctgggaaataaagcgttactatcagaaagagtatagtattggtgagttggcaagagatttggtatcagctaaatttgcggtgagccttcctgatgatgaggccgtacatattgcttttcatattatcaatgcaagttttcaatttgatgagacaaatgcacataagcaagtagagttagtgaatagaattgcagaaattgttcgctataagctcaatcaaaatattgatattaattcaattcactatgcaaggttcattacacatttaagatatttcgctgaaagagtattaaataatagtcttgcaatagaagaaagtgacgacttctacaatgaattaattcgttttcatccaaaagcgatgggagttgctgaagtaattcgtgactttataaaaagcaactacgccattgctattcctaatgatgaacttacctggttaggcatacatatcagtaaactcagtaagtattcaaagtga

SEQ ID NO: 99576 - DNA, 639 bp, Enterobacter aerogenes
atggctgaacagagcgatatgaaagaggtgaagcgcgtgctggtggggccgcttatcgccaataaccccatcgccctgcaggtgctcggcgtctgctccgcgctggcggtgaccaccaaactggaaaccgccttcgtgatgaccattgcggtgacgctggtaacggcgttctccagcatgtttatctctatgattcgccaccatattcccaatagcgtgcgcatcatcgtgcagatggcgatcatcgcctcgttggttatcgtggtggatcagctgctgcgggctttcgcctatgagacctctaagcagctgtcggtgttcgtcgggcttatcatcacgaactgtatcgtgatggggcgtgccgaagcttatgccatgaaatcgccgccgctggccagctttatggatggtatcggtaacggtctcggttacggcgcgatcctgattatcgtcggtttcctgcgcgagcttatcggcagcggcaagctgttcggtatcaccgtactggaaacggtgcagaacggcggctggtatcagccgaacggcctgttcctgctggcgccgagcgcgttcttcattatcggtttgctgatttgtgccctgcgtagctggaagcctgaacagcaggaaaaggagtaa

SEQ ID NO: 99577 - DNA, 501 bp, Enterobacter aerogenes
atgattgagttgacatcagaggatgttaacttcattttaaataaaattgggttgattttttccttagctgcattggtgttatctttcttgagctataggaacagtaaattagtaaaaaagaagaacgacaaagatgctctttataaacttaagacggaaaccttactcaaggcgcgggagtttgaaattgcttttcaagattcatatgataagacagatggctttataaaagagttgcaagggaataacacgccctttgcagagcccaagaatgtaattttgaatgagttgatttcacagcgtgacacattctataaacagtgtgtacttgacgccaaagcaacttttttaaaattaatagataactttgatacattaagtgaagacgaattttcggaatatcataaggtttttaattatgaattggagagattaaaaggaaataataaaacattagattcaaaatatacgtctttaatccagagcattgcagtaaaataa

SEQ ID NO: 99578 - DNA, 1836 bp, Enterobacter aerogenes
atgaaaaaattggatttattaaaagctgcaaaaacaaagccggatttggctaaacttttaggcgttaagccttcagcattaacctattgcttatataaaactaagcccgagactcaatacgttcaattcgagataccaaagaaaaatggtggcaatagaattattagcgccccctctggtattttaaaaaatatacaggcatctctttctgaattattgctagattgcttagatgaaattattattgataaatttccaaactcagagatagcaaggcaaaaagcaaaaaactccataattttaaaattaaaatgttctggttcggaaattaaacagccttcattgtcgcatggctttgaaaggaaacgttctataataactaatgcaatgatgcatttaggtaagaaacacgttttcaatatagatttagaaaactttttcggtagttttaattttggaagagtaagaggtttcttcataaaaaacaagaatttcttactcgagccagaaatagctacagtgattgcaaagattgcatgttataataatgaactaccacagggtagcccttgttccccagtcatctctaatttgataacacatgctttagacattaaattggctgctgttgcatcaaaatattcatgtacgtattcaaggtatgcagacgatataaccttttccacaaggaaggatagtttaccctcgtcaatagcaaaatccgataatcatacatttgtaaccggtaaggtaattaaaagtgagattaatcgctcaggattttcaattaatgaaactaaaactagaaatcaatataaagattcacggcaggaagtgacagggttagtcgtaaataaaaaacctaacactaagaaagagtattggcgtcttgtgcgtgctcaatgcaatcatctcttcagaactggtcagtttaaagagactgtcgatggtgttgaagtagttggcaatataaataggttggaagggaagttaaacttcatcgaccaagttgatcattataatcggcttcgacaaagcgagaagctgaatccgaagtatcatttgaaaaaagatgctctcaaaaatggtcatgccaaaagtagacgttacttacatacttcgagagaaaaaacatttagtaaatttctgttttatcgtatgttctatggtaataaaaaaccgacaattctcacagaaggtaagactgataatgtgtatttgaaagcagccatacacaaattagcagcgttattccctaaattagcaattcaaaaaaccgccctagcaccgtataagttattaacgcagttcgtcgaatacaatgaacgtaccaaatatttgttagagctttttggtggcactgattaccttaaggactttgttatacattacagacattactttcatgattacaaagcccctaaaccgtctaatccggttattatattcgtagataatgactctgggcctaagaatctgatcaattacgtgaatggagttgagggtattcagatttttccagcgggtgttgcagatattcgtcaatccgattttgttcatattttttgcaatttatatctagtgctcacacctcaagttgaagggtgtcctgaaactgacatagagtatttctttagcaatgttgatcgacttaagcaacataaaggtaaatgttttaatacagttgctgatcgtgatccaagcaatgatttaagcaaggaggcatttgcaacgcacatagtcaatgcacataaaaatgatattgatttttcgagatttactagtttactggaacggttagaaaaagtgatagatcactataacttaattaagtaa

SEQ ID NO: 99579 - DNA, 531 bp, Enterobacter aerogenes
atgtttaacctccagaccctgacagcaaaagcacgcgagctgcgcggtaacgtggtaaaagccactaccacgaagggcactcgcaccatgacccctgttagcgacgtgtgcaacttccgttactcctgcatcaactgggaaaccggcattgccacaatcatcgtagggaagcagaccaaagcagcggaagccagagcgacccgtaaggggatcgagattgttcgccagcagcgtaaggacgctgcccggcttgctggcgatcacattgggtacatgcactgggatagcgtgagctgcgacgaactggccgccggcatgacggaagaagaacaggcgatcgtgtttgagctggtcgcaaaggctgaagtgaagcacgacaccaaacagctgccgccgggcatcatcaaacgactgcgcgaacgcatggagcgcaatcttatcggtgacgacctggtattttcccgcagccagattgaaagtaaccgttgcttcaaactgacatcggttattcaacgtaaaatgcaaaattaa

SEQ ID NO: 99580 - DNA, 189 bp, Enterobacter aerogenes
atggcttgcactaagtctacccaaacatgccctgaatttacatggcgttttatcaccctgggtgaattcacaaatcagatcgtcaacgttactgcttccaccgaacacgaagcacgcgaaaaaacgcctgcaggatgtgtctgtattctggcgtgtcgttttcgtcttaaggaggtacagcatgtttaa

SEQ ID NO: 99581 - DNA, 609 bp, Enterobacter aerogenes
atgactatcaaaaaagcccgtgccgggcagggttttgctcaccctgaaaacagcagtgatgatatttcggtcattaaatttgaggatgtaaaagtacgaattgttaagatactgggtgagccatggtttgtcgcggcagatgtatgcgcagctctggaaataactgatcacaaggttgctttgcaacgtctggatgatgatgaaaagggggagtgtttaatacccacccctggtggaaatcagactatacgaactgtctgcgagtcaggattctacaaactgatctcacgtagtcgtaaggcgactactcccggcacctttgcgcaccagttcagtaattgggtattccgtgaggtcattccctcaattcgtaaaactggcttctatggagtgccgttcgtgttcctgaacgacttcagccggcgcatggctgcttatcagcaggaggccagcaaacgcgggtataagctgcagcagtgtaaggcagtaaaagaggctcttgtgcgggaggagagccagctatggcgtaagtatcagcccgagctgttaggcgaagatggtcatgagccgtttactgaagttcgccctttaacggatgaaaaaaattga

SEQ ID NO: 99582 - DNA, 213 bp, Enterobacter aerogenes
atgtcttattcattaattagatttgcagaagtacagaaacgaacaggctatagcaaagcgtggatctatcgtctccttaaagaaaattgctttccacaatcagttaaaattggagcccgatctatcgcatttgttgaaagtgaaattgacgaatggataagccagaggatcgaagagcgtgatgcgttaatttccacaaagccacaactgtaa

SEQ ID NO: 99583 - DNA, 684 bp, Enterobacter aerogenes
atgaattcatttgattttataggatttaatcgttcagagattgaaaaaacgttaggccttaatctgcatgataatttattggaatataacattggtttaaagaaaaatttaccaagttggcttgttccatatctttcaagagatagcatctctcttagtgactctgcacgtttaattgttggcgcaaatccaagagaaaatattacaggtgaaaaatctcacgaatatgaagcttataaagaatctctctgggatgcgattgataattcaaaactaaccgcaagggatattttccactacgataacatggatcatgatcggcgtgattgtatgctcgtgcgtagtgaggttgaaaaatgggttacagaacataatttcaactggcctttacccttacagcaaccaactgtaaatgaacaaacaaatcaggtctatctagatcaatggggggagttccccggtaaaaacactgcattgatgatgattgcaggtatggctatcgccctcgaaaaatcaagtaagagctatcgaaatggtgagcgcctgaacaaactggcaattgctcgtgcggttgcacagaacctggctaatctgggatatcaagggatggtagtgacggaaaaacagatgacaaacctcataaaggaggctttggaagtcacatttccagaaagcgatggttag

SEQ ID NO: 99584 - DNA, 1215 bp, Enterobacter aerogenes
gtgaaactaaacgcccgtcaggtggacgccgccaaacctaaagataagccctacaagctggctgatggtggtggtttgtatctcctgattaaacctaatggcggcaaatactggcggctcaagtatcgtgtagccggtaaagaaaagctgttagcgcttggcgtgtatcctgaagtcacattggccgatgctcggtcaaaacgtgaagaagccaaaaggggtatcgctgggggtatcgatcctatggaagcgaaacgggaagagaagattgcccgtgaaactcagttaaacaataccttcaaagatcttgcccttgagtggcacagcagcaaactaaaaaaatggtctgctgggtatgcttcagacatcctggaagctttcaacaaagatgtgttcccttacattggcaaaaaaccaatagccgatatcaaaccgcttgaactgttgaatgtgctgcggcgcattgaggggcgcggcgctacagaaaaggccaaaaaagttaggcagcgctgcggggaagtttttcgttacgcaatagtcaccggccgtgctgagtataaccccgctccggatctcaccagcgccatgcaagggcatgagtccaatcattatcctttcctcacaccgaaagaattgcctgatttcttcaaggcgttgtcaggatataccggaagcgcgttagtagttttggccgctcgtctgctgattatcaccggcttgcgtaccggcgaactccgcggggcattttgggatgaaatcaaaatcagtaaggcggtctgggaaataccagcttcacgtatgaaaatgcgtcgccctcacgtggtgccgttgtccaagcaagctcttacgcttattggccagctccaagagctgacaggcaattacccgcttatgttccctggccgtaacgatccgcgaaaaacaatgagtgaagccagcataaaccaagtctttaagcggattggctatgacggaaaagtcactgggcacggtttccggcacacaatgagtaccatcctgcatgaacagggctacaacaccgcgtggatagaaacgcagctggcacacgtcgacaaaaactctattcgaggaacttacaaccacgcccagtatctggatggccgccgcgaaatgctccagtggtatgccgactatatggaggcgttggaaaacggcgaaaatgttgtgcatggaacgtttggaaaaagcgcttaa

SEQ ID NO: 99585 - DNA, 246 bp, Enterobacter aerogenes
atgcgccagggtgttaatcagcctcttattcttgctcagcagcacgaagtgttcttcgtcaaatcctcccgctatgtgataggccttcaattttgggggagggaagcagttcctgccacgcttttctatgtcagtaacgattgtaacgaatatgcttattaccttcctaccaacggtgtggccttacagcagaattttccggtaaaaatattttccttgtcgattgcattggcgtacgataaataa

SEQ ID NO: 99586 - DNA, 834 bp, Enterobacter aerogenes
atggcttacgaagctcaaatcagccgtaataaccctacagcatttcttttcattgtcgatcagtctggttcgatgtccgataaaatgtcttcaggtcgtagtaaagcggagttcgtctccgatgcgctcaatcgaactttgatgaatctcatcactcgctgtactaaatctgaaggggtgcgcgactatttcgaaatcggggttttaggctacggtgcccaaggggtttctaatggtttcagcggcccattgggagggcaagtcctcaatccaatttcagccctggaacaacatccagccagagtggaagatcgtaaacggaaaatggatgatggagccggcgggatcatcgaaacagcaattaagtttccagtatggtttgatcctaccgccaatggcggtacacctatgcgtgaagcgcttaccaaagccgccgaggaattggtgacctggtgtgactctcatccggattgctatcctcctacaattttacatgtcactgacggtgaatctaacgacggagatccagaagaaatagccaatcatctacggcaaattcgcaccaatgacggcgaagttctgattcttaatatccacgtcagttccctcggtaatgatccaataagattcccctcctccgatgccggtttgccagacgcctatgctaagttgctttttcgcatgtccagccctcttccagagcatctggtacatttcgcgcaagaaaaaggccatcctgtgagtatcgaatctcgtggatttatgttcaatgctgaggctgccgagcttgtcgatttcttcgacatcggaacccgggcttctcagttacgctga

SEQ ID NO: 99587 - DNA, 720 bp, Enterobacter aerogenes
atgaaactggaattctcaggaaccgttcccaaagatcctctatgccctgaggcaaacgaggataaatatgccttctccggagacgggagaaggctcgctctctgcgatggagcaagcgagtctttcaattcaaagttatgggcagatcttcttagtcgtaaattcattacggacacggaggtcaaccctgattggataacatctgctatggcggaatattctgccgcacatgacttcccatctatgtcctggtccaagcaagccgcattcgaaagaggcagttttgcgacactaataggcataaaggaatttgaagagcatcagtcggtagaaattcttgctgtaggggatagcattacgttgctggttgatggcgaaaaattgattcgagcatggccattcgataacccagtcaaatttaaagaacggccaacattgtttgccacgctccctactcataataatttcgttggcggaaattgcttttggacaattcatgggaaaaatttttacctcgaaaaactcattcagcccaaacttctctgcatgaccgatgcactcggcgaatgggcgctgacgcaagctcaggcgaagggttctggtcttattgaattactttcgttgcaaacagaagagcagcttgtggaattagtcttgagggaacgtgcagcaaaacgtatgcgtatcgacgactcaacactgctagtactatcgttttaa

SEQ ID NO: 99588 - DNA, 1587 bp, Enterobacter aerogenes
atgcctcttgccatcagtggtggtttcgcgctgacctatacgatcagttcgggtgctaagaaatacgccgttcgttgttttcacagggaatccaaagcattagaacgtcgctatgaggctatctcaaggaaaattgagagtcttcattccccttattttctcgactttcagtttcaaccccaaggtatcaaagtcgaaggtgtatcgtatcctattgttaaaatggcatgggcgaagggagaaacactaggagagtttcttgaggtcaacaagcactctgtgcaaacaatggcaaaactatctgcgtcgatagaatcactcgccgcctatctcgaaaaagaaaaaattgcgcatggtgatttccagactggaaacctgatggtatctgacggtggagcaaccgttcagttaattgactatgatggaatgtatgttgatgagattaagacattaggcagcgcagaactagggcatgtcaattttcaacaccccttgcgtaaagcgacaaatccgtttaatcatactctggatcgcttttcactgatattactgtggctggcccttaaaaccttacaagtcgccccatccatttgggataaatcaaattcagagctagacgcaatagtttttcgggctaatgacttcgttgatcctggttcatcacccattttaagaatgttagcgggtgttccacagctctccgcctttataaagaatttcgcggcgatctgcgtttcagagatggataaaacgccttcactagctgactttattgtaggcagaaacattcccgtatccctggcaattattagcatgaatggggatattccaagaagcagactgaaacctagttatattagcgcctataccgtcctgtcagccctggattacagcgcttgtcttcaacgagttggagataaagttgaagttatcggtagaattattgaggttaaacttaataaggctaaaaatggaaaaccatatatcttcgttaatttcggtgactggcggggaaatatctttaagatatccatatggagtgaaggcattgttgctttgcctaccaaacccaatacttcatggatcgggaaatggattagtgtaaccggccttatggaaccgccttacatcaatgagaaattcaactattcacatctctcaattacggtaacgactgttggtcaaatcacagttctttctgaaaaagatgcccactggcgtctcgcagggccgagccatatccaacaaatgccaaattctacaaaaagcaatcaggcagccctggagcgtataaagggaaagaggatcaccgtaacgcctaagtcaaaaagcatcagcgctacatcaacgaaccaggcggtccttgataaaataagagcatcggtacaaccttcagcaccggtgagagcgcaaacgcagcctgtagcgtctgctaaatcctcgacacattatgcagcacgaaccagaccaacgacctcacaacagatatcacaacaccaaaatattccaagtaagaccgttacttcgaatcagcaaacatctatgacagatataataattaaggctttcaaaaaaatatttggatga

SEQ ID NO: 99589 - DNA, 1737 bp, Enterobacter aerogenes
atgagtaaatacaatgaaatacagcgtcagttagatgaagtaagtccaatcccaaaaggaattcctaaagtatatcttttaggggatactggagcaggaaaaacaacgtttattcgaagaatattaggaactgaaaataccaaattcccgactaccagacaaagcagaacaaccgttgcacctactgagtatgtaatatgtaactcatccagctatgaattaacaattttgttaaaatcttttaatgaaattaatggatatgtcagagaaattttaaaagaggcatttgaaaagtcattaaaaggtgaggatgtactcagaagtttacgtcaaacaaatgatcagcgatttcgtttatactatcttcttgatcacagtgatattacaaacttttcggcagaagtgatttcacttacaccacttctttctgaaaaaataattgagctaaaagaaattttcaacgacgatataacagatcaagatgagtatatcagttttgctattgatgaactaaatgataaagtcgaatgcattcaaaataacattatggatctcattcagaagaatgtaatgtctatttgtgatggaagtaggttaagcaatgagtcgcaagtatataaatttacttcaactgaaaaagaagacttcatcaaaaaatgcaaaaaaacattatccagtgataaagaatctatatctcctgttgtcgagtatgcaaggttgagtggagaactcaaatctgaatgggtgagcaatagtgcagaaatagttatcattgatggtgaaggcattgggcataatacaaaagaaactgcacaattagactccagacattatgatttcttttatgatgttaattcaatattacttatcgaagaatcaaaaaaaccttttattgctggaggtaaaaatgcattgaaaagtattttccagcgtgggtatggcgagaaattaaagttgatattcactaaactggatgaagttataccttatgattcagacgagccaacagatgatgaccggatcgattatgtaaaagatggtctcaataacgtgctggacgcattaaaaaaagaagatgtaaagtgtaacattgacattggtgatatttatttcatcggggacctcgataaaaccgatcgtaacgagcggcttgaattggctttcaactccatatttgaaaacacagtctccacgataaataatgacgaagtgttcattgagccaaggtatgactttgagttattagcactgcatatcaatgctactgctaatgattttaaaacacattataaaagactattagacagagaacattggaaaacaatagaagcattcaatcgtcgtatgtattcaaatatagatggatttagaatgtttatgcctattactgattttgaggaaaccgtaagcaaatatattgggggttttttaacttcgccagtaggttggaaatatgaagccattgataatttgaagcaaaaaagtattaataaaatcaagagagagttcaacaaactaattcttagtttcattcgcaacaagttaattactgaaccgtatgaaaaatggaaagaatcctattttctagctggtaccggttcaactattagcaggaaacgggatataacgaccatttttagtaatgcagtcattgatgcctctcaagctgagcactttaaggtattcaaggatcaaattaaggatattgttgtcaaatcaatagagaagtgtaaatga

SEQ ID NO: 99590 - DNA, 1365 bp, Enterobacter aerogenes
atggctaagtataaggcgtatccggagtataaggattctggggttgagtctttagacactatccctaagatgtggtctataaaaaaactcaaatatatttttgagattaagaaaagaattgcaggaaagataggctttgatgtcttatctgtaacccaaaaagggataaagataaaagatattgaaagtggtgaaggccagctttctatggattactcaaaatatcaaagggtatatcctggtgagtttgcaatgaaccatatggatttattaacaggttatgttgatatttcaaactatgatggtgttactagtccagactatcgtgtctttgctgtacgagacaaacatagtttttatagtcgctactatctttatttactgcaagatgggtataagcagcgtcgcttctttcatcttggacaaggaagtgctcatttaggtcggtggcgtttgccgactgaagctttcaatgaaattgtctacccatgtccttcgctgacagaacaaattcatatcgcctctttcctcgatcacgaaaccgcaaaaatcgataacctgatcgagaagcaacaacaactgattgaactgctgaaggaaaaacgtcaggcagtgattagccatgccgtcaccaaagggctaaaccctaatgtgccgatgaaaaattctggtgttgagtggttgggggaagtgccggaacactggaaaattaagcgttgtaaaaatctttttaactttgtgacaagcggatctcgtggttgggctgggttttattctgatgagggggatttattctttagaattgcaaatcttacacgagatagtattaaccctaaacttgattcaatccaatatgtcacccctcccaaaggaagtgagggagaacgctcaaaaattaaagaaaacgatttattaatttcgattaccgctgacttaggttctgtttgtgcagcagatggatcaatttctggaggatatgttagtcagcatgtttcactatgtagacctggtagattagtcgcatcttcgcgttggttagcttattttgtgctctcagacactgcgaaagaacaactccaaggcgctggctacggaggtactaaagttcaattaagcttagaggatattcgagacctttttgttgcttatccacccaaaagtgaacagataaaaatagcatcttatttagatgagagattatctgatttagatggtttggatcatcgtgcgcacaatttaatagaacttttaagggaacgccgcaccgccctgatctccgccgccgtcaccggaaaaatcgacgttcgcgactgggttgcccccgacacgcagaacgttgaggagccacaggaggccaccgcatga

SEQ ID NO: 99591 - DNA, 228 bp, Enterobacter aerogenes
atgatttataaagatttttaccatttaatgttggagtctttttcccaaccagttgagcttttcaccgagtcaaggaatgtaccttttactctctatgttgaagaacaaaaactatttgttcgaaatggaaagataataccagccgtattggccccaaagaagtcgcagcatttgttgagcggtttgaagaaaatgaaagcttggctgctaaagactatcaggatgtga

SEQ ID NO: 99592 - DNA, 888 bp, Enterobacter aerogenes
atggcgcttacagatctcgcaatccggcatgccaggccgcttggcaaggcatacaggctctctgactgtcacggtctttacattcaggttaaccccagcggatccaaactgtggtatctgaaatttcgctttggaaacaaagagaaccgtatggcattaggcccttatccgcttatttctctcgcactggcaagagagaagcaagcggatataagaaggcttattttagaaggcattaatccggcggaaaaacgcagagaggaaaagcggggtggagagcccctttatacgttcgagtccgtggcgcgcgaatgggtctccagcaacgtgaactggtcggcagaacataagaagcgggtgctgcgttatttcgaactttacgtctttcccacgaacggcagttgtgacatcactaagatgaaggtcaaagacttgctggtacctatcaaagaggtggagaaagcaggcaaactggatgttgcttcccggcttcagcagcgcactgcctgcgtgatgcgctacgccgtccagaacggcattatcgatcataaccccgcatcggatttaaccggcgctgtctccacgcccaaagtacgtcaccaccctgcattggatctgaatcttatccctgatttcctggaaagagtcgacgacttcaaaggccgtcaactgactcaactggcggtaaagctggcgctgttgctgtttattcgctccagcgaactgcgctttgcccgctgggatgaaattgacctgcataacgccatgtggaccattcccgccgagcgagaaccgatccccggcgttaagtactctgcgcgcggtgcagcagttcgatggcctgtagcgcgctggtggagtcaggcctgtggtcaagcgacgcggtag

SEQ ID NO: 99593 - DNA, 1233 bp, Enterobacter aerogenes
atgtcaggcaagagagatcaatacttaacgttagatcctagcggagtgtggtatgtacgtatcaccataccggattatatgaaacacctattcaccggaaaacgttatttcgtgaggagtacaggcacacgagatattagagaggctcgtctctttcgtgatgctgtttctgtagagtgggtgcggctacgtgaggacgtgaagccaaagaaacaaagccgtatagagcaagccttagcagagctacgcctaacacgttctacagctaaggagatgccagttattattaccactcctcgcaatctacctaccgcttgcccttcccttttggcaatgctggatctgtatgtgcaggagtacgggaagaagcggagcgcaaccactatttcaaaggctgaaaaatccgtttcattactcttggaacacctgaaaaagaaagatgttcaattgaacgtagtacatcgcactattgttactggctggctggatttgcagaagaaagagaaatcactgagcaccattcagaattatgtttcatctctggctactatctgggatatggcaaagaatcgctatcacgatgcaccacaggacaatccctggaggggacataagctggaagccaaatccagcaaggaaagctatgaagtgtttgggcctggagaattggcgaaagtattcgcggtaatgaatggtgatgatgaaatgcaaaatgtaacgctgatcggaatgtacagcggcatgaggttaaatgagatttgctctttacgtattgaaaatattagagaaatagaaggtgttttgtgtttcgaagttaccgaaggtaaaacaaaatcagcgtccaggatcataccagtccacagcatgataatggatatggtgaaagggcttgtacaaaagcctcataacggctttctgttttacagagcgtcaatcattgaccgtgcagacggaaagcgttctacatggcattcacagcgatttacacgggccaagcgtaaggcattgggagaacagggaactgaaaggaaagttttccacagcctacgccaccaggccgcgcaaattttggatagaaatcaagttgttgaggacaggatagcccttctgctcggtcatgagcgcggctctacagaaagtttcaaaacatacagcaagaatgcagcctctccggtggagcttagacaatatatcgagttgatacgctatccagaaatagaaaaaggggcgtaa

SEQ ID NO: 99594 - DNA, 1806 bp, Enterobacter aerogenes
atgagtggaacacagattaccgccagtacactggtaaataaaatagtttaccgaacagatttaaatagtctgaaaaaagtcagaaacgatatgaggaagctccaaaaagagttttctaaatcgcatagtcaagtagcaaaggccaaacaggcagcagataaacaagtatatcaagcacagattaaacaacagcgtgatattgataaacaacagaaacaagctgctgtagatgctaaagcaaaagctaatgaacagaagaaattagcggcagcgcaagctcgtgctttgaaaattcaacagcagcagcaagccaaaacagccaaaatcagcgagaatgctgatttagcaagaaaacgtgctgcctttcagcttggacgcctccagggaattgatggagcctccagatatcaggcaataaaacaagctaatgccattgtagatgcctatgcacgtggaaattctagcctcaaagcaatgaaccaggctctgagtcaacatcttgttacccaacgtagtattgccagaaataattcaaaacaagctaaacaatcaggcaaaaaatcaaaggctggtcggtctggcagttctggttggttatctcaaaacgttaacgctattgttccacagcaattattatcaggagcagcaggtgtatatttgggacaacaaatgtacgccatttcctcacaggcaatatccgattcactcgccagaaaccagggacggaaaatgattagttctatggggctaaatcccctggaagccgatgcagccatccaggaaactcttaaacgaactggttttaatatgagctatgagaaaatctctgacatctctaaagacgtacaggataaaattggtcagttaagtcttggagagtggaaaactgataagaaaacagggcaatcaacatattcaggcggcggtgaaatgtcggactggctgcaaataatggttaatcgtggggggtatacccaacagggggcattaaacactctccaaaatgtgaaaggtccagtggaactagcaaccctcttaaaatcattgcagaaaagcgcgaaattaaccgactctgaattcaccgcgctggctgagaccataaatgatttttcctatctggcaaaatctgtagattcaaatggtcagaatgtcatcgatacaatgaacatgatggtcaataatggacttgcattaaatagtgctcaacagaaaaccattgatggattaaatcaaatggggattgtgtggggcgctattaaggattccggcgctgatcactttacactaggatttgctgaggcgatgaaagaggccaatttaaattctgataatctggctaaatcattctcgggtttaaaccctctgatggaaaatctaggtcaatctgctggcgaactctcaagagtatttctggattttgcaaacaaaattggtttaaacgttgggaagggtcaaacgttaccggatgctgtttataataccgtggttgatagcagtgcgaatagtgccgctgactggatacaaaatatgattggttttgatcctcgcagtgttgggcgcttttttggttctgattcctcgtatgcaaatcaggtacaaagtggaacgttaatgaatcaaattatgccagcaagcccagctatgcagtatcaacctgttatcccagatctaaaagcagattttaaccttactgtgaatccgtctcctgaatttggaatgatggtagaggcagtcgcggatcaaagaattgagtgggcattcgatgaccagaatttccaaataaatcaaagtattttaggggaatga

SEQ ID NO: 99595 - DNA, 234 bp, Enterobacter aerogenes
atggcaaaaattctaatcattgatgatgcgggcaatcatcacattattaccgacatcacggacaacgatttaccatatttatttcaggttaaacgactagcagaaaaatacaaaatcacctctcaaacgttggcagcacgttgttgcaaattttatgaagatggtgaggagcgtggttatcgctcattagtaactgcactaacggaaccagttagaaaatataataagaaatga

SEQ ID NO: 99596 - DNA, 210 bp, Enterobacter aerogenes
atggttacaatcacaaaaggcgtccaaacatttgacgggaaaatccccgttacactgttagttgatgacgtcgaaacagctaacgagttaattaaactcgctaaagctgcaaatgttcctgtagtagaacaggacgaagatattacaaaatctacaatcaatccagtattcaaacatctggataagattgcatccagtactaataaataa

SEQ ID NO: 99597 - DNA, 1581 bp, Enterobacter aerogenes
atgagttcacgcccaggagagcacaatattcctctggcaaatatcccgaggttaccgaacagtcagcaacagggtttccctgtgaacagctttccacccgtcttacgaaataccatcaccgcgttacacgaagacacaggtatccctcctgaattaattggcaatgttgtactggctgctgcatcgcttgcctgtcagtcacatattcatgtcatccctccatattctgacaccgctgaacaatgctcgctttatctcctgacgattgctgaatccggtgaaggtaaaaccactatcaataagcaggtcatgaaaccgttttatgagttttcggcaagaatgaaacgggaattcgagacgcagctagtggcttacaagcgggaccacaatatctggaaaataaaacaacaggccctcaacagcaatctgcgacaggccattaaaaagaattactccggtgagaacgaagcaaaggcaatagaagaacatgctgaaacagagcctgaacgtcctctccgtccggatttcatttatgaagatgtatctctgaaagctttggtggaaggtcttggtgaatgccctgaggcgggatttattacagatgaagccattactttttttaaaagctacctgaagaacaatccaggcttgctgaataaagcctgggatggcgaggcttttgattttcgccgtgcggatggtgagatttataatattgtcccctgtctgactttttctctgatggcccagcctggtgtctttatggcttatattagaaagtatagtgatgttgccagaaacagcggttttctgtcccggtttcttttttcatgggttaacagcacactgggtaaccggggtgaaaataccagccatgacttaaccaatgcatcactggcacatctgcatacaagaatcaatgaattactggaaatgcagagagcccgctttaaccacaaggatattgttaaaaaacggcttccgctcaatgaggaagctaaagcattctggcgcaaacagtggtccgaaacagaaagaagaatggcgaccggcaatgaatgggagcacattcgtgatatcgctgcaaaatcaggagcgaatacgctccgtatcgccgcgatactgacattttttaataacagcgatgcagagaccattgataaaaaaacaatggaacaagcctttaccatcatggactggtacatccgacaggccagtcagttattttatcccatgtcagaacgttatcagtttgaacaggatgtccgggaacttcatcagtggttaaaacaccgttttgaccagtataatggttgtgcatttcccaaaaatgaagttgagaaatacggccccagccgactgagacgcacggaaaaactgaatcccgtcctgaatcaactcatcggtcagagaatgcttaccatcatcaaaatgcaacctcatggggcactgtatctctcgtacctgaccaccgacggttattatgttgtaccggagaatatacaaccctgcagtccagtcattatggtccagagcgccgataatactcaaaaccccgcgttcattgttgacctgtattaa

SEQ ID NO: 99598 - DNA, 219 bp, Enterobacter aerogenes
atgacaactgctaacagtaataccagtttgttgagcgataaaatggtagatatggtctttataactgaatttaccggattgagtgataaatggttctacaaattaattcaggaaggacagtttccaaagccgattaaaatggggcgtagttcccgctggcttaaaagcgaaattgagtcatgggttcagcaacgtattactgattcccgtagtgaataa

SEQ ID NO: 99599 - DNA, 615 bp, Enterobacter aerogenes
atgtctttcaatatcagtagttacggtcatttaaaccgtaatgcagtgctacgcatagaagaaaccctcaacagggcattacaggaatatccacgtacactagtgctaagagtcgatctccgccttcctgatttcaatcagtacgattctacgttaatgacccgttttatcgtatccctgaaaacacaggtcaatgctgatttacacagaaggaaaaaatcaggtagtcgtgtacatccctgccacgttcgccatatatgggctcgtgaaacggggttgtcaggccgcaaacattatcacgttgccttgttcttcaaccatgacagctattgtggtccaggacgttatagtcctgaaggtgagagatatcgccataacctggcattgatgataatggaagcctgggtcagggctttacggctggaacactttaatcattatcagcagtattattccctggtggaatttaccgctaagccttatcacactttaaatatcaaaaaaccgtattttgagactgactatcaggaggtaaaagaacgtctgttatacctggcaaaagaattcagcaaaagcagtgatggttttcgaaactttggttacagccagagctaa

SEQ ID NO: 99600 - DNA, 276 bp, Enterobacter aerogenes
atgtacatcccccaaaaggcgcgcttcgcacagttacttccaggcatcctgctttcggcattcatactcagcggctgtggcgataaaaatgaacgtgaatttatcagtggctgcaaatcaggtggtggaaccaccgccatctgcggctgtatttacgatgaccttaaaacgaaatacacacacggagaactggagaaaatgaaccagcggcctggtgatgtcccaccagactttatgaacaacatgctgaatgctgccagacagtgcaaaaaataa

SEQ ID NO: 99601 - DNA, 312 bp, Enterobacter aerogenes
atggctctcattattaagtacttcattattgctttcagtattgcgctgactgttgtgctgtttaacgttttcagcgccaccggtgaaattcgcagttttggccagggtatgggctatctgttctggatgacgctgggtcccggagccgggatgtccatcggcgcggccctgcgccagtggctgatgccggatgcggtatacaccagcgaaggcatgacaggtcttatgaaagcccgcctgttctggctggtcgggccgcagagcatcggctggctggccggcctgatgatggtgggaaaacaactgatgtaa

SEQ ID NO: 99602 - DNA, 468 bp, Enterobacter aerogenes
atgaatatgaagaaaacagggctgatggctctcagcctggttgcattgctccccgtcacttcacatgctttcggtaaccccgacacctggacccggggctggggtcagggggtatcggaatttgtcatcaccggaaaagggcagtcacagctgctgttgtcctgtgaggatgagggcacccgggcagccaccatcaccctgaccgatgcaagtggatgtcaggtcagtatggatacggatactgcaatgcaggtaaaaatcgaccagcaggaggccgtcgatatcagtgagtcaggtagccgggtgggtgagaacaatctcgatttttcctggggccagttgcgccagggtaaacaggtgacagtctccggaaccggtgttacctccaccaccttcgcgctgaagggtgctcgcgaggtactgcctgaatttggtacccacggctgtgtctcaaaagcttcactctga

SEQ ID NO: 99603 - DNA, 357 bp, Enterobacter aerogenes
gtgaaaatatcgacatgcctgatggccttttcgctcgcgttgtccacaccggcattagccgcaaagccactgccggtaaaagtagaaaccagcaatcttgtccatcctgccgggacccgctacacaaaagtggtggtgaccgcgctcgatgacagcgtgaaagtgcaaaatattaacgtgaaccggggcaactgccggataaacaactacaaatcaccgttttcgacgaaagaaaccattttacctgccctgttgcactatggtcagtccgtcagtgtgagcttttacaatgactgtgtcgcttcagaggtggttgtcaccacagataaaggtgcatggcgctacacctaccactaa

SEQ ID NO: 99604 - DNA, 213 bp, Enterobacter aerogenes
atgacctttcttaaaatgctggtgaccgccctgggtcaggctctggcctggtgcggcggacatcaggccagactgtatattgaaacctgttttcgtcaggccggctacgatgatgatcgtatcgatgtggccagagaggcagtgacactactggttagcgcgctgataactgcgctgatggcacaaatactgcgtctccttgcccccttctga

SEQ ID NO: 99605 - DNA, 819 bp, Enterobacter aerogenes
atgaaacttgccagtcgttttggacgcattaaccagatacgccgggaccgtccattaacccgcgatgaactcatgcagtatgtccccagcgtcttcagcaaagacaaacacgattcccgcagcgaaaggtacgcctgcattcccaccattacgctgctgcaaaacctgcagcgtgaaggctttgaacctttctttgcctgtcagtcacgtgttcgtgaccagagccgtcgggagcacaccaaacacctgttacgtcttcgtcgggcgggacacatcacggggcagcaggtaccggagattattttacttaactcgcacgatggcagcagctcataccagatgttacctggctacttccgaagcgtctgtaccaattcactcgtctgcgggcagtcactgggtgaagtccgggttccacaccgcggtgatgttgttggaaaggtgatagcgggtgcttatgaagtactcggtgtttttgaccgggtggaggaaaaacgtgatgccatgcagtcactgcttttacccccgccggcacaacaggcatttgcgaaagcggcacttaactaccgatttggcgaagagcaccaacccgtcactgcatcccaggcactgagtgcccgacgctggcaggatgagagcagtgacctgtggactatctacaaccgcctgcaggagaacctgattaaaggtgggctaccgggccggacaacgaatggtaaccgtgctcacacccgtgcagtcaaaggtatcgacggcgacgtgaagctgaaccgtgccctgtgggtcatggcggaaagcctgctggagagtctgaagtaa

SEQ ID NO: 99606 - DNA, 480 bp, Enterobacter aerogenes
atgaacaacacactcaaacaaacccgttccgtggcgggttcgctcacctcaccacaaagtgatacagacggtatcgtgtgcacccccgtccccgatgaacaacgtatcgtcttctggccacagcattttggcaatatcccgcagtggataacccttgaaccacatatcttcacgtggatggagcgcttctgcgaagactacaccggcggcatctggcagttttacacactgagtaacggtggggcgtttatggtgccagaaactgatgacaacgatgaaaaatggatgttgtttaacagcatgaacggcaacagtgcggagatgagcgcagacgctgccgggatggcggtctgcctcatcgcatacagccaccacgcctgccgtaccgaatgcaatgccatgacagaacactactaccgtctgcgggactatgcactcgtgcatgctgaatgccacgccattctgcgcattattgactga

SEQ ID NO: 99607 - DNA, 480 bp, Enterobacter aerogenes
atggaacaactactcccgctgtttgcccgtgaattatcttccaccgaccagcaaaccatccgggcagccttaaccctgctggctcaacagttacgtgaacccggggcgtcatttacctccagtcacgccgtccgtgactggctgcgtctgcagctggccacactggagcgtgaagaattcatcgcgctcttcctcgataaccagcaccggctgattgcgtacgaaacccttttcaccggcaccatcaaccatacgcaggttcattcgcgagaagtggtgaaggcggcactgaaacataacgctgccgccatgctcgtggcgcactgccacccttcgggacaggctgaccccagcgctgccgacagacaggtcacagaacgtctcagacaggcactggacctggtggatatccgccttctagaccatctggtcgttggcggtatggagatcgtctcactcgctgaacgcggctggttataa

SEQ ID NO: 99608 - DNA, 222 bp, Enterobacter aerogenes
atgaaaattatcagtaaacgtcaggcgatggcgatttatcgccagcatccgcagtcccggttgtttcgcttctgtaccgggaaatacacatggtccggcagcatctgccactatgccggacgagaagttcaggatatcagcggcgtactggctgtattcgctgaacgccgtcaggaccgccacggcccttatgtcgtattgcgcagcgtcacgctgaattaa

SEQ ID NO: 99609 - DNA, 363 bp, Enterobacter aerogenes
atgcagaacacgacaactgcagcaaaccatgatattgccgaaccctggtggggccttaagcctactgttatgccgtgctttggcgcacgactggtacaggaaggtaaccagctttactacctcgccgaccgtgccagtttcaccggtcagttctgtgatgcggatttacaccaccttgaccaggcgtttccgctgatactcagacaactggagttaatgctggtttccggggaactcaatccacgccatcagcactgcgttacgctgtatgcgaaaagactgacctgcgaggccgattcactcggctcgcatggctacatctatatcgcgatttacccgagcccctctgaagcaaccgcgtag

SEQ ID NO: 99610 - DNA, 381 bp, Enterobacter aerogenes
atgcaaaccttacccgccaacacgacacggaaggcaccgtcacgtccgacacccgttgaaatctggcagcaacttcttacgtatcttctggagcagcattacggcctttcacttcacgacacacccttttcccgggagcaggtgatcaggcaacatattgatggcggtatatcactggcagatgccatcaattttctcgtagaaaaatatgaactggtacgaattgatcgtccggatttatccatgcaacctcagtcacattttatcgggatgattgatattctccgggctaggcgggcaacagggttgatgcaacgcaacggctataaacggatcactcttctcatcgcgggaaatgcagatcaggagcaacacttatga

SEQ ID NO: 99611 - DNA, 492 bp, Enterobacter aerogenes
atgaaactatccctgacggtggaagctgataccgttaatgtactggctcttaatgggggccggatcgccgtggatatcgacggtattgaactggcagaactgattgatgtggtctgtgacaacggctgtacattacgcgtgactgacacaccaggggaaccgggagttgaaaacccattcccgtctgcctcccggctgaacggcatacagtgcagcatcacccatatcacccgtgaagataacgccattctggacctggtctctcttcagcatcacgggggcgctaacagcgactggatattgtacaccagctacggctacctgctcagactgaatgcccgtcgtcatccggtactggagctcaggcgaatgggattatcaaaaacctgtcggtggttagtggcgaccctcatacactgtggctacaccgatatcatccatcttgatgcctccggagaacgcctgcctggtttcgccacttttaactggtag

SEQ ID NO: 99612 - DNA, 159 bp, Enterobacter aerogenes
atggtatccttttcaaacgctcatgacactcagcacgattccgtcaatggtcagcgacccgtaccgtcgaaacctattcaaatggacgcaaaaatttctgttcaattttccattttaccttactgcaaacaggggccttactgggggcataaagattaa

SEQ ID NO: 99613 - DNA, 447 bp, Enterobacter aerogenes
atgcttagtaagaaaaatcgggttgatgagcaaccgtcgacattggtatttgctgaacaacgaaaaactttaaaaggtctctttatgtcagatgctcttacacagttaaacaatatccgtaccttacgttctcagactcgtgaaatgtcattagatgtactggaagatgttctggaaaagtttaaaattattcttatagaacgacgagaagaagagacattacgtcttgcaaatgaaagtcagcgccgcgataaactggaatcacttcgtcagatgatgcttgatgagggtatcgacccatccgaacttatggctgttgttggctctccgggtaagattaaaaggacgcgctccccccacccgcgaagtatcgatatactgacgaaactggagagtcaaaaacatggtcaggtcaggggcgaatgccgaagcggatctcaaatctga

SEQ ID NO: 99614 - DNA, 261 bp, Enterobacter aerogenes
atgccgaacaggctgcgcttctgccgggccaataacttggtgctgagcatgagctggtatggcagctgctgggataatgcggtggccgaatcgttcttcagttcgctgaaaaaagaacggatcagaaaacgcatatataaaaccagggatctggcccgggcggatatcttcgattacattgaagtgttctacaactgggcccggcgccacagtcatctcagcggcgtcagtccggaggccttcgaacaggcttcgttgtga

SEQ ID NO: 99615 - DNA, 474 bp, Enterobacter aerogenes
ttgagaacagtagaattacgtctggctgaatggagcgaaattgactttgataatcgtatctgggaaatcccaaaaactagaatgaaaatgaaacgtcctcatgtaatcccgttatcaactcaatccttgagcgctcttcgtcaattggaagaactaacaggaacctaccagcttatttttgcaggacgaaacgatgttaacaaagcgatgagtgaagctagcatcaatatggttataaaaagagttggctacgataagagagcgactggtcatggtttccggcacaccatgagtaccattttgcatgagcaggggtttaacaccgcatggattgaaatgcagcttgcacatgtggataaaaactcgattcgtggaacgtacaatcatgcgcaatatctggatggaagacgagaaatgatgcagtggtacgctgattatattgataggctggaaggtacaaatacctcagtataa

SEQ ID NO: 99616 - DNA, 159 bp, Enterobacter aerogenes
atgaagaagcgtttttccgaagaacagatcatcagtattctccgagaggccgaagccggggtttctgcccgtgagctctgccgcaagcacgccatttccgacgccaccttttacacctggcgtaagaagtatggcactataggatgttcagggtgttaa

SEQ ID NO: 99617 - DNA, 2040 bp, Enterobacter aerogenes
atgactattcagatgaataacaaaggaatttgtattgctctggcagaacaaatgatggctgccgggcctcagttaaagagactggaaagtattttcagcaatcgagtccttcaacaaaaggattctcttccctttgatttctgcgagggaaggttggtcgatcctttgaatcatatacctcagcagataggaatatggtccccggtctttgagggtaccaacctgaaatactataagcgtaataaagaactgtttaaccggttcggcggaaatgatgcatcatggtcggaaacagaaatgttatatctggcaaatccaaataagaaaacgattatctacatgggagaatctgtagctcgtggttttgtatttgatcccgttgtaacacctgcaaaattattaaaagataaaattgcagaccatgattatgaaattgttgatttggcttgtaccggaatgaatgcttctgctttacttcaaaccgtacaggaagcacttgagcttcatccggatatgattgtcattcatgctggtaataactggtggaattcctggtggggaaatccgtcagcagaggtcacgacctcattaataggcttagatagccttcagattaaagatgttattactcaacaggttaagctttatatcacgtttattctgcaatcaatcgttaacctttgtaagaaaactgaagttaaattatatttcgttttacctgaatttaactacgctggctggcaaaatgaatttgctataccggcatggttagacgaccagacatcagcatgttggttggaacatgtacaaaacgctaataatttattcgccctacaaaaattccctgaaatgcaagccgaatgtaataaggctttggtactggataacgaaacaagtcccttatcattagagctaatggctaaagcagaagaaggtttaggtaataccgtcattgctaaagaatattatattaaagcaaaaaatgccgtggtctggcagtacacaactcatactccacgctgcccaagttttattgaagatttaattcgcgagataataggacaaaatcctgattgtgagctcattgacctaccggaaatattttatcaacgctccggtaaaattataccagataaaacactttttgttgattacgtacatcatagcctgaagggtatggactgggtaagcgatgcgctagcctctgccattaccaaaaaaaataccattatcaatctttctgaggtttatgataaagattgtgcaggtagctatttactggcagcactccataatgctaattatggtcaacaagaggatgttattgaatattggctgaataaaaccctggaaatgagaaaacttacatcatcaagctcaaatgagttatcttttattactaagcattactcagccgatcaaaaattacacaaagaaatgtacacatcagccaacgcatcaataaataaatttctgcgtgcttttcacattagcgaccattcagggataagattatatgagctcatcaaaaaatatcatcctgaacaacttgaaatcaatgaaaaaaaccttccctctgagaagagcgatgttattgtcataaacagtagaaatcaccatattttccggtgttaccctgaacgctacgcagtttttactgcaatgacatatcaaaataagcttttgatgaatgaggtaaatccctattcatttttttgcgtaaaatctctgccttctggcgaatatgaggtcactatctgtatcagatcgacgtcatcagagcatagtcaaagtgcgactatctctattaatggaaagaatacaagcgctaatttaagctcagaatggcataatttcattttttcgacatcccttaatgaagggcaggatattaacatcagtattatgtggccaatcatctcaggttcctgtgattatcacagagaattacttgcaaaagatatgattgaaggtaataggcagttaccagtaatgcgaattaccggagttattggacaaattatcattagaagtatttga

SEQ ID NO: 99618 - DNA, 366 bp, Enterobacter aerogenes
ttggcattagcgagaaacactgtttttgaggaaacaacagagatcggatttaacaatcaaacgaagaaatttaaaaaaccaaaaaagttaaaaccattagccataatcaaactctacgaagaatccccatcactgacaccagacgaacaagaaataattaactctatggatggtgtaacttggaaacctcgccaaaagtacatcggttttaaattcaatcgtgagccgctccagtgggaggcgttggggtttatatctgaacatcactatagccactggctctatttccaacaactgtccaacgaacagtatcagggatatgatgtcgattttatggatgttgggaacaacagcatcaccgactaa

SEQ ID NO: 99619 - DNA, 279 bp, Enterobacter aerogenes
atgattgattttgaacaacacaaaaatattgtagaagacttcgttgaacagcattacccgctggcgcatagtctgatgttggatagctataaagatgcaggggtttattattcaaactaccaaatgttgctggaggcgatgaataatctccccgagcatccagattattttcttgaatggttggtagaagatgacgcagctttgtatataaatctgatggagttagttgtcatcaccagaaccattgataacgtgtttgaacaagtctcgcctgcatag

SEQ ID NO: 99620 - DNA, 264 bp, Enterobacter aerogenes
ttgccgaacccgcagcacatcgccatcaagccagatatacgcggcgccgatacgctgatcgttctgattatcgcggctgccttcaagatgaataaacagaggaatgctcatgccgtcctgcaaagcctggctgaaagcctgcgggataatcacgccgccgatttgctgcacgcgctcggcggccatgctgtcgctataaggcgccagcaaaagaaccatgccggaggcaagcagcgcgttcagtccaggggtgatccgtcgtaa

SEQ ID NO: 99621 - DNA, 573 bp, Enterobacter aerogenes
atgaaaaaaatgttaataacagatagctctttctatcaaattgcaatacaaaccatcgttaccgaaagttatctaattgatttcaaattcgaatttaaaaaaataaaaacatcaaaactaactaatcgtgattgtatcattctatatatagcagatcctggaactttattcagtgtgtatgcatatttttctcgcagcacggcggcaaatattattgttgcattggattttgatctgaaacgacctttagttcaagtaaacaacacatattttttgtcatctaatgtaaattacctcatgcttgataaaataataaccaacaaaacaaaatataaactccaaaaaaaactcacacctaaggaggaatcaattttaaaactaattctcgatggctataactgcgaggatattgcaaagaagatgaatttaagcatcaaaacaatttcgttacataaaactaacgcaaaaatgaaaactggaattttaaaaaacaatgattttacatctttttcattgttcaagatcctgctttccgaacaaaccccccccctccctcctaaagcatttcattaa

SEQ ID NO: 99622 - DNA, 555 bp, Enterobacter aerogenes
gtgctcaacaacaacaaaagtgcgcgtctgtatcgggtgtcggtggtgggcatcgaccgacccggcggccatgaggttcgtactcgccaggcggatggcgaactgctatttgctccacgccagctcacgctgcaggcgggcgaaagcgaatattttaagttctattaccatgggccgaaggataatcgtgagcgctactatcgggtctcgtttcgtgaaattcccacgcgcaacctggtaatgcgcgccccggcgggcgggcagatcagcatggagccggtggtggtgatggataccattctggtggcgcgaccgcgacaggttcagttcaaatgggcgttcgataaaacggcgggaagcgtcagtaataccggcaatacctggtttaagttgttgatcaaaccgggatgcgacaccacggaaggggagggtgacgcctggtatctgcgccccggcgatgtcgttcgccagtcgtcgctgcgtaagcccggtaaccactacatcatctataacgaaaaatttattaaactcaacaaagattgtcagggtaaataa

SEQ ID NO: 99623 - DNA, 570 bp, Enterobacter aerogenes
atgataaagcatatccgtattttgcccggcgggctggcggtgctggccgccgtttttctctgcctgctgacggcctgtcgtgaccacagtcgcgacggcatgagcggcgctgacatcacccttttaaaccatggtccggacgccatcgtttcggtgcaggtgaacgggtacgggggaccaagggccaattcctacggcggcggcggcggcttctgctgtgtgatggtgccagatgtctggcgcccgggtctgacggcaaaaatcacctggacctccgatcctaacgcatggatagacccgaaacatatcccagacgatcatgcgagtcattatcagcgtcatggaccgatcaccgtccccattgaacgctgggagaagggacaggcctgtggctttgaagtgcatattttcccgtgcgacaaggtaagaattgttcgttcttgtcgcgatcgctcatctccggaatatccgatacatcgtgcgcccgatgaggatgaaaaggcgaaaaaaatattattcgaccatgttaaggagaatatcgtatgtccgacgccgcagactccacgctga

SEQ ID NO: 99624 - DNA, 252 bp, Enterobacter aerogenes
atgtccgacgccgcagactccacgctgaatgccctgaaggcgcttattgccgcctttcagaccggcgccaccccggtcgcggtcaaaacctccaccgcagaagcggccagcctaccgccaaagtttcccgggccggatgataaaaaggggaaaacgtcagcggataactccacgcagcagaaaaccgaatacaacgagcgcgggcgcctgccggcgagcagaacgcagactgaaggaaactatgcctcttag

SEQ ID NO: 99625 - DNA, 549 bp, Enterobacter aerogenes
ttgcccggcgggctggcggtgctggccgccgttttgctctgcttgctgacggcctgtcgcgaccacagtcgcgacggcatgagcggcgctgatataaatctctataaccatggcccggacgccattgtctcggtacaggtgaatggctacggcgggccaagggcgaattcctacggcggcggcggcggcttctgctgcgtgatggtgccagatgtctggcgaccgggcctgacggcaaaaatcacctggacctccgaccctaactcctggatgaaatccagcaatatgcctgacaattattcgcaatactatcagcgccatggaccaattaccgtgccgattgagcgctgggaggaggatcaggcctgcggtttcgacgtgcatattttcccctgcgataaggtgcggatagtccgttcctgctacggtcgtgcagcctctgaatatccgataccccctgagcctgacggaaataaaaaagcacaaaatatactttataaccacattaaggagaatatcgtatgtccgacgccgcagactccacgctga

SEQ ID NO: 99626 - DNA, 570 bp, Enterobacter aerogenes
atgataaagcatatccgtattttgcccggcgggctggcggtgctggccgccgtttttctctgcctgctgacggcctgtcgtgaccacagtcgcgacggcatgagcggcgctgacatcacccttttaaaccatggtccggacgccatcgtttcggtgcaggtgaacggctacgggggaccaagggccaattcctacggcggcggcggcggcttctgctgtgtgatggtgccagatgtctggcgcccgggtctgacggcaaaaatcacctggacctccgatcctaacgcatggatagacccgaaacatatcccagacgatcatgcgagtcattatcagcgtcatggaccgatcaccgtccccattgaacgctgggagaagggacaggcctgtggctttgaagtgcatattttcccgtgcgacaaggtaagaattgttcgttcttgtcgcgatcgctcatctccggaatatccgatacatcgtgcgcccgatgaggatgaaaaggcgaaaaaaatattattcgaccatgttaaggagaatatcgtatgtccgacaccgcagactccacgctga

SEQ ID NO: 99627 - DNA, 288 bp, Enterobacter aerogenes
atggtcaccgtctccgggcgcatccgcgccgaagacggcacgctgctggcgaacgcgcgcattaataaccatatcggacgcacccgcaccgatgaaaacggtgagtttgtcatggatgtcgataaaaaatatcccaccatcgattttagctacggcagaaataaaacctgtgaagtggcgctggagctcagtcaggcacgtggcgcggtgtgggtaggggacgtagtatgcagcggtctctcttcatgggcggcggtacaacagacaggaaaagttaatgagagttaa

SEQ ID NO: 99628 - DNA, 153 bp, Enterobacter aerogenes
atgcgcccgttaaccttagcgctgagcttgccgtcgtcttccagcccggtattgaagatcaccccggcgttgccatcggttcgcccgctggcggcgatatttttcccctgccagccgacgctgccgctggcggtcaggttggtgttcacgtag

SEQ ID NO: 99629 - DNA, 360 bp, Enterobacter aerogenes
gtgaccggtccggcacaggcgattagcgggcgctcgtattgcctgttcagctcggcggacggtaccgcgcaggtgccgtttccggcgtcgctctctttcattacccaaagcggggcgacgaaaagttacgatgccggctgcgacgatagctggcacgacatgaccgatgcgctatggctgaccacgccgtggactgatatttccggcgatgtggggcagatggataaaacaacggtgcgcttctcgattgctatggacgatcctatctcgctgcgcaccatcaccgacaacggctggtttggcgaggtcagcgcttcaggagagattcatgtccaggcgacgtggcgtaacattaattaa

SEQ ID NO: 99630 - DNA, 537 bp, Enterobacter aerogenes
atgctaagaatattaatatttctttcagtcagtatactctgttttccatatgctgcgaaagcatcgatggaggttggtgtttgtacgcacttcagtcgttatccaaatgctccttcattctatcttaagctattaaaagaatatggattcacctcgtttcgaggggattatggttggggcggtattgaagagagccccaaaaaatattcggttagcaaacgtctgcaaaagtccgatctggcttttatgaatgctcctgagtatggtctttcaggaatgctaattttagcttatggaaataagttttacgactcagggggataccctgtttctgaggacggtattagagcatttgctaactatgcagcatggactgcgacacgatttaaagggaaggttaaatattatgaaatatggaatgaatggactaatggcactggtgtaacaaatcaacgtaatattattccttctgctgaggattattttaagttggttaaattcaccagtattgctgtcaaacaagcagatcccggttaa

SEQ ID NO: 99631 - DNA, 141 bp, Enterobacter aerogenes
atgtcgattatagtgcagccccgtttcagcgtcaaaatactggccctgaaaacgcagcgggttgctgatacgatcggcgtagacctcccctttctctccccatacgcccgtcttctcagaccacactatctcgccctgtaa

SEQ ID NO: 99632 - DNA, 228 bp, Enterobacter aerogenes
gtgccgccgatcgcccggttatcggcatcgctgcggcgcagcttatcgccgataacggtcttctcctggttaatccacaacgagctaaagccgccgggtaaggtggcgctgacgctgccgatgctgctccaggagctgtcgctggccagcatgttttgcaggttaagattcaccgcctcggttagcggcagcgtaatgcgcgtttcgccgacggcgttgctatcgtag

SEQ ID NO: 99633 - DNA, 273 bp, Enterobacter aerogenes
atgctaaaagtgcctagttttgaccacagggcgttcaagttcagcgtgccgccgatcgcccggttgtcggcatcgctgcggcgcagcttatcgccgataacggtcttttcctggttaatccacagcgagctaaagccgccgggtaaggtggcgctgacgctgccaatgctgctccaggagctgtcgctggccagcatgttttgtaggttgatattcaccgcctcggtcagcggcagcgtgatgcgcgtttcgccgacggcattgttatcgtaa

SEQ ID NO: 99634 - DNA, 267 bp, Enterobacter aerogenes
atgcactcacgcacagtgcgcaagtgcattaaaatcttgttcagattacaggttgaaaagcagatctcttattgtgagggagcgtttgctggtggggttgtaggtattcctgcaaaagaaccatgcacctctgacatactgaatatgtcccttgagaagatagaatgcgtaaagcccgccgggcggcgggcttgggattacctgacgaccagcaccgagcactcggcatggcgcaccaccgccgcggcgttagagccgagcagataa

SEQ ID NO: 99635 - DNA, 645 bp, Enterobacter aerogenes
atgccgaagcgcctggattcttatgagaaagccgcgctgcgcaacaccattctgattggccgttccaaaggcgttgccgcctacaccgcgaaagaagcgctggagtggggcaccactggcgcaggtctgcgcgcgaccggtatcggcttcgacgtgcgtaaatggcgtccttattctggctacgaaaacttcgactttgaaatcccgaccggcggcggcgtttccgactgctacacccgcgtgatgctgaaagtggaagagctgcgccagagcctgcgcattctccagcagtgcctcgataatatgccggaaggcccgttcaaagcggatcacccgctgactacgccgccgccgaaagagcgcacgctgcagcacattgagaccctgattacgcacttcctgcaggtttcctggggcccggtgatgccggccaacgaatccttccagatggttgaagcgacgaaggggattaacagttactacctgaccagcgacggcagcaccatgagctaccgtacccgtattcgtaccccgagctatgcgcacctgcagcagatcccggcggcgatccgcggcagcctggtatccgaccttatcgtctatctgggtagtatcgattttgttatgtcagacgtggaccgctaa

SEQ ID NO: 99636 - DNA, 927 bp, Enterobacter aerogenes
atgataaatgcaaatcgtccgatactgaatctcgatctcgatctgctgcggaccttcgtcgccgtcgccgatctgagcaccttcgcggcggccgctgccgcggtatgtcgtacccagtccgccgtcagtcagcagatgcagcgcctggagcaactggtaggcaaagagcttttcgcccgtcatgggcgcaataaattactgaccgagcaggggatccaactgctcagctacgcgcgcaaaatactgcgctttaatgatgaggcctgcatgtcgctgatgtttggcagcctgcaggggacgctgactatcggcgcttccgatgaaacggcggataccatcctgccttacctgctcaaccgaatcggcagcttctatcccaaactgacgctggaaataaaggtcctgagctacgccgatatcgtcgcgaagttgggcagcggcgagatcgacctggcattaacaacgcatcaaaccggcgaatttgacgtcctgacgctgcgtacctcgccgacgctgtggtactgcgccgcggattacgtactggcgcagggtgaatccgttccgctggtgctgctcgaagagtccgggccgtttcgcgaagatatcatctccgcgctgaatgccgcgcaggttccctggcatttggcgcatgccgccagttctttagccggggtgaaagcggcggtgaaagcgggccttggcgtcaccgcacgtccggtagaaatgatgagtccggagttacgggtaccgggtaaaagcgatggcctaccgggcttgcctgatacccactatgtgctgagctgcaatccgcagcgggaaaacgaactggcgcaggcgatttttcagtcgctgagccaggaccataatccgtggaacacggaaacgctgtataccccggaagggggagacagttctctggtttcataa

SEQ ID NO: 99637 - DNA, 669 bp, Enterobacter aerogenes
gtgaaagaacgcggaatgatttttaacagtgagatggttcgcgccattctcgacggtcggaagacgcagacccggcggattgttaaaggggctgacggcgccgtgaagttctgcaaggaatgggacatcaacggagaagaaatttttgttgtgctcggcgaaaaagaccacacaggaatgaatcctgtattgggcgctatctcttgcccgttcggcgcagtcggcgagcgcatctgggtgcgtgaaacatttcgggttcatagccgggctacagacgttgccaccttggtatacaaagccagcatgcgaaattcctggacggatcaaacccaccgcgtgcctgtatcgctctgcaataagccggcaacgcctgagaagtggacgccatcgctacacatgccgcgctgggccagtcgcattctgctggaaattacagacgtgcgggttgagcggttgaacgctatcagccaagaagatgcgcaagctgaaggcatggagcttaccggatggcggccaacatactctgacccagatagtggcggagaggtttggactccatatgacaactttgcgcggctgtgggagtccatctacggcgaaggaagttggaaggtcaacccttgggtgtggattatcgagttcaaacgcgttgaaggcggtgcagcatga

SEQ ID NO: 99638 - DNA, 480 bp, Enterobacter aerogenes
atgaagatctgctcaagatgccatcaacagaaggaagaaagggactttcaaatcagaagagcatccagcgatggattgactgccgcttgccgggcctgcctggctgaatacgacaaagaacgcgctggattgccacatcgagtaacagcaaggagagaatatcaatcatcggaacgcggaagagaacggtgtaacgcagccaaaaatcggttcattcagcgaaacccatggaaaagaaaagcccacatcatcgtgggcaattttttgcgcgatgggaagctaaccaggccgccgcaatgtgagtgctgcggatccgaatgtaaacctcaagcccatcactgcgactacggaaagccaacagatgtgatgtggctctgcaaagcatgtcatgtcgaatggcacaagcataacaagccaatctacccggacgaggcgccggtaactcttcccttccctcgtcacaccattcacgtcatttaa

SEQ ID NO: 99639 - DNA, 474 bp, Enterobacter aerogenes
atgagcagtagaggcgtaaacaaggtaatcatcgttggtcgattaggtcaggatccggaggtgcgctatgcaccttctggtgctgcttttgcaaatatcacagttgccacatccgagcagtggcgtgacaagcaaactggcgaacaaaaagagcagactgaatggcatcgggtagttattagcgggaaattagctgaaatagccggcaaatatctgcgtaaaggttctgaggtctatctggaagggaaactgcgtacaagaaaatggacagatcataacggtgtcgataagtacaccaccgagattcaggttggtattaacggcacaatgcaaatgcttggcggcaagcaagttggaagcgagcagacacaggcaccacgcaataaagggaagccacagagtcaagcgccacagcaacaacctcagcacagtgaacctcctatggattttgacgattcggatattccgttctag

SEQ ID NO: 99640 - DNA, 873 bp, Enterobacter aerogenes
atgaaattcgaaaaagccatgagaaagaaagccaagctacggctggcacttaccgggccaagtggttctggcaagacctacagcgcgttgctggtcgccaaaggtatcggcggcaaggtcgcattcatcgacaccgaaaagggcagcgcttcgctttattccgatatcgctgactttgatgtgcttgaactggatccccccttctctcccgaacgattcattgaagcgattaagtcagctgaggatgccggatacgaaactctgatcctcgacagtatcactcatgaatggggcggagtaggtggatgccttgaactggtcgacacgatcgccaaggccaagtaccgaggcaacagttggtcagcatggagcgagattaatccacgtcaccgccttttcctcgacgcaattttacgttcgccaatgcacatcatcgcaaccatgcgcagtaagactgaaaccgcccaggttgaagagaacggccgtaagaaggtagccaagcttggcatgaagtctgagcagcgcgacggcgtcgaatacgagttcactaccgtgcttgatatcgctcacgaaacgcatcatgcgatcgccagtaaagaccgtaccaagctgttttccaactctgatccggtaatcctgagtgaagacactggcaagcgtcttctggagtggctggaatctggcgttaatcagcacgaagagaatctcaagcagttcgttactgatgctgagaaagcgccggatatggaagcactcaagcagttattcgaggaagcatggcgcacccttcgcggcaccgaatatcaggctaaagcgaaagatatctatgacatcaggaaatcagaactcgaacaagcgggagcagcggcatga

SEQ ID NO: 99641 - DNA, 159 bp, Enterobacter aerogenes
atgatcgctttagaaaaatgggatgatgacgctttcatcaagatgatgcgtgacgcaatccccgaatcaccggttgatgttgacgagccggttaacctgactgcagaacgccataacccggtgaccagcatggaagagttcgcaggtaattttaactaa

SEQ ID NO: 99642 - DNA, 1068 bp, Enterobacter aerogenes
atgatatcggaagttgcgaacgatatggttgatacaaataagaaatatttgatttggaacaataaaggtggtgttggaaaaacgtttctcacctacaatttagctgttgagtatgcaatcgctcatcaagatgaagatgtgatcgttatcgatgcctgccctcaatcgaatgtttccgaaattattttgggcggaaatggtgttggagaagaaaacctaaaccagcttcgtgacagaaatactacgattgccgggtatattaaagagcgctttagtaactccccactttctcgtctgggtaatgagtcttcatattttgtaaaggctgattctgtaaaccccaaaatgcccaaaaatctataccttttgcctggtgatgtggacttggatatttgttcaaggcttatcgcgcatatagggtcatctcctgttaaagaggcttggaaaaaaagtcgttcacttttaatagatcttattgcttcatttgaggctgataaaaccatttccgaaagacctaaaacatttttcattgactgcaatcctagctttgctagttatactgaacttggcgttgttgcatctaatagagtaattattccctgcacagctgacgctgcttcaatccgtggtatcaaaaacttagttaaattgatatatggtgtttcaattgatagcactgaacaagacgaaatgttccttgattttaataaagaagccaagcaaagcaaaatagaattccctaagctccatcttttcgttcaaaaccgttctcgcaccaacgaaagtgacgcagctaaagcattcaagtcacacgctgaagaaataaaaagaatcacaactgaactattaaaaacacatcctcatttatttactgaggaaaatgtagatgaccgagtaaaacacgtaaaagatggtaatacacttgctgcgattattaatcatgaaggctgccctttgagtggtcttcagcacaaaagttacactatttacggcatggcaacgcaagcaaacaaagcccaaattgatgctttagaggctgatgtaaacggtgtcgtcgcctgcatatag

SEQ ID NO: 99643 - DNA, 291 bp, Enterobacter aerogenes
atgagtagcatgcttgacccacagcaatacaataaggacatgcgagaaaagaaaattgatatcatgctcgctgcaatggggccaacgaatgaaaagtcggcttttcttatggctttaatgattaaacactctgaaaatccggtagcaaccatcaacgagattggcgattgcatcaatgcggtctacgctgctggcgagaacaccgacaagtctacgggttcaacattcagcgaaatgaagctcatgtacaacaacgccgtttgcatttaccacaaaattaaagatatttag

SEQ ID NO: 99644 - DNA, 189 bp, Enterobacter aerogenes
atggatatcactcgcctgctggtaatcaccttcacattgtctttggctggctgtgccactcaccaaaattccgatcacgggatgaaggaaacgaaagaatgcatgcaataccgcagtatgatgacggctccattgccgccggcagcaatcgataatttgaaggagaagtgtgaacaatccagaaagtga

SEQ ID NO: 99645 - DNA, 399 bp, Enterobacter aerogenes
atgaaatcattaaccctcttcaatcaaccaatccgtgtcggggaagacggcatgatctgcctcaccgatatgtggaaagccagtggcaaaagtgatgctgaatcgccttaccactatctgcgaaacaagcagaccaaagagtttctggccgagctggagaaaaaccacgaatctgtggttttcactgcccgcggcgtacacggcggtacctatggcgggaagtttgttgcttacgattatgcggcctggttaaaccccgggttcaagtacgcagcttataaagtcctcgatgactacttcaccggagagcttcagcatcgcaacagcttaagtgcccagctcaacatgaagtgttatgagtttgaccagaagaaagatatggcgagcttctgcggataa

SEQ ID NO: 99646 - DNA, 258 bp, Enterobacter aerogenes
atgagtaatcgcgtcatcgaatgcgcctccagagcggggcgcgacttctcagagttcatgaaaggtgagaaaggcatgatggaagcgctggcgtcggtggatcagtttggcgagcaacttcgaatcaacggctgcgttaatcatcactttgtcagctacatgatgcggaactcgatcatgcaggcattcatggacatggctaacgccgagaagatagaagagcgccgccgtaaacgagcggaagcaaaagcgaaatag

SEQ ID NO: 99647 - DNA, 303 bp, Enterobacter aerogenes
gtgttcaaccgctggcttgtcggtgacctcattaaccagggcggtgagtttcacatcaccatgaaggatgttaacgccatcgatgcggcggagtttatagcgcgccagcactccgcgccccgagtaagtcacctgcgtttcagtgccggtttccgtaaccgggtcccagtcacctcgaacggtgtatgttccagtgaaatccttaacagcatcctgcaggtcagtatcgaatgccgcagcgacttcggtttgcagttcgtcacgaattcccattgcacccaccactacgctgctgaggtttaa

SEQ ID NO: 99648 - DNA, 927 bp, Enterobacter aerogenes
atgcaaaatcggcatcacttggagttaacttggcttgaggactgtgttgcgctggcacagtccttgaatttctcccgtgcggcagcttcacgatatgtgacgcagccagcattcagccggaggattgtctcgctggaagagtggcttggaacgccgctttttgaaagaaatcgtcggggcgtcagcctgacgcgcgccggggaagtattcgttacgcagatccctgaacttattcgcgcactttataccttgagaagtgaatctatagaggccgcaggagaaaccagaccggatgttattttttccgccacgcactctctgtcattttcttttttcccggcactgatgcgtaataacgaaaaaatcgcccgcttcggttcttttcgcctgttatctgacacactgagtgcctgtgaacgcatgatcgacaaaggtgacgcgcagtttttgctttgttactaccaccctcatatgcgcatcaatcttgatcagtcgaaatacttcagtgttcggctcgggcgggaaacattattgccttattccagatgcgatccggcaacccgcgagccaatgtggtatgcatcgggcggcaaaaagtttccttttctgtcctattcggctgaatccggccttggccggatcctttccaacacctcgcaggtcaaccgtgccagacgcggaatggaaatctcattcactgccgatctggctgcaacattactggccatggtcagggccggtgacggcatcgcatggttgccggaaacgctggcagcgccggatgttgatgtcggttccattgccgttgcggcgaagaaagagagcgcgctctgggtacccatagacatcaggcttttccgcccggcagcaaagatgtcccgcgctgtagaagagttgtgggaaattttcgtagaggaccagatctga

SEQ ID NO: 99649 - DNA, 1164 bp, Enterobacter aerogenes
atgcgtatccttgacgttgtagaaattaccaagcctattgcttcccctatccgtaatgcttacatcgatttcagcaagatgacggccagcctggttgccgttgtgacagacgttgaggtagacggacgtcgcgtagtgggatacggcttcaactctaacggccgttacggtcagggcggcctgatccgtgaacgcttccgcaaccgtatcctcgaagccgaaccagaaagcctgctgaatgccaaaggcgacaatctagatccgcataagatctgggacgtcatgatgagcaacgaaaaaccgggcggtcacggcgaacgttcagttgcggtaggtacgttggacatggccatctgggatgcaaccgcaaaaattgctaacaagccgctgttccgcctgctggcagaaatgaagggcgttgaggctaacccgcgtgtttttgtctacgcggcgggcggttactattacccgggtaaagatctgagcgcgctgcgtcaggagatgcgcggttatcttaatcgcggctataacgttgtgaagatgaaaatcggtggagcgtctctggaagaggaccgtcgccgtattgaggccgtcctggaggaaattggcagcgaagcgcgtctcgccgttgacgccaatggccgcttcgatctggaaaccggtattgcctatgcgaaaatgctgcgtgactacccgctgttctggtacgaagaggtcggtgacccactggattactccctgcaggctgcgctgtcagagttctatccgggctcaatggccacgggtgaaaatcttttctcccatcaggatgcgcgaaatctgctgcgctatggcggcatgcgcccggatcgagactatctgcagtttgactgcgcactctcttatggtctggttgaatatctgcgcacgcttgatgtgcttgagcaatttggctggtcaccgtcacgctgcgtccctcatgggggtcaccagatgtccctgaacattgccgcaggccttggccttggtggcaatgaaagctatcccgatctgttccagccttacggcggtttccctgactcggtgaaggtggaagatggccatatcataatgccggaactgccgggtatcggttttgaggggaaatcagaccttatcaaagaaatgcgcgcgctggctgtataa

SEQ ID NO: 99650 - DNA, 846 bp, Enterobacter aerogenes
atgaagcttttaagttatctgacgcctgatggatataaaagttacggtattttacagggtgagggagttattgacctgagaagccggacagatattgatactcccgatttgaaaagttttatcagagaaaaagggatcgcagcagctgacggatatatcagctatgagccggattatcagctttctgatattaccttccttcctgttattgataatccgggcaaaatactttgcgtcggcatgaattatcaggccaaacgcactgagtttagtattacttcggatgcgcctaccatattcatccggttctcagattctcagaccgctcatctgggcaacatcgtgaagcctgcgctgagcgatcagctcgattatgagggtgagcttgtaatcataatcggaaaatccggcataaacatcgctgagcaggacgctgcagaatacatagcgggctattcctgctatatggatggctccgtgcgtgactggcagcatacctggttcactgccggcaaaaattggagcaaaacaggtgggttcggtccctggctggttacgtgtgatgaggtccccgatccgcaaaagcttcagttaaaaacctggcttaatggtgaaattgttcagcaggacagtacagctaatatggttcatccaataagcaaaattatcagttatatgagtacctttacacagctatccccgggtgatgttattttgacgggctcaccaggcggtgttggtcgttcacgtaacccgcaggtatttcttaatgacggcgatattattgaagtcgaaattgagtcagttggtcgcctgactaattacgtcgttgcagcttcaaaataa

SEQ ID NO: 99651 - DNA, 1344 bp, Enterobacter aerogenes
atgagtgataatgctcttaaaggtaatgcgcttatcgggaaaaaacgctggacaataatactccctgcagtgtttatcatgtataccatttctttcttcgaccgggtgaatataggcatggcgctgccccatattacggccgagatggggctcagcccggtagaagctggctggcttggcggtgcatttgcatggggctacgtggcgacgcagtttaccgctggctggctggcgcttcgctttggatcgcgaagaataattggcgtcagcctgtttctttttggtgcctgcgccatgctcacgggtctgacgcgtaactttggtgaactggttgccatccgtttcttcttgggacttgctgaagggccgattcaggcagcaacggcgatgtttctggcacaatggtttatgaagccagaaaggggacgcgcatttggtatctggaacctcagcctgggggccggtgcgtttctggccggtccaatatcgggctggatcctggcacatcatgactggcgcatgatgatggtcattgagggggcacccgcgtggctgttctgcatcatctggttttatctggtacctaaaagtattcaggctgcaagctggctcagcgccgaggaccgggatcatatccagaaagaccttgcggctgagcagtcaaactatgtgaaggagaaatctgacccctggtggaccattatcaaaataccggcactctggctgatgttaatcggctattccctgcacagcatgctggcatacggatttacgctctggctgccgacggcacttaaggggtatggaacgctcagtgaattcatagtcggtctaatcagcggaatgcctttcctgatgaccatggtgggcatctggtatatcacccggcggtcagataaatacaaccaggaacggcggctgcatgccgctattcccaccgtgttgtgcggtatcgcgttgtcagccgcggcctttgttccgctgtcttactactgggtgcagatagccctgttcatgtttgtcggcctgacaatgaagatgcttgtgccgttggtttacgtccggttgacggaaatcctcccgacaaggaaagcggtccctgcggtggcatttgtaggtgcatgcagcaactttattggtcagtttggcggaccgcttgttgccggctacctgaagcacctggggggcggtactgacatgacgctcgcatggagcgtactgggtctgttctcaatcgtggggggagtactgtttgccctggccgtgggacgtgaggaaagcgtctgggacatcaggcaggcattccgggttacttcccgcaggacgatttccgcgcgggaatag

SEQ ID NO: 99652 - DNA, 1296 bp, Enterobacter aerogenes
atgaagctattatctatatacattgcaggcttccaatcacttaacagagcagcttatgttgaatttgctgacggtgacatatctgttatttatggtgataatggttgcggtaaaactacatttttgaaattagtacattctattcttaagcgtgatgatgagtcgcttgcaagcgaaaatgtaatgtatgttgaaatctattatgagaaaaataatggagaaagagaatttgtaccagtaagacagattcaagaggaggtagaagaggggattcttaaagactcatacgactggagcgatcttgtcgattctgaattagctgattgtacatcattatctcttggtgtggagagaggcgtaacctcagagtcattgaaagttgaaccagtggatattttgaggtttcttggtcatccagaatatcgctctttatttgcaaagacagatattcatttgtttagtgaaaggatggcaatgtttctaaagagatatcaaaacaataggaggagaaataaaaaagatgatatggatttagatgcaaaacatgtttttcttcaaaatataaaaatgagtaatatcgagaatatgcttgttgaacgttatctattagcgaggaatattgctactgaaagaattcaaaatgcgttgtttgatacgttggccattgcagtggatgcaaagaaaacttctgaggatatcgtgatgccttcgaattttgagaatgatgtgtataaaaataaagaaaggattattgaggcgttagatgatggttttgagaataattttaaaaatcatgttgttaatattttatcatcaattcaaagtgaatctgatgttaataaaatacttgaaaaccaattgttaagaaagttagtcatgaatatgactcgtgaattaaaggttgagaaacaacttttaagctccattaacatcctagttgatgtctttaactcctttttggttggagataaaaagttaattattaacaagcaagagatatatgttgaaactgaagattctaatctatccattggagcattatcaagtggtgaaagacatattcttacctttctatcaatagttataattgcaggtcgcggcagagatattctacttattgatgagccagaaatttctcttaatattaaatggcaacgtacattactaagtcttctacaggaattagtgccagaaacacaaattatcgtggcctctcatagccctatcatatctaagaagtcccccaacagtttggtcaaacttgcaccggttaaaattgagaatgattcgaaatga

SEQ ID NO: 99653 - DNA, 909 bp, Enterobacter aerogenes
atgaacgattggttgactatggagtatgatgaaatattgaatgaggcaattatgtctgaaacgccaatgttagtcgttgaaggcgtcgatgatatttccatttatgaaggtatttgtcaacagcttgataaatatttcgaggtggttgctgttcagaatttcaaggatatgagtgaaggtaatagaggtgtaattgactttattaaggcattacttgaacttgagtatgagggggatttagggcactacattctaggtattatagatcgagatgctcgctactaccgaaatgaaattgttaataattcagccgtttttgtgctgaaatggtattcgatggaaagccattttatcacacggcaggcaataaaatgcgttattgaacaatgtacaagaatacagccaaaattgctaaccagtgagttaattgagatgctctatgaaaagttagtagaggctctaatgtcgttgtactatatgtctttagagtgtttaaagaaagcctgcgagaaagattatgaatctctagcatcatataagatgagcgttcaacatttgaaaaacataggcgcttttgaatcaattgttgaacgagaaaaagaacttgataaatttgctattcaggtgggtgtgagcaatgatatggcaggtttacttaatgtatgtaaaggtaagtggcttattggagagttctgcaaaatattaattagtgaaataaaagggttgaaaacaaaatgtctgcatgatgaggtagaaaaatgtcagttttgttacagtggaaatgatgagctctgtctttatggatttgaaggaagctataacgagtctcaaatagcaagtttaattaaaaagaatgaaggctacacgcaatttggttatttaaaagatcgcatagcaaacatgatctaa

SEQ ID NO: 99654 - DNA, 1194 bp, Enterobacter aerogenes
atgcttaatcagcagtatgtgatgccggaagggttagcgccttatgcgggcgtgacggcgaaaagcccgtggctggccagcgaaagcgaaaaacgtcagcgtaaaatctgcgattcgctggaaacggcgattcgtcgttccggtttgcaaaacggcatgaccatttcgttccaccacgcgtttcgcggcggtgacaaagtcgtcaatatggtagtggcgaagctggcggaaatgggttttcgcgatctgacgctggcatccagttcgctgatcgacgcccactggccgctgatcgagcatattaaaaatggcgtgatccgccagatctacacctccggcctgcgcggcaagttgggcgaggagatctccgccggtttgatggaaaacccggtacagatccactcccacggcggtcgcgtacagctgattcaaagcggcgagctgtcgattgatgtcgcgtttctcggcgttccttgctgcgatgagtttggcaacgccaacggctttagcggtaaatcacgctgcggttcgctgggctacgcgcgcgttgatgcggaacatgccaaatgcgtagtgctgctgaccgaagagtgggtggattatcctaactatccggccagtatcgcccaggatcaggtcgatctgatagtccaggtggacgaagtcggcgatccggaaaaaatcaccgctggcgcgatccgtctgaccagcaacccgcgtgagttgctgatcgcccgccaggcggcgaaagtcgttgagcattccgggtactttaaagacggtttctcgctgcagaccggtaccggcggcgcctcgctggcggtgagccgcttcctcgaagataaaatgcgccgtaacggtattaccgccagcttcggccttggcggcatcaccgggacgatggttgacctgcacgaaaaagggttgattaaaacgctgctcgatacccaatcgttcgatggcgacgcggcgcgttcattggcgcagaacccaaaccacgttgagatctccaccaaccagtatgccagcccgggctctaaaggcgcctcctgcgagcgcttaaacgtggtgatgctcagcgcgctggaaatcgatatcgactttaacgttaacgtgatgaccggctctaacggcgtgctgcgcggcgcggcgcgtccggcggccatagcgataccgccgccggcgcggatttga

SEQ ID NO: 99655 - DNA, 2076 bp, Enterobacter aerogenes
atgcaacagcaggataactcagccagtaacatggaaacggcctctgtgttggctcaggacctggattcattgttgaatcagcactttcgcggtcgcgtggtgcgtaaggatctgactaagcaacttaaagaaggggctaatgttccggtttacgtactggaatatctactcggtatgtactgtgcctccgatgacgatgaggttgtcgagcaggggctacagtcggttaagcgtattctttctgataactacgtccgcccggatgaagcagaaaaagtgaaatcactgattcgcgagcgtggttcttacaaaattatcgataaggtcacggtaaagctaaaccagaagaaagacgtttacgaagcccagctttctaacctcggtattaaagatgccctggtgccgtctcagatggtgaaagacaatgagaaactgttgacgggtggtatctggtgcatgatcaccgtgaactacttttatgaagaagggcaaaaaacgtctcctttctcgctgttcacactgaagccgatccagatgccaaatatggatatggacgaggtatttgaggcccgcaagcagtttgatcgtgaccagtggattgacgtgctgttacgttctgtcgggatggagcctgcgaatattgaacagcgtaccaagtggcatctgattactcgcatgattccctttgtggaaaacaactataacgtctgtgagcttggaccacgtggtaccggtaagagccatgtttataaagaatgctcccctaactccctgctggtatctggcgggcaaaccacggtagcgaacttgttttacaacatggccagccggcagattggtcttgtgggtatgtgggacgtcgtcgcgtttgatgaagtggcagggatcactttcaaagacaaagatggtgtgcagatcatgaaagactacatggcttcaggttcgttctctcgcggtcgtgactccatcgaaggtaaagcctccatggtgtttgtcggcaacattaaccagagcgtggacacgctggtcaaaaccagtcatctgcttgcaccgtttccggatgcgatgattgatactgcattttttgaccgcttccatgcttatattcctggttgggaaattccaaagatgcgtccggagtttttcaccaatcgctatggtttgattacggattacctcgctgaatacatgcgcgagatgcgtaaacgtagcttctccgatgcaattgataaattcttcaagctgggaaataacctcaatcagcgtgacgtgattgccgtacgtcgcactgtatccggtctgttgaagctaatgcacccggatggcgcttacgacaaagaagatgtccgggtttgcctgacttatgcactggaggtccgtcgtcgagttaaagagcagcttaagaaactcggtggcctggagttctttgatgtgaacttcagttatatcgataacgagagcctggaagagttcttcgtgagcgtaccggagcagggcggcagtgaattgattcccgccggtatgccgaaacctggcgtagtgcatctggtcactcaggctgattcaggcatgacgggcctctatcgttttgaaacgcagatgactgccggtaatggcaaacacgcggtatcaggtttagggtcgaatacagcagcgaaagaagcgatccgcgtgggttttgactacttcaaaggtaacttaggtcgtatcagtgctgcggctaaattctctgaacatgaatatcatcttcatgtggtggagctgcacagcacaggaccgagtacaaccaccagtctggccgcgttaatcgcgttctgttccatattgctggcaaaaccggttcaggaacaaatggtcgtattgggcggcatgacattgggcggcgtgacgaatcccgttcaggatttagctgcatgtctgcaggtagcattcgatagcggtgctaaaaaggtactgctccctatggcgtctgctatggatattcctaccgtaccgactgagttatttaccaagttccaggtaagcttttatgctgaccctgtggatgcggtgtacaaggcattaggtgtgaattaa

SEQ ID NO: 99656 - DNA, 2598 bp, Enterobacter aerogenes
atgcaatttaaagaactggaatccgggcttcgtcagaagtttaccgacaaccgtatcgtcttctggcacgacccagaacaacgtttcactgattcgctcaatgagctggatctcgacaacgttgtgctgctggatatgcgcggcatttctgtgctagcaacaaaaaaacgactcgaaatcgacgagcctgagcagaaatttttactctatttcaccagtgaggttcccgctcgcgagcaggactggttgctggatatccgcctctatagcaccgaattccacgctgattatgcagcgatcaccctgaattcgctaggtatcccgcaacttggtttacgcgaacatattcaacttcgcaaagccttctttaccgtcaagcgaactcagatcctgaagggatgggttaccgagcgcgaaacggaaaactctctcgataagaaaatgcttgcggtggtggtcggagccagtacctttgaaaccaaagagattctgtttgctttggttcagcaatttgtcgcggcacggcagcaggatgactgcgcgctggagaacaccttcgccgtactgaagaaacttggcctggatgaggtactctgggagattcttcgtgttgagctcgggtaccagtttgaatctccttcactggaaaacctgctgctgaaactgttctgtaccgatctctgggcgcagggtgatgaagcgcatcgtgactggttgagtaaaaatgtgctggcaactgcggctggacgagcctcttcactggcctttatgggggcgtggcgcaacgatcgtcgctataaagcagaatacgattattgtgcagaggatttgcaacaaacactgcagccaaaagagcactacaactacagctcaccgtacgccctggcaaaatgtgaaaccttcgaggccattgaacaacttattatccgtggtctggtgacccagttgcaggaagagagcaccactctggacagagatgcgtttaaagcactggtatctgagcgcagtgctaaatactggagccagacacgtccagagtatctttctatctggaatgctattcgtcaggcggaacgtttgctgaatttgcgtaaccgctacactgacgggtttaatttccccgatacaggcgcgttctggaaggcctactgcgacgaaatttatcgcttcgatcagacctatcgtttgtttaatgaatatgctgcaccggtgcacagcaaaggggcgatgatcctgcatgaactggataaattcattgaagagttgtacagcaactggtatctggccgagctgagtcgcggctggaacaaactgctggatgcggaaaaacgtatgcaggcatggcaatttactggcataccactgcagcgcaatttctataaagagaatgttaaacgtcagtttgacacctctcaggtgaaacgcgtttttgtcgtgatctcggatgcactgcgctatgaagtggcggaagagctgggcaggcatattaaccatgagaagcacttcagcgcagagctgcgctcccagaccggagtgctcccaagctatacccaactgggcatggctgcactgttacctcatgagtcgttgagctatcttcctgataattctggcgtagtctacgccgatgggatgtccacttccgggtttgaaaaacgagccgctattcttgcgaaggtgaatggtgtagcgctgaaagcaaaggacttgcagaatgccaataatcaggaagtgaacgaacaaatccgtaacgcttccgtggtttacatctggcacgacactatcgatgccatgggtgataaggcggcaaccgaagataaaacattcgaggcttgccgaagcgctattaccgagctaaaagatctggtctcacgcttacgtagccgatttaatgccagccgaatttttgttaccgccgatcacgggttcctgttccaacaacaagcgctggtggagcaggataaaacgaagctggaaagtaaagctaaagacacgattgaagcgaataagcgttttattgtgggtcatcaactgcctgaaagtgaattttgctggcacggtaaactggcagatactgcaggcgcaagcgatgagagtgaattcctgttgcccaaaggggtacagcgtttccacttcgtaggtggtgctcgtttcgttcatggcggagccatgctgcaggaggtgtgtgttcctgtgttgaagattcgcgcgcttgaaaagaaagcggctgagaagcaaccccagcggcagcccgtgtccgtcgttgcgcgggatcaggtgatcaaactggttaacagcattgataaagttggttttattcagacttcggcagtgaatgatctaaatgagccgcgtacgctgaatatctttatcgtcgatgaaaacaaccaggtcgtctccggcacggaaacagtatgcttcgacagtgataacgaagatatgggtaaacgcacccgcgatgtaaccatgaaactcatggggacggcattcaatcgtaaaaacaaatatgttctgatcctggagaatgcggacagcacaacagagtatggtcgatacccgatcacgatcgacctggcatttcaggatgacttcttttaa

SEQ ID NO: 99657 - DNA, 834 bp, Enterobacter aerogenes
atgaaggagtttgagtggcatatcaagactatccttgagacaaagatcaccgaaggtaaacgagcgctaatcgttgaagggaaaacggatgaactcgtttttactcagctcttaaaaaaagttgatcctcaatgggaaacaagatgggttcttgccgaagttggcgggaaacgcaatgtggtagaaatccttgcagcgcagccgacatggctgggcgttgttgatagagatgagtgggataatgctcaaattagccagaggcaacatcaacttcgtaacctgctagttttgcccagattttgcattgaaaactatcttgttgtcccgagtgagctttggcattgcttgccacagacgcaaaaggcaaaactcccagaagggagagaagaggctattcactctatcactgtctctattactgaaaaccttgagcagtgggttcaatttggtgctttatgggcaataataaaccctctttgggacgaactgcgattacttggtttcaaccgagaccttctcgatcctgaactggttgttgatgagcaacgttttcgagcacagtgcgctagctggcatagccatcttgagcctcagagactatggcagagatatcaagagaaactgactgcaattcaagctcagactaatgatgaaaatctgcgcaccattgttcatggaaaaaaattttttaaagcagtagtgactcctgctttcagaaggctatttgccattcagagtgcaatttcagttgaagatttattccgagaaatgccagtcccggcagacctagcatttgtctggcaacgcatggatttaacaccagaagataattaa

SEQ ID NO: 99658 - DNA, 1044 bp, Enterobacter aerogenes
atgaaaatagcggcgatttatacgcagagtgttggcccattgggcaatgcggaaattagctttaaaaacgactggacgggagaggtagaggaaaacgttctccttaccggcccgaacggctgcggtaaatcgacgctgcttcgctctattgcgatgctttggggggcttttgggttctggctagagcaatccaaaccgctcccatcatctcacgaatcccggaaatggttagaacgatggaacggtgtcgcgattgttatagatgacttcacatcaacaacgccatctcgcttggggctattttttggctccgacgaatggtctgaggaattaattgaatcctataaagatgttgagtggattggtgaaagtcgtgctgggcgtaaattaacgctaaggatttttgaagatgcctggttccagaaatggggtcactactaccagaaaatggtgatcaccactgagagagtttcatcccctaatgtcatttatctggatgctgaggcacgcagatggcttgcgcctaaaaagaatatttcctcacttgcacaggatgatcttagccaacgctggctggcaacctatacccctacctccgactggaaagggcagcttgaagcctcgctgttcaatatgaaagcgacgctccctgagctgtatccagagatgatgaaaacgctgaatcagttcttctcagggaaaatcattgaagaagagattcagcctggacagcgtcagcaggtcaggctggctagcggtgatactcatacgctggatgaactgagttctggtgagcatcaggttttaatcatgctctttatggttcaacgttggcttcagccgggcggggtcgtactaatcgacgaaccggatctgcaccttcatccttctctagtttcacctttgcttgcgacactggaaaacattatccagaaaaagcgtggtcagcttattttaacttcccatgctactgacgtctggctgcgctacgaaagtttaggactccgctatcctctttcggttgaaaaaggtgatgagcaatga

SEQ ID NO: 99659 - DNA, 1212 bp, Enterobacter aerogenes
atgttaaattcaagaccggtcaagaaattccttgaagctctttcacctactttgaattatgaagcagagcatgttaaaaaactgccatgtgtatttgtgggtaatgatagggcctcagagctaatttcaatttcaaaagaagattgggatagccaggaaatatcgtgggattttaataaaaatagtttaattacacaactggaaataaataaaccgctaagggatatttacattaaatatagagagttcttaaagagagtgttgagagattcaatcaaaatagagcgggagttaaatgatgactttaaccaagcttacgctatcgaaaataaaaaatacgaattaaaattatcggagtgcactctgttattaaacccattttataggtatcaaatagaagatgaaaatgatgcttataatcgtttgcttgctgatcatgttggcgaattaataagctatattattggctgccaaatgggccgctactcccttgaccgagaaggactagtttacgcccatgaaggcaacaaaggttttgccgaattagtcgccgaaggtgcctacaaaaccttccctgccgacgaagacggtatcctgccattaatggattcagactggtttgacgacgacgttaccgctcgcgtgaaagaattcgttcgcacggtctggggggaagaacaccagcaggaaaacctcgatttcatcgccgaaagtctctgtttgtacgcaatcaaggcgaaaaaaggcgaatcttcgctggataccatccgtcgctatctttccacccagttctggaaagatcatatgaagatgtacaagaagcgcccaatttactggctattcagctcaggtaaagagaaggcgtttgagtgcctggtgtatctgcaccgttataatgaaggcacgctgtcgcgtatgcgtaccgaatacgtggttccgctgctggcacgctaccagggcaatatcgatctggttaacgatcagcttaagaattctgagtccggtgcggccactacgcgtctgaaaaaagaactggatgggttgaccaaaaaattcaacgagctacgcaattttgacgatcgcttgcgtcactacgctgatagacgtatcactattgatctggatgacggcgttaaggttaactacggcaaatttggcgatctgctggcggatgtaaaagccattaccggtagcgcacctgaggagatttga

SEQ ID NO: 99660 - DNA, 2223 bp, Enterobacter aerogenes
atgaatacgtcaaacatcaaaaaatacgccccggtggctcgtaaacagttccgcgatgcggtcattcaaaaactgaccacgctgggtattgagaccgataaaaaaggcaacctgcaaattgcacaagcaaccgatcttggcgaccaggtgcgttatggtcagttctcgctggataaagcactggcgtcacgccgtgagcgtctggtcaagcgtgcagaaaagcagggctacgacgtgctggtggagcacatcgcttacacctggtttaaccgcttttgcgctattcgctatatggagctgcatggctatcttgatcacggtttccgtatgctgtctcacccgacgctggaagggggttttgaggttctggatcatgtgccggaagtagctgatgctctgggactggacaaatcacgcctggtggagatgaagctggagggcgatcgcgatgaagagctgtaccgtgaactgttgcttgcgcagtgtcatgcgctgcacggtgcaatgcctttcctgttcgaagcggtcaatgatgatatcgaactggtactgccggataacctgactcgcaccgactccattctgcgcgggctggtggacattattcctgaagaagactgggaacaggtcgaagtgatcggctggctgtatcagttctacatctcagagaaaaaagacgatgtgatcggtaaggtggtgaagagcgaagatattccagccgccactcagctgtttacgccaaactggattgtacagtatctggtgcagaactcggtgggccgccagtggctgcaaacctacccggactccagcctgaaaggcaaaatgccgtactacattgagccagcggagcaaacgccggaagttcgggcacagctggcagctatcagcccatccagcattgagcctgaaagcattaaagtgctggaccctgcctgcggatccggacatatcctgaccgaagcctataacgtactgaaggccatttacgaggaacgcggttaccgtacccgcgatattccgcagctgattctggaaaacaatatcttcggtctggatatcgacgaccgcgccgcacaactctctggctttgcgatgctgatgctggcccgccaggatgaccgtcgtattctgggccgtggtgtacgtctgaatattgtttccctgcaggaaagtaagctggatatcgctgagctgtggaccaagctgaattttcaccagcaagtgcagcgcggcagcatgggagatatgtttgctgaaaggacggcactggccaataccgacagcgcggaatataagctactgatgcgcaccatggcgttattcaccagcgcaaaaacgctgggttcgctgattcaggttccacatgaagatgaagcggggctgaaagcgtttctggatgggctgtatcgtctggctgttgaaggtgatattcagcagaaagaggctgcggcagagttgatgccatttatccagcaggcgtggattctggcgcagcggtatgacgttgtggtggcgaatccgccgtatatgggcgggaaaggaatgaatggcgatctgaaagagtttgctaaaaagcaatttccggacagcaagtcagatttatttgcgatgtttatgcagcatgcattttatttgctcaaagagaacggctttaatgcgcaagtaaatatgcagtcgtggatgttcctgtcgagctatgaagcgcttcgaggatggttgctggataataaaacgattatcaccatggcacatttaggtgcacgggcatttgggcagatctcgggagaagtagttcagactactgcatgggtgattaacaacagccattcagaattttatcagcctgtatttttccgtttgatagaaggtggcgaggaacataagcaagccactttgcttaaccgtaagaacgattttaaaaatatagcccaaggtgacttcaaaaaaatccctggctcgccaattgcgtactgggttggagaaaaattcttaagttgcttcgataaacttcctgccgttgaagtgatcgcgatgccaaagcaaggagctacaacctcagataataaccgttttcttaggttgtggtatgaagtagactttaaaaaaatgaatgttaatgctgattctcttgaaattgcaaagaggtcacaaaaaaatggtttccttacaataaaggaggagagtatagaaaatggtatggcaattgtgattatgttataa

SEQ ID NO: 99661 - DNA, 3615 bp, Enterobacter aerogenes
atgaatattgaacaaatttttgagaaaccgctaaaacgtaatattaacggcgtggttaaagccgagcagaccgacgacgaaagcgcctggatagaactggatgagtacgtcattactcgggagctcgatggccacctgcgtcagttctttgaagtctatgccccagctactggaccaggcagattacagcttgccgacaaaatgggcgtctgggtttcaggcttctttgggtccggtaaatcacacttcattaagatcctttcctatctgctggcgaaccgcgaagttagccacaatggcgtcacgcgtaatgcgctctccttctttgaagagaaaattgatgatgcactgttattggccgatattcggaaatcggttcagcatccgactgatgtcgttctattcaatattgactcacgtgcgaatgttgaagatggcgtggatgccatcctcaaagtctttctgaaagtttttaacgaactggctggttattgtggggacttcccgcatattgcacacctggaacgtgagctcgataagcgtggacagtttgatacctttaaagccgcctttgcggatattactggctctcgttgggaagatgaacgtgatgtttatctgatgataaacgatcagatggctcaggcactgagtgttgctacaggccagagtgaagagtcttctcgccagtggatcgagcaacttgataagaacttccctctggatatcaaaaatttctgtacgtgggttaaagagtggctggatagtcaaggcaaccgcaacattctgtttatggtcgatgaagttgggcagttcattggtaaagatgcacagatgatgctgaagctgcaaaccatcaccgaaaacctgggcgttatttgtggtggacgcgcatgggtaattgtgacctcccaggccgacattaatgccgccattggcggtatgagcagtcgcgacggtcaggatttctccaagattcaggggcgtttctcaacgcgcttacaactctcaagttccaatacctcagaagttattcagaaacgtttgctggtgaaaaccgatgcggcaataccggcgctggaagctatctggcaggaaaaaggcgatattctgcgtaaccaattggcgtttgacacgacaacgacagctacgctgcgagcctatacaaacagccgcgagttcgtggataactatccgtttgtaccgtggcattaccagatcctgcaaaaggtctttgaatcaatccgtaccaaaggggccgcaggtaaacagttggcaatgggggagcgctctctgctggatgccttccagtcggcagcagtgcaaatctccgcagatggtctggatagtctggtcccgttctggcgcttttactccgcgatcgaaagcttcctggaacctgcagttagccgcactattattcaggcttgccagtctccgtcactggcggagtttgacggcaaattactaaagacgctgttcctgatccgctacgtcgatgtgctgaaaagtactctcgacaatctcgtcacgctctctattgagcgtattgatactgataaagtggaactccgtcgacagattgaagccagtcttaatcgtctgcaggctgagatgctgatctcgcgtattgatgacaaatttgtttttctcactaacgaagaaaaagagattgaaaacgaaatccgcaatattgacgtggaattcaccaccatcaataagcagctctcaacgatcattttcgaagagatcctgaaaaacaaaagatatcgctatccggccaataagcaggattttgatatcagtcgtttttgtaacggacatccgctggatggtgcgaatcttaacgatctggtggttaaggtgctcacgccactggactcgaactacgagagctataagggtgcgcattctaatagtctgctgatgacggacagtaaggactgcatcttaatttgtctgcctgatgaggctcgtacctggcaagacctgaccatgtacgcgcagaccaaagtcttccttagcaagcaaagcggacagcgtccggaacaggcaactctgttggcagaaaaaggccgtgaaaatggcatgcgcgaaaaaacgctgaaggcgcagattgaaggcttgctggctcaagctgatgtctgggcgctgggcgaacggctggataagaaatcctcttcgccgttagctatcgtggatgcagcctgcggttacgttatcgagaacagtttctccaaactaaaattgctgcgtcttagtaccggagacgtaaatcgtgaaactcacgcgctgttgacagtagaaaatgatacccagctcgatctcggggatatggaagaatccaacccagaggcgatgcgtgaagtggataactggatcagtatgagtattgagactcataagccagtttacctgcgggatatcctcaccacttttggccgtcgcccatttggctggccggaagatgaggtcaaattgctggttgctcggctggcgcgcagcggaaaatacagcttcactctgcaaggcagtgaaatcgcccttaagcaggcgtgggacgcgtttaacaactcacgtcgctacagtgatttgcgtctgcataaagtacgtcgccatgacgaagcgcagctgactaaagccgcgcaactgatggctgatattgctggagaaccgtttaacgagcgtgaagagcagccgctggtctctcatattcgcgagctctttggccgctggaagagcgaactgaccgtttttaaaactcgtgcagagagtgggcaaacccccggtcgtaaagagatagaagaaggcctggtattgctgaacgggatcctcaacgagaaagaggaatacgcggtcattgaaaaagtcaccgcagcggctgacgatcttaaagatttctcggacgactgggacgatttggtcagcttctacaaaaaccaatacgccacctggcagcgcctgagtgcagcgttgaatggcagttttaaagctaaccgtaatgcgttggaaaaagacgaaacggctcaaaaagcgttgcaggagttggaaagcatctacagtaaggcacgaccttacggagagctgcaccggattatcccgctgattgaaaccgttgaaaccatcaaccagcgtctggtggaagaataccgaagccatgcgctgcagcagatagataaccatatcaatgagctgaagcaaagcatgcaggagatgcacgtccctgctgacttgcagcactcgcttttacacccgatgcagcaatcgcgtaagaaagtggagcagaacggtctgatcccacagattatggaagaacaggctgaggttcgggcgctacaattcaaagcaaacgaacgactgaacggctgggttgaagaacagcgtaagaaagtgcctgaaccaaaaaccgtccctcagtcagggattatcgatccagtagctaagcctgaacccaagctgaaaaagaccatctacgtgaacacgcgtaaaacgatggaacgagctgcgggtgtgacaacgctggataacgccgaacaggtagacaaagccctggagcaactccgtaaaacgctaatggatgccattaacgcaggcgaacgcgttcagcttcagtaa

SEQ ID NO: 99662 - DNA, 603 bp, Enterobacter aerogenes
atgaatgacccgatccttgaatatcgattaaaacagttagaagaacgtatcggcgacgaccgttttttgaaaaaccaaggttccggtaatgagattggcttctggatttttgattatccggcaaagcaagagcttcaggtccgcgaataccttcactttttattcaaaaaactggacaaaaagtacacctataaaacgctaaatatcttccaggtcatcatcgatatgctggaagaacgtaagctctttgaccgtatctgccagcgagagcctgaacttggcctggaaacactgaaaaagcatctggcagccccactaagccagaaaaaaatcgcggaatatattgcgcgcactgtcgatcttccggcgcagcaatttgtcattctgacgggcctcggtaacgcctggccgttggttcgtggtcatgagctaatgagcgcacttcaggatgtgatggggtttacaccactcctcatgttctatccaggcacctacagtggatatgatctttcaccacttgctggcattcactcccgtaactattaccgcgccttcagactggtacctgaaaccggaccggcggcgactttgactcctcgttaa

SEQ ID NO: 99663 - DNA, 618 bp, Enterobacter aerogenes
atgacaaacaccatgataaaaaatgacaaacgctggattggcgatctgctgggcggttcgttgatggtccgagagagccgaaccattgctgaactgttgctttctgaaccagatgaagcgacctggcagcagcaaataatcaatgaaaatattcttcaggcttcctccccaagcactgcaaatcgttatgcccgaaccttaaggctgcgattaatgaccttggatcgggggggctggaaactgattgctgatggcagtgaaagcgaacgtctacaaatgctattggttgcattgatgatccagtctccaattgttgcggagtttattgctgaggttgtaaatccggctcgtcaacagtttaaagaaaaacttggtatgaactgctggagtgaatttgtggatgagaatctgcgattgcacccggagctggctgctttctctgattcatctatccaaaaaatgggtaacaatctgattaaggcactggcagaagctggttacctggatagcccacgccgccgcaatttacaaaacgttttccttctaccagatgttgcagcggccttgcatcgtttaaataaagccgaactgctccctattctggagggtaacgtatga

SEQ ID NO: 99664 - DNA, 402 bp, Enterobacter aerogenes
atgtcgaaagccaataatccgggatttgtcttatcaccttactcccagaaaaaaatccttaaagcattaggaactcaccaacaaaagaccgactcttctgctaaacgacatgggaaaccgactcgctttaatattgcgaccagcgattacgataatctcgttagcggcgagcacggtccgctgatactaaaagtccggaggggaaaaatcgtcaccgaaaaacattactgtgctgaatgtcacagttacattagcccaatccgggcatatgccgacagtaactatggaaaagtgcatctttgtacaccttgtcatcttacagcgttcaaccgtagctttggacacgcggatgctatgccgctcaagttggatcatgctcatgcacataaggggaaatggtaa

SEQ ID NO: 99665 - DNA, 1242 bp, Enterobacter aerogenes
atgaataaatctgtcataaagctgctgaataaaaaattcattatttcagtaataacctcatctacatttattactggatgcacaatggctgttatatggttctatctgtcaaacattgatagattagatattttctttgatgctataagcctcagttcagccttaggtatcatattcttctttatattagtatcgatttcggggtttagcttagtaattttcatttcctcttttattttaatactcatttacacagggtatgaagataaatttaaagattactcaagcatgcctcatcgaatttccactgtttgttatctaaatagtttatttatatgctgcggtatgattgttggctactacatttattatctttctggatggagtggttatttcataagctccaccagcctagtattgatgcttgctcatagttatactgtctccttttttaggctatttagaatacagaagcttcgtttacataaatctgataactacgagaaattgcccagcaaaaaaggattattattcttattacccttgcagcttatggctcccgggatcgttcaaatattacccatgttatttctgcttacccaacttgattttagtgaggggacaagtgattgggttgaaatgctaatgctccttgccttaacagcggctattgttactattggcattctgcctggcgccatacatcttaatgagcgcaaaaatggcaatagaatcactagcttcatagttgttttaatatgcatacccgtcgtgattgctgtattcagtgtctggtatcgccccatcccaaatatgatcattaatatggcgatgaatctctcaggcattagtgactggagaacacatcagtattatattgaaagcaaaactcatcctcatagtatgtttaatggcttaatctggaacactagatactatcaagaaattcccgagagatttttcatcaccggagtcagtacatttactttaggggatataaagttgatatgcccaactgaaataactgaagcaagaaaagagagtttaaaatttaccgttaatgatatcaatgagtatgagcaaaaagggaaacagttaaaggcggtagccatgaaatgcatcccttttgataagaaggatattcacacctgggattctccattatctgagccgatctattacgagaaagtcaaacagaccgtagataactctatgctaaaaattctccataccctgaaatga

SEQ ID NO: 99666 - DNA, 276 bp, Enterobacter aerogenes
atgcatctacagaccgcaatattactaacaattctgcctttctcggccctgacctacgcctccccggaatccacccagctcgcccttgcgctgaaacaactcaacggcgtgaaaacctcgctggaacgcgctcaaaccagcgccagcaccgatccgcagtcgcgctacttcttcgactacttacaggcgcagcaggacatctccgtagttgaacagggcatccgcgcctgtttaactatggcctggagatccacgaaccgcttactcgcctgctga

SEQ ID NO: 99667 - DNA, 1740 bp, Enterobacter aerogenes
atgtcgttagaagaaacaagagttaggttgctaactgcaagtgaaactgcagaaggcttgcttgctctggttcacgatttgtatgtccaagaaatacgttcggaagagaaagtcttgacagaggtactatctgtacttcacaactcaggagagattgatttcgtccaaatagtaagaggagttgataagaactcctacggaaacgatttttttattattctgcatgtctttaaaaacgcgctacctacactagatgcaaaagttgaagatgttttacattgcctggtgcacctcacgcaacaggcaggtagagatttagccatcggtggagtctatgtggcctttgaacgtttctgtagcgtggaaggacatcgtcccagagatagcgttgaatgtatcctgaaacaaagtgagcttagttcgtatgccccttttctttccagttcaatcctcgcatacgactcaaatcgtgtgtctgaagctatccaaacgacagaaagtctgattgctaatagcagtcagatggtcagaaaccaagcctattttaccttagggaggcttagtgtcgatgaaactcaggctggtgtcatctgggagctacttagaggaagtgccgttagtgagcatgacagtggctgttgtgcttcgatattgggggcaacacttcactttggggaaaaatttccatcttactggtcgcaaatagaagagcttctaattccgtttgttgaggaagctcctcccgaggtactctatgcaatatctaatattatttcctttcaaaggattgtttttccagagagtgttaagcaactactggtaaagcaactagctaatgtatcccctgagcacaaaggtatcatagataatattgatcatttactggtagagttagttgaaagagggtcctcttcccttgctgtagaattattggaatcaattttggctgtaggagtggaatttaaatcgctggactacttcgccaacgagttattaagcaagcatcaagaattacgtaatcatataattacaaagtggttcttatatggagaagcaccgctttgccatggagtctcgactctacttcatgatgttacgggcaaggacatagagctaaaagcagaaatagcattgctagatgatgaagtgaagcaaatatttgttagtcgcaaggctgtcggttggctgtttacacggcctttagcggcggcaagtttcatactttctatttctgaaactgcttcgacaactacacttaaagaactcgaacgtattttgtacgatccattgcttttaagttaccctagtgaacttaagcgattcttccagtcatgcatcgataaaggtgttcaagagcatctatgtaagcgcttgcttgagaagcttcaaatttatcatactgatattgagaaagtgtctgaattgaaggaattaatggcacccagcgaaaatataagtgcatattggaaagactttgacaaaggcatgcaagaagctcacgaagaagcatcaaaatcttccttgattaagatgtttacgacacatcgattattgtacggcaacagctcaatttattatttacatcaaggagatggaaagtccgtacgacaagagatgcaaatgcattccttctcccattcagctgaaataccaaggttgaacgttttagaccccgaatcgctagattacactttacgaatttatcgttgtgagagaatgaaaaatgaagttaattcttaa

SEQ ID NO: 99668 - DNA, 1731 bp, Enterobacter aerogenes
atgaagttaattcttaagcaatatttggcttcactaaaagagcgagcagaattagatgctgtgctgccagatttgttgagcagcatgggtctaaatgtattcatttcaccaacacgtggagtgaaagagtatggtgttgatatagcggctgtaggacgagtaaatagcgaggaagaaaaagtttatttattctcagttaaatccggaaaccttacgcgtgagacttggaacgggaatacagatcaagctcttagaccttcgttagatgaaattcaagactcatttataccgggccgcctcccccctcaacatagagataagaaaatagttatttgcttgtgttttggtggtgatgtcaactcagggattaggcaggaggtatctggttatgagcagcggaatacgcaaaataatatcgcttttgaagagtggaatggcgataaactttcagagtttattcaacagtacttgttaaaagaagagttgctgccgagctctagccaaactttgttgagaaaatccctagcactacttgaagaaccggaaagttcgagtaaacatttctcacaattgatagataaggttctgtcaaacgccactgatgcagattctgtagtgtcgtgcataacacgaataaatatttgtttatgggttctattttcatggtgccgtgatggaggaaatttagaagcagcatatctttcatcggagcgagcattgctgttggcttgggataaggttaaaggctactacacgggtaggaataaaccttcaaaatcatttgatagcattttagatacctatcatcaaattactgattgttatgtcaaacgttgtttaattccatacgttgaatttaaatatgctatttcccatgcggttcactcaccttgctctattgatgtaaatattaaactgttcgatattctaggacgtttatcaatcaaaggacactggattttagacttactatcaaaaagttatgctgaaaccccaccaataaatggagaaagcgaagaacaggaaaatttatgtctccgcctcaaggagataacaaaatcaattaacctgttggttgttaataacccaatactattgtcaccgtacaaagattcgcaagccattgatattggtctggctctaatgctgctttcaaataattcagaactcgatgagtttgtgcagagttggctctcggaaattgttaatagatgtatattctcttttgagagcaatggcatgtatccaattgtatatgactcttatgaaaaactacttgaacatagaaaaaaagacaagactgataatagttataagcataaagttacggaagccagtattttatatccgttgctagcggtattttgcgctctgtataaattagatccagtaagccaagaactggaacaattcaccacagataaactagcacattgcacgttacaatattggtatccaaaccaatacagtgaacaaagtatgtacttaaacttagatatgcatggttctgcatcaactaatttcccgacgaattgcaatctagtactagagcacgtagcacaagagtgtgaaaatgctgattcatttaaaagaatgtccgccgtaactaaagggaaggcaccattgttactgacagcctgtcgctgctaccgatacccagttcctttccattaccttgaagattggttagtagattctctacaacgagcaacttcttctatttactcatag

SEQ ID NO: 99669 - DNA, 243 bp, Enterobacter aerogenes
atggtaactagggaaagcatgaaacaatggatcattgagtgtcttcaagagctgagtggcagtgcctatccacgtgaagtctcaaaatatatatgggataactatgaatcagagctaaaggattcgggcgatatattatatacgtggcaatatgatattcgttgggccgctcaacaattgagatacgatagtattctcagaccagtaaataggcgcagagatttaccatgggaattagcgtaa

SEQ ID NO: 99670 - DNA, 1899 bp, Enterobacter aerogenes
atgggcaaactgagactgacaatggcgcaggcgctggtgaagttccttgataaccagtatctggaggtggacggcgaagcgcagaaattcgtgaaagggattttcgctatttttggtcacggcaacgtgttgggcttaggccaggcgctggaagagaacagcggcgaactgcgggtttaccaggggcgtaatgaacaaggcatggcccatgcggccaccggctttgcccgtcaatcactgcgccggcagatcattgcctgcacttcttccatcggtcccggggcggccaacatgatcaccgccgcggcgacggcaacggccaaccgtatcccgctgttattactgccgggcgatgtatttgccacccgccagccggacccggtactgcagcaaatcgaacagagccacgatctgagtatcacgactaacgacgcatttcgtgcggtgagtaagtactgggatcgtattacccgcccggaacagctcatgagtgcctgcattaatgccatgcgcgtgctgacggatccggcggaaaccggcgcggtcaccttgtgtctgccgcaggacgtgcagggtgaagtctgggattatcccgagtccttttttgtccgccgcgtccaccgtctggatcgccgtccgccaagcgcggcgcagttggcggatgcggtagcggcaattaaagccagccgtaaaccgctcatcgtctgcggcggcggcgtgaaatattccgcggcaggcgaagcgctggtgagcttcgccgaacgttacgacatcccgtttgcggaaacgcaggccggaaagggcacggtggtttcatcgcatccgctgaacgtcggcggcgttggcgaaacgggctgtctggctgccaacctgttagcgaaagaggccgatctggtcatcggtatcggcacgcgctttagcgattttaccacctcctcgaaatggatattccaatccccgggcgtgcgcttccttaacgttaacgtcagtaattttgatgcctggaagctggacggcatcccaatgctggcgaacgagtcctggcaggcaggatggggcgcgcagattgcaagcgtgcagagccggcagatgaaagagacccagcgcgtctaccaggcggtctggcaggaaacggatttcgtaccagaaattgacgaccatattgaccgtgaatcggtttatcgcgaattccgtcaaatcacggattccaccctgacgcaaagcagcgttcttggcctgctgaacgagtcgctggcggcggatgcggtcattgtggcggcggcgggcagcctgccgggggatttacaacgcgtctggcgcaaccgcgcgccgaatacctatcacgtcgagtacggctactcgtgcatgggctatgaggtcaacgccgctctcggcgtgaagctggcgcagccgcagagcgaagtctattcgctggtcggcgatggctccttcatgatgctgcactctgagctggtcacctccctgcaggagcgggcgaagatcaacgtcattctgctcgacaacatggcgaacggctgcatcaacaacctgcagctggaacacggtatggatagcttcggcaccgagtttcgctaccgctcggcggaaaacggccagctgcagggcgggctggtaccggtggatttcgccacgatcgcttccggctacggctgcaagacctggcgggtcaccaccctcgatgagcttagccacgcgctggatgccgctcgccgtgaaaccgtcagcacgcttatcgacattaaagtactgccgaaaaccatggtccacaaatacggtagctggtggaacgttggcgtggcgcagacggcgctgtcggaacgtatccgtaaagtcgctgaaatgattaatgaaaaacgcgcccaggcgcgggattactaa

SEQ ID NO: 99671 - DNA, 1047 bp, Enterobacter aerogenes
atgaaattttcgccgttcgtaagttcaatacgaattaaaaagatgttcggtgagcaagaactgaacattgatttcaaacccttgaccgttatcgtaggtaaaaatggcctaggaaaaacgacgttattaaaaataatcgatagtttaatattaggtaaaaacattaaataccaagatttttgtgaaagcattgagttggtgtttagtgatggtaattgtatttgctatggcactttaaatgataacttcataaactcaattactaacaaagaagctatagaaaacttcacactacctcaaactataattaccaaaatgcttcatgacttaaatcacatagaaaactttgaagccataccagatgacggaaaagaagcatttttagaggcatttacaaagcagttccttaattcaggagaatttaaagaagctcttgcaaatactcttttaaaaagacttaaagaaaataagaatgatattttttacagcacacctcaaaaagaatggctccaaaaaaacctcattgtcagatatatatctacggtaaacatatctgctaacgcgggaaaagcaatggattttggcaatagtattgaaaaaaacctgctagatcttgccatacatgaagaaatacgagggatgattggagggaataacaaaaatgccatcgattcattcttatttggattaaattcatttcttaatgagtcaaataaaatagctcgaattgctcatggtgaatgcgtttttgagactaacacaggtgtacgccttcaattagggcagttgtcttcaggagagagacaacttgtttatattctggctaccgctgcaaatacatgtgggaaatcagcacttttccttatggatgaaccagaagtatctttacatctaagctggcaagaaaagttaatcgacgccattatgaacatcaatcctaagatgcaaatcattgcggtaactcacagcccaggaattatgatgaatggccatatggacgcatatgttgaaatgaatagtattcttaaggattctaaaaatggctga

SEQ ID NO: 99672 - DNA, 999 bp, Enterobacter aerogenes
atggctgaaacatcggatattatgcgaagtgagaaatatattcgattatacacaaaaattgcaacatctgatgttcaaaagggaatcgtgtatattgaggatgctcttgaccgaatcttctgggaaagagtttttgattatatttgtccaaatagatatattgtcaaaccctattcgcaaccaggttctgaaggaaagcgtaaacttgaacttgaatacaaaaatcttcatcgtaatctcttagtcgcaattgatgctgactatgattacttatgccctcagcgtaatgattacgctgaagcgttgcatagcaacccctatataattcatacatacttctattcgaaggagagttatattcacacatctgactctattgacatattaaccaataatgtgtatttgaatgtgaagaccactcatcaaataaataatgctttaaaactatattctaacattatatatgatgctttctgttatttttcttggttgcataacattgatgccaatcaattccctgagagtgagtttaatccctgcatagaaatacctagcggtataaagattttaaatgaagatttaactgtcaatggacatgctttggatttagttagagaatcaagtgtaaattatatagatcggcatatacaatatatagaaaacaaagatgattttaatcatcatattgaaaggctaagagaacttggtttgcaccaagataatacgcttcttttcaccaatggccattcgcttttagatataatatttcgcccttcttatcagatgttcatcaaaaaatgtaagaaaaatgataacgaatgggttactaaaaactacccagaggggcaacatagagctagactaaaccaagtaagaaatcattatgaacaaaattgtaaggaaacgacattaattcatcactgtcaagggtatacaaataatgaattttggaaaaaaatagttaataaaatagaaaggttagctaattcagataattaa

SEQ ID NO: 99673 - DNA, 312 bp, Enterobacter aerogenes
atggacaatgggccagaactggtctcactggcgctggcacaatgggccgaagaacatggcgtgcagctcgaatttatcaagccgggtaagccgacgcaaaatgcgtttatcgaacggttcaaccggacatacaggacagaaatcctggatttttacctgttcagaacactgaatgaagcacgggaaatcaccgagcgctggctgatggaatataacaacgagcggcctcatgaatccctgaataacctgacgccggaagagtaccggctgatggctgaaatacaggaactctcaaaaagtgcatggaactaa

SEQ ID NO: 99674 - DNA, 633 bp, Enterobacter aerogenes
atgttttaccctatcctaaaaaggcgaaataactatgataaaaaagatgatggcacatattatagatattctttctacagagatgcaattttagaagattgtcaggaacgctgtgtttattgcgaccttttattaaaggagcatgcttatgaagggatgcatttagatcatttcaggcctcaaagttttttcaaatcgctgtcaaatgacccacataatcttgtcatctcttgcccaaaatgtaatgttcttaaatctaatcattggccttgtgataaaacccaagataattcccccagtcatgatgatgacgtcggttttatagaaccgttttcagagcgcttaagcgattatttatatgttgattctgatggggttgttaaatccaagaagaaaactgcaaaatatatgatagaactactaaagttgaatcgtaaggccagggttcttttaaggaaaaaaagaatacagtatcatatttcaattaagttaaaagagtcacttgatcgacagatgaataacctttttgacgaactggttgacggtgtggtcagtaaggagttagcttctgcgaaatattgtaaacttaagcaggcgagcgataagatacatgatttactaaaacttctgtga

SEQ ID NO: 99675 - DNA, 633 bp, Enterobacter aerogenes
atgaaaaatgtaatatatatcgatgatgatagtgaagcacaagaagcttataatgatactttgcaggaactttttggggatgagttcgagcttatatctatagagccaaaatttgatatcaaggatatgatgcagtatcttcaaagcgtaaacagcgttgttgcatatattcttgatgaaaaattgaatcagttagggaaggctcattaccttggtcaagaattagccaaggaaataagaaatattaattcaaagatcccaatatatattttcactgcttataaagatgaattcgatagttcatatgggccagccgaaattgaatatgttatagcgaaggacgagttggcttatgaagataaaaaacactcattgtctgcaaagataaggcgccatcataatgtatttaatgatgttttatctgagagggcacaaaggcttgatgaattgttgattaaatttttaaacaacaatctgacgttagatgaacaagtggaatttgaacggttaaatatgttgcgttcaagaagtattgatttgcaagaagccgacttagctaaagaactgcaatcttctataaatgaaactgatgaaaaacttgcagaaatagaacgtttactaaaaggtgattga

SEQ ID NO: 99676 - DNA, 2199 bp, Enterobacter aerogenes
atgaaaaaactattaaatagctatgcttttgatttatctcccagagtaccgttgcaacttggtcgggaaagtattgctagttcgagtactgcaataaccgaattggtaaaaaattcttacgatgctgattctaatttagtggaaataagttttcataaattagataagcctgttcctgtattgatcattgaagataatgggaatggaatgagccctgaaatgcttatctcatcttggcttaagattgggactgaaaataaagttagaaatagtatttcagataaggggcgaattttaactggagcaaaaggtctcggtcgacttggtattgacaggttatgtcgtcgaatgatcttgcaaactaagaccaaaaattcagatacaatacttcaattagatattgactggaaaaaatatgaagatagtggaaagagtttttttgatataaagcataatttatattcattaccctttccatattctgataaatatggcactgcattaaaaaatggccaagggacaaggattatattagttggtctaaaagatgattggacaggttatttatcgaaagacctcaagcgagatttaagattactggtatccccgttttttgcaaaagatgaatttcagataaaaattgcaggtgattcagaggaatcaacacgtttggattcttctgaaattcttgattacgcgagatggtcagtttcttcatcgattaatgatgatgattcaatatcttgtacgtataaatataataatgaagaagtcaaaacaataaatgaatcctgggctaatttcattactaatagattttcaaaaccaacctgtgggtcattagaattcaagctttactttatccctagagaatctgtcaatgatatggatttgaacgtcaaacacatacgttcatttatggatgcgaatcaaggcgtacgtatctatcgtgataactttagagtcagaccgtatggcgaaccctcaggaaaaggtgattggttagatttgggtatgcgtaggataaaaaaccctgaagggatgaggcaaggcaattggaaggttgggccgaatcagattgttggtgccgtttttataaatagagataacaataaaacgttaaatgaccaggcgaaccgagaaggaattgttgagaatgatgcatattttgatatgcgttcatttgttttaaaggtaattgagcattttgaattattagctgtaactaaagcacaatcagaaatagaacctcgaccaactgttgcaatcaataacttaaaagaaagtaattctaagaccaatgatgctataattgcactgaaaaaacaattaaatgaaagtattaaaaataaaaaaacaaaaaataaagatctaaaatatattgctaaaaatatgttaaaggtcgcagaagaacaagaaaagaaaactgaagaatttcaggagttagtagaacaaatagaacatgtaaaagatacaatggcaaatctcgcatctctaggaatattaacagtttgtcttggtcatgaaacaaaacagcataccagtatgtcggttgttaacatatccaacttaaaaaaaatgattgaaggagatataggaaagttagatgttaaaaaggctatggttaaggttaatgccttagataatagtattcgttatatttccgattttgcaggctttgcgctaagtaatgtaaagcttgataagcgtaaaatgaaaaagattaacttaagagtattagttaacgatgtaattaaaatttttactcagtcacttaataaaagtaatgttgaggttgtaaaggattgggatgaaaacattgatttctatgtgaggggatttcaaattcattgggaaagcattattatcaactttttaactaatgcgttgtgggccctagagggaaagggaataggctctcgctgtataaaaatagccattagaataaatgaagataaaaaagatattgaactacgattcatggatagcggtcgaggtatcgaaaaaggaatagaggatagaatttttgatacaggttttagcactaaaaaagatcctaaagggactgctacaggcacaggaatggggctttctatagttaaggattttgtggttggtaagcaaaaaggagaactaaaagtcatcgcggcaggtgagttgggtggtgctgaattcataataaatgttcctgaatactga

SEQ ID NO: 99677 - DNA, 1305 bp, Enterobacter aerogenes
atgaatagttttattaaatacaatgaacaactaagaaacttatattcatcatatattaatgaagcaaatacagaccattttgaaaaattttttaaagaaaatgatccgcatgagtatttgcggttgaatgaaagtattaactccttaagagatttggggattttctttacaggagaagaactgtcagcagaatgtgctaagattatagcaagtactttgaatgaacattcaaaagtcattgacccatgctgtggtgctgggaatttgttagttgcactaactaagtttttgccagtttgcaaaacactaacagaaactcttacaaaatggaattctctgcttcatgggtttgatttaattgaagatttcgtcgacgctgcgaaaataaggataatatttcaggcattaaatcgtggtgttcatattgatgaaaaaaatcttcaagaaaatatgaaaatcctcaccaatataaaatgtaaaaatggtttggatgatgatgtttcgcaggatgcgtttacgcatgtccttattaacccaccttataatcaatctcttttgaaagagtataaatattggagcggcggtaaggtaaaccttgcagcagtctttgttgataagtatataactgatgctaaaaaaggtatgcatattgttgctatacttcctgatgttctaagaagtggtacgcgatatgaaaagtggcgttgtgcgattgatcagttagtatctggtgaaataaaattaaaagggcgatttgataaaaagactgatgttgatgtgtttatattaaatggttttattaatgatattaatttaggcttaaattgggtttcagaaaagaaaaaataccagcaattatctgattatttcgctgtttccattggaaaagttgttccatatagagatccgcaagagggggaaccccatgcctatatataccctggattattaaattcttgggatgaaattgatagcaatgatatcgtttcaatcaggaggcatagaagcatacctgttttgccaccttttattaccattaaacgaacctcttcaccgaaagacaaaaatagggccggggctcatttaatatatggttcaaaacctgtatatgtcgaaaatcatcttattgttataaaagctaatgatgacaatataactaaatacaaaaaattactagaccatttgaaatctgccgaagttaatattttccttaatgatgtcattagatgtagacatcttacggtaaaggttgtaaaggaaattccttttaaattagaggtaggtgatgaaaaaactattaaatag

SEQ ID NO: 99678 - DNA, 213 bp, Enterobacter aerogenes
gtgggctttagttgtctgatctacaatcatattcccgagcactggggctatatgattattgaaatcgcggcggttaactttgatttttaccagaccttcagggatgcagtagtacttctcccagtaatcgaatgcttctttcactgtaagcgcttctactttttcctgtttctcgagtactacttgccgtctaggatcaagcccttcctttaa

SEQ ID NO: 99679 - DNA, 405 bp, Enterobacter aerogenes
atgatggcgcaaggtacgctacaactatcgctgaccttcaatccgctgcatgcgcagcaaaaagccgccagcggcgaacttccgcaagacagttatagcttcggttttaaacaagggatgctcggcaacgtgcattttgtcgctatccccgccaacgcccgcgctacggcgggcgcacaggtggtggctaacttcctgctgtcgccgcaggctcagctacgcaaagccgatccacagatctggggcgatcccagcgtactggagcccgaaaaactcaacgacgcccagcgcgccgcattttacgccgtgcaaccgaaagcgacgccgccaatgctggctgaaccgcacgccgcctgggttgacgcgctggagcaggaatggttgcgccgctacggtacccactaa

SEQ ID NO: 99680 - DNA, 2142 bp, Enterobacter aerogenes
atggctggcgagaaaaagaggccgtattgcccgcgtattgtgtccgagaacgatgtgggagtgcataaatcactggggctggaggcgaagacctgcagggttggcattccccgaccgatgccggggatagtgattttggtccatggcgtgaacgacgtcggcgaggcgtaccagaatcaggagaaggggattattgccggactgaagaaacggcttaatcggccggatttttacgcccacgaatggaaagactaccgaatcaccgttcccggccgttcccccatcatcccgttctattgggggtataagcctgtcacgcgtgaagagtacatgggcgatcaacagcgttaccggaatgaggtcagcaagctacaagacagcgcgcacctgccgtttgacgcttaccaggaagataacgccgataagaaagctgaactgggtaacgatggcaaaggtaggtttaagtaccagaacgacaactttaaaaatgcccttgatgttaactttgccaaagggggcgggacgttcgcgaacgccacaacgaacatcccggatatgctcggaccgggtgcgggaggggtagcgttagccgcagctggatttagcacgctgtacatgaacggcggtgattttacgcaccctattttccctaatccacatcgtatttatcagttttttgccgcgcaacgtctggccgatttgatcctgacaatccgaagtgagccagtgacggaaaatgatgtgattaatatcgttgcgcatagccagggcacaatcattaccatgctggcgaatatgctggtaaaacaggccggaagccagccagttaactgtgtcattttgaatcactcgccgtattcgctggaagggcgtctgagtgaagatattcagcccgggcatcaccagacggataacgcccggcaaacgacctttaaaaatttttgtgcgttgatggcaactcagtacaaaggcggtgaaatatcagaagctaacttgctggcaatggaaggggcctgtacgttacgaaaagcgtcagatagcccactgcggcaggatgaaaagtaccgtcgggacaataatggcaaggtctataactatttctgtccaaacgatggcacggtatcgctgaagaatattcagggaattggctggcgggggatccccaggaacatagccagtgctattcccaatctgtatcaacgggtgttctatcagcatgggcagaccggaatcgccccgaccgggaagccttttgagttaccgccatcacataaaggggatgcggaatatagctctctcaccaacacggcttataccgcgcatgatgttgtcgttaatggagaagaactgccgcagccgttcgtctttaaactgcaggggcaggataaccatccggacaatgatccgaaaacgagcgataaaccgtataccgcgtatatcgatccggacagtccggatgcctatatctcctattcagcaaaagcctacgctatcaaacgaactcgcagcgccacctattcgcttagccgttacgcaagcctgagttggcgccctggccatattctgacggcggatgagctgaaaatggaaagctatgagcgaaaggtagaagttattcatggtgagttcattggaacgaaagacttttctcaacttacgctgacatggcttaaacctcgcgaagagcttgaaaacgaatggcagaaagccgacccggtgggttacagccagcactcatcgatcgttatgagcgaatttgccacatcccatgctatggcgtttgacctggcaattggtccatgtcgttcatttgactataaagcgggtaagttctgggaagatctactgcatcgtgcagactggcgcgatcctttgaatggaaatatcgcggctaaagaatattaccgtacagggaggcttccgggggctcagacaaagaatcatatgaataagccggatgaggtgcttccacatggcaattatggggtgttaaacgaatttaacaatgccaccagggtgaggccatcccgcgacctggctgccggtaatcaggaagtggcaaacctgcagtgggagatgccgaaacccaaaagtgacagggaactgggtataggaaaccaacggtcagcgctcgatatctag

SEQ ID NO: 99681 - DNA, 735 bp, Enterobacter aerogenes
atgacattgcaacaaagcgcactgacggccggcgccagtaatgtggataccgatcggcaaaatacgctcggccagacgctgaatagactcagcggtgcagctctgctgacctatggcgggcaaggacaggcgcatgtgaccccggaaagtctgcaactgtccgccggacaggatgtgattacgacggcaggtcgtcacgccagtatgaacgtgatgaagaaattctcgctggccgttggcgaaacactctcattgtttgcccgcaagctaggtattcagatggttgccggcgccggggatatcaccacgcaggcgcagcgcggcgccatacatatgctctctcagcaggattttacgctaaccagttcggacgggagactgcatggcagcgccaaacagggcatacaactggtgtgcggaggcggcgggatccgtatcagccctgatggccaggttgagattttctctcctgtcggggtcgatattaaagggccgaatctcaggtatctggggccagaaagcgcgcaggtgcaagcacctgcctttgataaaggaacctttacgcgtcgctatcaactgcatgcttctgacgatccggaacaggttctggcgaatcgtcctttcaggctcaagagctcaaccggcgaagtgctcgagggcgagacggacagcaatggttgctctccattgctcgattcggccgatcttgattcgtacaaactggaggtactgtaa

SEQ ID NO: 99682 - DNA, 543 bp, Enterobacter aerogenes; identical to SEQ ID NO: 88303

SEQ ID NO: 99683 - DNA, 2640 bp, Enterobacter aerogenes
atgaatatccctgttaagatattaggggactgttcgtatgcattttgtaatgttgatgaggttgatgagcggattgaacgtctaaccttttatttgtttgcctatctcgttccctttgagttgttatttaatgctgaatatatacgctttagattagcttcaccatctgaacatgaaattataaataagcatattttttattatttatcgacacgaataaaacagagcgttattgatatgaaaacatctactacagatgtcgtagaaaatggaatgtatgagcgagaactattgaaagaactcgaagaattgaagctaaaaaatcgtgagttgaataatattgtgagcaggctagaatcagaattacagcaagaaaagtcgttacaaatggaaaatgacaataatgatatactcgttgatgttattgtgcctgtttatggtggtttacaggaaactcaggaatgcatagagtcggctatatctacactcccttcatgggctgaactaatagttattaatgatgcttcgcctgaacctgaattgacagactggctacgtaaccgcgcaaaagataaaaaatttaaactacttgagaacgaaaataatttaggttttgttgcaactgtcaaccgtggtatgaaactacattcgaagcgggatgttctccttttaaatagcgatgttgaagtcgctaataattggctggaacgaatatatgatgcggcttatagccgtgagcgtgtaggaagtgttactccattttcaaataatgcgacgatatgtagtttccctaatttctgcgaagataatgagatttttgccggaatggatgtccaggcactcgatgatgagtttgaaacttatggcaaagaaaataaccttgttgaaatacctacaggtgttggtttctgcatgtatattcgtcgagattgcttaaaccaggttggatattttgacgaagaaactttcggtcgcggttatggagaggagaatgactggtgtcaacgtgctgcaaaagctggctggccgaatttccatcaattaaatgtctttgtttatcataaaggcggagtaagttttgctggagaacagagtccacgtaaaattcgcgcgatggaactcctcaatgaattacatccaaactatacccgtgatgtgatggagtacatatcaagagatcctgccaagcaagcacgccagcgaatgttgctgcgcattctggcgaaagcaaatcgtcagaaaattctgctagtgtctcatcatatggggggcggaacaacttatcatctcgaagaattgtctaatttttacaagggaaaagcgtgcttctttcttttaaaacctaatgctgaccacagtagtgtagtgatctctttgagtgctgatgggcgcacttgcaaagaaagcatctcagttaatattgataacggctatgatgatctgttgagattgttacgcttcttaggtatatcacatattcatttccatcatctgatgggaatccccgagcagatcaaaacactgcatttagatttaaaatgctcctatgacgttacaattcatgactacttcataataaatggtaacccatcgttaactgataaaaatggtctctttgttggcgataatgctacaaacatggacgaaatatgcgcggaaacctacccgttgcctatagggatgtctgcggccacatggcgtacaaatatgaatgcatggttattgggggctgagcgagttatttttccttcggctgataccaaattccgcgttacaagatattttcctgatatatcagagaaggcggttatcgcatggcatcctgattatgaaaataatgctccgtatccagatgccagaaaaacttacaatggcggtcggaaactaaaagtccttgtactaggtgctatcagtcgtgagaaaggcgctttcatgttggatgaggtagcgcatgcacttaaaagagagaacatcgagttccaccttcttggctacgcttgtaataccctaaacgacgcagtcatttgccatggcgcgtactgtaatcatgatttagagcaaaaactaaatgatatttctccggatgtaatgtggttccctgcacaatggcctgaaacatacagctatacgctaagtgctgcacttcaatatggcttaccggttgttgtaccaaatattggtgcattccatgaacggctcactggtcgacagtttagccggattattgattgggatatatctttccataaaatgagcatgttatggcgacaagctatcgcggattttgatggctttttccagcaacataatgttgacccgatgccggatgtttcatcagaaattcgtgttgcccatttttatcgcgatttttatttacgtgatacatggtggcgtgaaagtgaactaggcagagttgatattagaactttaatagatagtttctacgcttcagagaacatcataataactgaaggaatagcatctcaacctcaaggtaggaaggaaaaaatattagctgtcttatggatgttacggcaaaaccccgccttatcttgggtaactaaaattattccctaccgtcttcagcgatatgtaaaaagacaactatcacgtcgagcattacatgaaattgttcgataa

SEQ ID NO: 99684 - DNA, 1791 bp, Enterobacter aerogenes
atgaaacaaaccattttcattttaggcatgagtattttaccgatcactgcattttctgaaagcacgctgatatcccccatgatcggaggtattgatatttgtcagtctgcaataaaaaaagggattagaaacacatacgaggcagcaaagtattgccaatctatcaatgaaacctcttccacattgatcgaaaaaagactatctgagtttggaccggaaaaaagtaaggacggaaaatttcaggtaggctatatgttaagctttccattattgtcttatgtaaacatgaaccctgatggttcctataaaatcgataaagcaaagatacaatatcgcataaaattacttcacgacactaaaagacaagctgtaatttaccttttttcgaaccatttttccgtttctgagggtgcaaaaacagaagaattaatatctaaattagatagtaaaaacatgatgcaactaagtgataaaattatcccagttgataattatttttccagcaaaacatatccatgggctattaatgcaagtaattcactcattgataagatacgcaaagacacaattaacgaggttttatcacagctctgtgctttagatataatagacaaacaaaaaattagagcagtgacagtccttggcgaagtacattatacctttccagatttttttaatggaatgggatatcatggaaaaatgaaactcaccgattattcagataactcaatcaaacgattcagaaactacttaattgaaaaatacaaaaacataaactcactcaatgataacatgggctccgaatataaatcatttgatgaaatcactccgccatcaaaagatataaatacaactcatctgaataacttttttgaacatcttgattatgcttcatctggaaagttagcaatatatggttgggcagcaggaaatgatcaaggcccagcaaaaatcaggatttatatagatgggaaagatgcgggctatgcagaaagcgggcttagtcgaatggatgtatatcaggcaattccaacattgggtacttcagctgtagggtatcgatattatcttgattttagaaagatgagcaaaggaattcacgttatagatgtagtccatgaaaataatggaaaactgacattaatgaaaagtatagatgtgcctgtaatggaccgtcaacaaacgaaacctgttcgtgtcgcagtcggcgttaaactccctgaagagaaaagcatgaaattctggaacgattatccagaatcattaaaaccggtatattacaatccattgtctgaggagttttataactttcgaaaaaaagaagtggccagggaaatacaaaaatatgcagatatagtaagcttatcatgtattggtaaggataagatattttctcatcaaattgctccaatggttaatgcagattggaatgaggaaaaaattgcagttgaagattcacttaaaaagaatactcattacaatataggattaaatacctatggttcagctttttatagtgagtatatatttaactggttgaaaacgtctggaatcaaacgctatgcactcccagaagtgcatcccatggttgaaaatgaaggtattatctataacgcattggaacgtcatcataataacggtgcaatattcattagcccctactatttagaaatcaagccagaaaattttggcgtcgataaagaacatgagaaattcagtattaatgaaaaaaacacagcctattactcttctagtttctatcatgccttacaaagaatcatgaaaaaataa

SEQ ID NO: 99685 - DNA, 981 bp, Enterobacter aerogenes
atgtcaggactcaaaattgttgtgattggcggcggttccagctataccccggaactcattgaaggtttgcttaaacgccaccatgagatgccggtcgcttcgctgtggctggtcgacattgaagaaggcaaagaaaaggtcgagattattgccgggctggcgcggcgtatgattgccaaagccgggctggccattgaggtggtcgcgacccttgaccgtgagcgcgcgttacgcgatgccgattttgtctgctcccagtttcgcgccggttgcctggatgctcgcattagtgacgaacgcatttcgcttaaatatggcctgatagggcaagagaccaacggcctcggcggtttcgcgaacgcctgccggacgattcccatcgcgctggagattgccgccgatatggaacggctgtgtccaaacgcctggttgctgaattttaccaacccatcgggaatggtaactgaggctattttgcgccatagcaaaatcaaaaccgtcggcctgtgcaacgtgccggtgattatgcaaaaaggggtggcagaattgctggaatgcgccgatgaaaacgacttcattatgcaggtcgccgggctcaaccactttatctttgtgcgccagatcctgcataaaggtaaagagtggctgccgcaggtgattgcgcagattaacgccgggcgggatccgctggtcccacgcaatatcccgccattccgctggccgccgcacttgctgcagggtttagggatgatcccctgcgcctatctgcgctactactacatgaaagacgatttactgcgccaggaactggcggaggctgatggcgaagggacccgcggcgaagtggtcaaaatgctggagaagcagttgttcacgcagtatagcgaccgccaatctggcggtgaaaccgaaagcgctggagggaagaggcgggcaatattattccgaagcggcctgcgaattaatgaacgctatccataa

SEQ ID NO: 99686 - DNA, 147 bp, Enterobacter aerogenes
atggcagcgagggtgtccaacaaggtgggtctggaagcggacgggcagaacttcctgctgatgcacgcgatgggcccgaacgtggccggggtgatcggctcggcgatcgccgccggggtgatgctcaagtacgtgctggcgatgtaa

SEQ ID NO: 99687 - DNA, 147 bp, Enterobacter aerogenes
atggcggcgagggtatccaacaaggtgggtctggaagcggacgggcagaacttcctgctgatgcacgcgatgggcccgaacgtggccggggtgatcggctcggcgatcgccgccggggtgatgctcaagtacgtgctggcgatgtaa

SEQ ID NO: 99688 - DNA, 216 bp, Enterobacter aerogenes
atgaaaaaagcgctatcggtagcattgataattatactttcaatcattggcatattttctcttatcaatattcttcaatcattatggtatattatttcgcttgaatcattcaatgcaataaatattgggttacttgtcggaaaaataatcttcaccgcccttgtttttatgggggttcgtattttaatcaaattgtatcgcgcatcacaactttga

SEQ ID NO: 99689 - DNA, 213 bp, Enterobacter aerogenes
gtgttaaataaaattattaaatacttatgtgtttatattcttttgattttttcattcattctattttttacaactctaggttattatatttttgtatgtgactggggtggtgatattatagcgctggcgaaaaatgtgtttcttttgatgttgcttattatcgcatctctcgccatatactatttcgcagagagggcaaaatcaaagttgtga

SEQ ID NO: 99690 - DNA, 561 bp, Enterobacter aerogenes
atgtctattccagaagaactttggatgttgtctaaagattttttagactctgatcatcgctggcgcaatgaaacagataaaatcaggcttatcagcctcattaaaaaaggtgtaacttcagaagaagtacgcagattagtgaatgtggtgataaaacgttatttatgtggtctttctgaagaacaatcgagagaacttctgataaaagttgggggttcgcaagttggtggtattgctttcaaaatggcatttgtgaacgagttggtttcgttgtttatttctaaaataattcctcgttttttagtgtccgtaggtgtgactggagtattaagtgtgggggcgtctatttcgaggtccatttatacatcatatgagctacgcaatttaaacaaagagatttataatcaattgcgaggaattggtgatttagatttattatattttctggttgaggataatattaagccatttatcattgcaatcaactaccaacaagctcatggcgctatagataaagaaatattcaaccatttcctatcaggagttggtcgtgttaaataa

SEQ ID NO: 99691 - DNA, 621 bp, Enterobacter aerogenes
atgtatatgctcgacaattatcagcgtcttagatggaaaccggggcacgtattaacttccgacgaacttaagatggcaagtgttgacaggaagcatacggtcattcatggggaggttcgtggttcaaaagagtacccggtgctgtctataacctggttgaaaacgcgtgaagagctggaaaaagagtggcagaaaactgatccgataagctacagccagcactcttccattgttatgagtgagtttgcgccgtcacatgcgatggcgttcgatttggcaatcggccagtgcaaatcgtttgactacaaagcaggtaaattctgggaaagtctgctgcacagcgcggactggcgcgatccgttgaatgaattctctgcggctaaagaatattaccggacgggaaagttaccagagataccaaccaaatttcatatgaacaaacccgacaaagtgctgccgcaaggggattacggcgtggtgaatgattatgccggtaagcgacctcaaacccgcaggccgaaggatattgatatgggtattgtcagaacaaaagactttcaggaaagaaagtttttgcagtgggaaatgccaaaacctaaaagcgacggccagctggcctga

SEQ ID NO: 99692 - DNA, 222 bp, Enterobacter aerogenes
gtgaaaagatttctttttaccactgaggtcaagcgagcagaaggttcgcagaccttcagagtggatgctgaaagcctggaagaagccatggagattcttgaaagtggcggaggtgatatttacgaacacgaagttgaggttgtcgatataggcgaatttaagttcgatcgcgaaactgaccttgctgacttcggtgattttcctgaaggcggtgcagcatga

SEQ ID NO: 99693 - DNA, 318 bp, Enterobacter aerogenes
atggctaaacgtatgcaagataaagaaagcattgccggagtttcatggctgattgtccttgctctgtcatgctggggcggtcttgtccgatacctgattgacgttaagcaaaacaaagccacctggagctggattaacgctctcgcacaaatcgcggtatccggatttacagggcttatcggcgggttggttagcgtagaaagcggtctcagcctttacatgatcctggtaacgtcaggcattagcggggctatgggctctgtggcgctgacttatttctgggaacgcctgacggggatgaaaaatgcaaacaattaa

SEQ ID NO: 99694 - DNA, 477 bp, Enterobacter aerogenes
atgcaaacaattaatcctcagcgcaaagctttcctggatatgctggcttggtcagagggtaccgataatggccgacaaccaacaaagaatcacggttacgatgtgatcgtcggcggttcgttattcaccgattactcagatcatcctcgcaagctggttacacttaatctgcgcctgaaatctacagctgctggtcgatatcagcttctggcccgatactgggatgcataccgcaaacagcttggcttgaaagatttctcaccagccagtcaagatgcggtagccctacagcagattaaagagcgtggggcgcttccgctaattgacagtggtgatatccgccaggcaatagaccgttgtagcaatatctgggcgtcgcttcccggcgccggttatggccaattcgagcataaggctgacaacctgatcgccagatttaaggctgctggcgggaaagtgaatgagcaatcagcatga

SEQ ID NO: 99695 - DNA, 396 bp, Enterobacter aerogenes
atgaataccttcatcgtcgatttgctaaaaaagatctggctgcctgtttttgtgctggtcgtgatctctcttctggcgtggcgggtaagttactaccgcgacaacgccatcgcctacaaagatcaacgtgataaagcaacggtcagggcggaaaccgccgagactgttagcaatagcgttgtcactgcaatgaacctcatcaatgacatatcccgggcaaccaagaatgcaaagaccgaactctcccagacaggtgagcagcgtgttatctatatcaggcaggcgcttgaaggcgatcagtgcgctaagcggcttgttcctgctgccgctgctgacagcttgcgggaatacgcggacggtttacgttccagcgccagtggtgccgataagcgctga

SEQ ID NO: 99696 - DNA, 252 bp, Enterobacter aerogenes
atgagctcattaaaacttgttagtactgtaaaattcgcaaatgctaaaggtagtgaagccaaatatgagatttatcacgatgcagtaagcaatgattaccaggcagaggtgtcatatctaactgacgtattgtctactgcgggattcactgcaagtgtatggtataaaactccgctaaccatctatcggctccctgggaatactatctcagaccttgaagatagttgcaaagaccattttgaaagtaactaa

SEQ ID NO: 99697 - DNA, 222 bp, Enterobacter aerogenes
atgagtaatccggacagggagggcattgagaaggcatacctagcggagtcgttgtctaccgagcaattgccgatattgaggtgcgccagtgcgatgttgcagttcaatgccagatggcccgcgaccagcaccatcagcatggatgatggtaccagtccccgacttactgacgcctctgaacgggactatgttaccctcagagagataattgaagtcgcatga

SEQ ID NO: 99698 - DNA, 906 bp, Enterobacter aerogenes
atgaacttattcgagaaatccggccaaagtgtgggtgacaactcctcagctatacaagttacaggtgatgcccactttggcaacaccactactgaggtcatggcaatatgccaattaatggtcaaaagcgaaatggcctctcttcgcgaagacgcattcgctttagtcgactcacgggctcaggaatttggcaaccaaattgcagaaaaactctctaaagatgttgatgaaaaactaagagcaaaactcgccgatcccgatatgcagtatactctcaatcaagcagtcgtacaggtcgcaagaaaggggtttgatgcaaaatcagaactactcaaagaactcatagtatccaaatttaaaagtactgaagaagaggaaaatctgattttagatcatgctttagacatcactcagaggctaactacaagtgaaataaaactcatttcacttgtttattatttccgttactgctctaaaactatgcacggggtcaacgttacaaatattgttgatcgtagaactgaagtcccgacagtagcaggactaacctttgaaacttgtttgaatattatggaccaagtttataaagattataacattgattaccaaagaataatatcaacaatggactcaatcaaaccagtcaacaagcaaatgcttgtaattaaaggctgcattaatgcagaacagagttatgagaaaaactacatcgacctcataaaacaaagaacaggaatagaaatgaccgatgaagagtcttttaagaaaaattttgcagcattatcgtcgataatagaagctttttcgatccaagggatcagcgagttgaatggatatgttttgagcccacttggacgtgtaattgccaaaaactatcttgaggcccacaatttctttactcattaa

SEQ ID NO: 99699 - DNA, 636 bp, Enterobacter aerogenes
atgaaaagaatagacagcacaagttatctttaccactgggttaagtctgaaccgcattcgaaatcagaaagagttgattatgagaatgcttataaagtgtttttggaaattttaaactgtggctatcttaaacatggcgaagtgattaagaccggttatatgccatgcatatgttttaccgaatcgccggaatactttatgcatcgcgacacttcaaaatatcaaccatttgggttcaaatttcataagagtaaaatctttgaattaggtggcagagctgtaatctatacccctgactatgaaagagagctgattcatgctgatatgcaatggcgatatatgcggcatgatccttttgctatcagcaatagaactccatatggggttgattttacgtgggaaagggagtggaggcttcctgaaccagaaattgacttaagcgaagggctaaaaattatcgttccaaatgaagaattctttaatagaacgatagatgaaacaaataagtgggttaataatagctcgtgggaaaattcacctgattgggggtcaactccaggccttcctgatgagggcttaagtagatatgtcgatttcattcaacaaaaattaatcctgccagaagtgtttgactaa

SEQ ID NO: 99700 - DNA, 459 bp, Enterobacter aerogenes
atgagccttgatggattctctcgagataaagttgaatggttcaggtcgtgggtgctaaaaaagaactttttagaagtggtagatcttcattttcaactatctgaggctgtaaaaaagcactaccgactgcgcgcagatcagaaacatttgtctattgcaattagcgcttgtgaatacatgatttgcatttctgatattgccatggatgcattgatagccaaggcgctttatcaaatttatgaatatgagcaagtgataggcgattatccataccctaaaaccttttaccggcctagtcaccatggttactatcaactcagcgtcttgcttcgaaagtgtaagaatgttaagcgtgaagaacaattgaaccgaaagatgcgtgaagaaggttggggtggcggggaaattgaactatcccaactgacaggaagtaagtttatgggttttaaaatagggtaa

SEQ ID NO: 99701 - DNA, 330 bp, Enterobacter aerogenes
atgaaaaaaatagctttagtgttgatgttaacggtttcttttggcgctgcttcagccactacgatttccatcccgaccgattcgaaagccaaatacaccatcattgataaaagcttaaatggttccatggcaaccatcacgaccatgagagaggggccatcagggacatcttactcacagcgcctgtatgattgcacagcgtggaccgtgaagtatcttggtgatggagacacgcttgagcagatgaaagcgtcaaagcctgatgaaggcatgtcttcaatagttgataattcaatagcgtattatataggccaacgggcctgtaaataa

SEQ ID NO: 99702 - DNA, 195 bp, Enterobacter aerogenes
atggcggagatcgacgaattcctcggggaaaatcccgtgacgtctgttaccgcgttgaaagaatccaaaaccgaaatgtcatatctcactcacgccgaagttgatcggcttttgtcgttatgttcgggtgattactaccgcatagcgattttgctgttgcctaccggtgcgaggtgggggaggcatacaatctga

SEQ ID NO: 99703 - DNA, 156 bp, Enterobacter aerogenes
atgtccgttaagaaactcgaagatggtcgctatgaagtgggtgaaggccgcgcgggcgcgatggaaaacgcattcggcggaagtttgacagaaaggcagaagcgcacgcttttgagcgcagtatcattgccaaatttcagaatcatgattatctga

SEQ ID NO: 99704 - DNA, 234 bp, Enterobacter aerogenes
atgacacaattacaagaaattgatttaacagcgggatctcaacatttacgccagttcctgttagataatatccgcgttgcccgcacatgcaaaatgacagccgcgcaggctgaaagcatccgcgatatgaataccgaagaactgcaaaaacagattttcgttacgccgctcgagtttccttatctggtcgccacgtctgggcgaaaggtcgcgcatttgcacacgtctggttaa

SEQ ID NO: 99705 - DNA, 2289 bp, Enterobacter aerogenes
atgcttgatagaatacaaaggataacaagtgttggtttatttaatgacattaaccctactgggatttcttttaaaaaaacatctttgatttacggggataatggcagggggaaatccacacttgcttcaataatgcgatcttatacaaactcagcccccgcaattttgttgagaagaaagactttaaattcagctctatcgcaaatagttgatttgcaatttactgggggaaggagagccaaattcgaaaatgatgcttggaatacgaagttttctgactttcacgtattcgatttggactttatcgatacgaatgtttactctggtggtgaaatcaggccaggacatagacaaaaactactaagttttgcattaggaaattcagcggtaaacgccagagctgaatttgatacatctagctcagcagccgccgaatgtacaagattaaaacgagaggtagaggcaaaattaacaggatatcgtggtcaggcaactctttctcaatatataagattaaggaatgaagataatattgatgatttgattgcggcaaatgttgctgagcaaggaaagtctcaacaaattgatctaatcaaaagaaaaaacaaattaaaaaaattaaccgtattcagttctaatttcgattcttttttcaacacaatgtacaaaaccgttgagaaaattgatgaaaatgctggcgcgatcgtgaaagagcattttcagcaccttcctgctgatgggagcgaaaaatgggtcagtgaaggccaacgatttattcatgataatacctgccctttctgttctcaaaatgttgaaggtataagcttaatagatgcttataaaaattatttcaacgttgaatatagtaacttcatatcagaaattgcttctttggagaataagagagtatcactactatctaaattcaacttgcccgctattgaacaggagtatgtcaatgtaaatgatggtattcattcatggaacgagtttttaacgttaaatattccgagccctgatttcgaaagattgaaagaactgaaaggcaatcttgaggggctattgacagaatgtgttcagtttaaatcatcaaatcctcttttgaagttagatgttaagtatgaagagtctgttaaagcaataataaatgaaatgactcagtgccttatcgaattcaatactctaattgatggtttgaacaaccaaattgatgagtatcaattgagtttggaaaatataaatatccatactcttactcaagaaaatgcaagactaaacacaatcaaaattcgacattcaaaagcagtgctggatttaatcgatgagtacactgtagcaaaagctaatgaaacggctgctattgcgacgaagactgcaaaaagagatgcgctaaatactattatgcaaacgactcttggtagatacgagtctgctattaatgagttgttactcaaattcggtgcggcatttacaattgaagagataagttataattatcttggaaatggtgaaccaagaacagagtatgggttaaaattaaggggaagtgaaattacattgcaaggggaagatgcaggtttcaaaacctgtttgagcgaaggagataagcgaacactggcttttgcattcttcattgcagtaatttcagaagatgaaagtttaagtgacaaaattgtacttatcgatgatccaatgtgcagttttgatactcatagaaaacagcaaactattacagaattacggctcctaaatgagaagtgcaaacaattaattatactggctcatgatgcttactttataaaaagtttgagggatgaattcttgaggcggggagtggatgtaaatgctctttcattgataaaggtagtgcatgcacaaggacaattcagtaacttgatggctttaaatcttgaggcagaatgcgagagtccttactataaaaatcataggctagtgagtggttatctaagtggagagcaattcaatccgcaagatgtcgctattgctatcagaccactactggaaggttatttacatcgtcgattccctgggcatatatctccaggaaagctttttggtgaaatcattcagttaatattgtccgcagaggcgaacacacctctacataatgcattgtcgattactgatgaactgaatcaaatcaatagttatgctggtagattccatcatgacacaaatccgaatgcggctaatgagccagttgtgcatggggagttgtctgcattttgttccagagcactcaatattgtttatcgtggctcgatttag

SEQ ID NO: 99706 - DNA, 312 bp, Enterobacter aerogenes
atgggctttattctgtatacctgcgagccaaatttaacgctggaaatggaaaacgaaatcaaagacaagattgcgcagtccaaagagctgggcaacttctgcaacatgtttaccaacatcccgaaaggcgacccagacggtgtcaaaatcctgccggtgggtgaggccagcgcaatggacgaatttcagaacatcaaagggatcaccgcgcaggatatctttactgcgcaccgcttccccgctgggctggcgggcatcatcccgactaattgcgcggtaatgggtaaccctgaaaccgcctgcacgacctaa

SEQ ID NO: 99707 - DNA, 219 bp, Enterobacter aerogenes
atgatgaatcgtgtcgccgatgtgggggcaaaatttgcccgctggctgggttatatcaccttgggcgtgctgtccttcgggctggccggtgcggcaaccaatattgtgatgagcatttttgggttcacgatggtaggcctgaacgctatcgccaagttctgggcggcgcatggaaagccctgttatagacccttaacttgctgcgcccgtcattactga

SEQ ID NO: 99708 - DNA, 294 bp, Enterobacter aerogenes
ttgctgcgcccgtcattactgacaacccgcatcggcctggccgcgctgtggatccagtcaaaattgctggacctgtggatcggtgtttgccgcgtcgcgctggccgcctggaatgttgtgttaaaagtcggtgcggttgccatgcgcatttatggtgtggcgaccatgtttgccggtgtggcaatgcaacttctgaccagtccgatcacactgattattgctgcgctggcactcctggccgcaggtatggaagtgcaaaaaggcccgctgcatcgcggggctttgtctttgtaa

SEQ ID NO: 99709 - DNA, 456 bp, Enterobacter aerogenes
atgtccaggactccctatactcggttacgcattgagggcttccgcaaagcagaggcttccctgagacttgaaggaatggaccccagtggtacgccactgtacgagtccattaaggcgcgtattatttcaggtgagcttacgtatgagcaggggcgttcagagattcttgcatactacacaaaagcagataccgccgggcctgtgacagtgggagaaattctgacagaggaatttttaaaaccaatgaacatgtctgatgatgaactagcagaagctatgggtatttctcgacaaaatgttgaagatattatctgcgatatgcgccgccttacggattgtgaggcccgtatccttgctgacatatttgggactgatgaggacttctggtgcaatttacgggggctgcaagatcgccgaggccacatgtcagttttagaccgaaaacaaggggcgtaa

SEQ ID NO: 99710 - DNA, 1005 bp, Enterobacter aerogenes
atgtttgaagaaacaattcgcgcactaaaaacgctaggcgacgaagcatctatcgtctcaatttctacagacgatgacgattactttgatcgcgaatgtccctcaccagaatgcttagctcagttcaaggtcctgatggaagattggaagggcaaggttagggatgaagaggtattttgtccattctgcggccatatcgctgatgctcagaagtggtggacgcaggagcagttgaatcacgtgcgggacgttgctctggcgaaggtacaagcgactttaggtggtgcacttcgccttgatgcgcaaaggtttaatcagaatcaacctaagggcggattcgtctctatgagcatgaagattgacagcagacctcaacatgttccgatcccctatgcagcggcagaacccatgcgactcaagatcacgtgcggagaatgcggatgtcgatatgccgttgttggagctgcgtatttctgtccttcttgcgggaaaaacgctgctgagcttgtcttcgatctcacggcacaaggtattcggcagtcgctagaagcggttgacgtcatcagagatgctattgcagacgcagacactgctgagaacacgtgccgtcttatcgttgagagcgctctgctaaacgtagtcacggcatttcagagatttgcagaagcactttacgcgcgtatagcgccagcagtgaagaccaggcgcaatgcatttcagaaccttgccgaggggtcagctctttgggccgctgcgttaggaggtggttacgataagcatcttacggacgtcgaaatggaacaattgacaatggtcttccaacagcgtcatttactcgctcatactcagggcgttgtcgataatgattacattcggaaaaccggtgacacacggtataaatctgggcagcgtttggttatcaagcgcgaggccgtggttgaagcgcttaatctggtcgaacaattgacgttttgcatccgtcaggacaccagagatatagtgtga

SEQ ID NO: 99711 - DNA, 2760 bp, Enterobacter aerogenes
atgaattttagcgaactatcaacactgccgatactttcatggattgatgttgcaagacgactttccgcaacacctatgagagggagtatcaataaatcaactcaatatgatcctcctataggacttattgcctctgaggtcttctggaccggactgactctgaccctggaaagcccagagaacattgatgatgtcaataagtggttgcagagtgttttcggcacatggctaatttttaacgacgggattccatctatacggctggacggcccatcagccagatctgttttacgtgtgacttacgaatattcgggtgtcagcaaatctaaaccagtatttagaccaagcgcatcacttgaaggaaatcgaccttactcaatagaatacccggtacgcaactgcatatcccccacagttgttgcatttcacagcgtaaagggaggggttggacgtaccactgctgcgatggctttcgcgcagaacatgatttccattctaggagcttctgaaacagtattattcgtagatgctgacttcgaagctccaggggccagctacctctaccgaacacgcaaaccagaggttaacatttcacttgaggatctaatggctatagcgcatgcagatgcgtctacagacctcagttcaaccattgatttcgtggctgcgcaaatgcttgatcagcgcataggtaacgtattcgtcttgccagtaaagcgcctacttgacgacctaacagggttcactattaggcccgagcacttagttaacgcgcgccgcaatcaaccttatctcattgtagatcttatccgtaagctcgcggagaaattgagctgcaaacttgctgttgtagatcttcgtgctggtctagtggatatcgcgattcagtttttgactgacccaacagttgaacgcgtcttcgtatctacggcaagcggacagtcaattaacgcattaaaaggaatgctccatactattgggcaggtcgaaaaacaagccggcgaggctggacggcaaccttttgttttaataaatcaaatcccccgattgcagtacgatgaccccgtatttcgaggaaaattacaagctcagttagaggtccaagcagaaatatcattctttaccccgcaaatttcagaagaccaagacgaattcactgtaactcccgctcgagagagttcgcttgtatttggctttcactttcactcttccgatcttgtggcctctgctgacgactgggaaacctacgttacagacctgaagaaaacaggcttttcaactagcttaatgtctgaaatggaaagctgggtagttgggcgtcgaattgcgacccctaatattccagcaccatcagagttgaaaattgccacagatgaccgtgcaaatgcatgcgccaagcttgcgacgtttgcgaacgaatttgagtttgcagagacggcaaaaagtgtacaacgtcctttaattactcctccgttacagcgcttgttaggtgactttgttcagcacccccccattgcagttatggaaggcactaagggaacaggcaagactcttacttttcggtatcttttagaacataagacttgggctaaagcagcagcagcgatggtaggggctcaggcacctacatttgaaggtctgtttttacctgtcctcggctcgatcaatagctcggagaacatgcaaagtctcgttgcagagggccgtgctcaagtagcatcacgactagggaatccttcaccaggtcttttttctactacaacaactaagattcgtgagggaatcaattcaggttgggatattactaaatggaccgatttctggcttacatcaattgctcaagctgcggggttcgatacttgggaaactttcgtagaagcggtccgtacctcaggcatgattcgaccaattgcgatgtttgaaggactcgaagaggtattcaccaatccttacaccgaagaggtacaaggagatgcactgagggcacttcttcgtgagataccgatcaggctccgagaggaggctggacgtccaatcggcgttctaatcttcgtgcgcagcgatatggtagaggcggtaattgaacaaaacgtccagcaatttagagcctcttatcgcagctacgcgctaacgtggctcgacattgacattcaagagcttgctgtctggcttgtaggtaatagtggagcaataccggagctctggagtccagattggcgagctcgttccgaactacagcgagaggctgatttacagcaaatatggggaatgaaattaggaagcgactcaagtagggaggctcgttcgaccgaatgggtgcttgctgttttaaccgatctcactggtcgtttgactgcgcgtgatcttgtcaggttcatgcatacagccgctcaaagtgcacgtgaacaagtagttaatgaccgtttactatctccaagttcaatgcgtaaagcagtggaatatacaagtaaacaaaaggttgacgaatatccgaaagaagttcgtgaactcttacccatctttgataagctgaagtcactccagagcctgacaactccctttgatcgtgctgaagcggcggcaaacggcttagaagcaaaagaactagatattcttgaaaaatatggtgttgcctatgctgaagatggaagctttgaggttccagagcttttcagaattggactaaatatgaagcgaaaaggtgcgagaccaaacatcattagtcttacacgtaaagcccgagagagagctagagcgtag

SEQ ID NO: 99712 - DNA, 2331 bp, Enterobacter aerogenes
atggaagaagaacgaaagaaggccgttgcttctttattaaaggatatggaatccaatgctgcccgaatgcatgaattgattgtcaaaatgcctccgcatgatttgctcgggtacatctacgctcagaacatgatgaaaacaatgggaaaccaaattgggggcgaaaagcaaggccaagagggtagcccagctgacgtagttaatgaaacccagttcttactggagtatgttcacgcggttctggcatctgaggccgctcctgcggatatggaattcgacgaagcactgtgcgctgagttgtttgaatgtagccgaaaactgagagagctggccatgttctatgctatggccacctctgctgataccaaagatggcatcttcggtcctaatacggccgacattgaattccgtgctaaatccacttgggtcatgatacgcgggaatcgttatcaagttttggagggcgagttctatcgctacgttctggcgcctcacaatgatgttttggaggaggtttacggcattggtgccaccgatattgcggaaggctttcaggccatggccgacgctactcgttctgggcaggccaacgcaatcattgagatgatgaagcagtttgaggcggtaaaagctttttctatagagcaaagtaagtctatggaagacgctatggagtcatggattgctgaaaatgaggagcaatccaaagcggcccggggggcgatggaggatatgcttcgcggcggtattgccaatgtaagccgtcacacgaagttgccaccgacattgctagcagacttgtcataccagcgaggagaagatactgagttcttcgcagcgggcgattttaaggggacaccctttcggacactgccagcacgtaagaaacctctaattcagcttgggtcggactactacgcggtcgatccctgttttgctcgcgatgcggggtatcgtgcgctcctatttaatctccttcggcgaaagccggattacaataaggcctttaaagataggcagaaaatgatgagcgaagcagcctttgccgacattctctatgcccagcttccgggagccacagtccttcaggaggtttactacaaggatcctgatagcaagcagtggtccgaaaacgatactctaatcctagtcgatgatgtgctgttactagttgaggctaaggctggtgcagctgccaccattgcatcaccggcgcttgattttggccgccatgctcaatcagtgcaggacttagtactcaaggcatataaacaatgtgcgcgcttcttcaattatatgaattcggcggatgaagtgtctctctatcacctcgtgaatggcaaatacgaagagtgttgtcgtgtgcgtcgctctgactaccgggtgatggtgccgattgggttgacagtcgagtcgttctcgcccttttccacgtactgtaaagaattaccgcaggttgagcctttgcttggaaagcatgctttcatttcactgtccatcgacgatttgtttgtgctcaagcgactcttgcccacacccggggagttcgtccattacttggaggtgcggcaagccgtggccggaatacgcggggctcatctcttcgacgagttcgatcacttgggtgcttacctgaagaagaaccgttttgatcaggatattatcgagcagttgaaggaagagaaagcgaacatggttatctgggatggcatgagtgacatcgtcgacaggaccttcgaaggtgaggagtgggaaagcaaaccgttctcaagtcagaagttcccggaggaggttctgaagctgcttggggcactcgatagcacccgagctagcggctggctttcagcagagagtcatatccgtgacctaggagaggaaggccggaataatctggccaagatgctgtccgaccttcgaaaaacattgattcagcatcccgttcgttactttgttctgggcggggacggtgtaccgctcttcgtttggcttcaacggcatggtcatccaattgactggactaaggtgaacaataaggctagcgcagttgcgttgagcgccaaggctactaacgtcattggcgttgtggctgaagttagtgccgatggtacttatgtccaggcgcggtctttcaaaatttacataccgacggagcaaacagcagaaaacgcacacatttatgaagacgcggcgagaatggccaatcctgaacgtacggtcaatctcgaacgggaaaaacaagtccactttggtcgcaagagcaaaaagattggccgtaatgtcccttgtccatgtggcagtggcatgaaatacaagagatgtcatggacggtag

SEQ ID NO: 99713 - DNA, 546 bp, Enterobacter aerogenes
atggcgcaacagaaatcagtgacgctggtcatcagccatcatctcgatccgcaaaaaggccagcggtatgaagcatggttggggaaaatcatgccggttgcggcggagtttcccggccatctcggcgccaacgtgatccgtccggcggccgggcaagatctctggagcgtgattattcgcttcgacaccattgaacatctctacgcctggacgcagtcggaaacccgtcgtgaattagtcgcggaaatcgcgccgtatctcaacgatggcgatcgtactgaaatccgcaccgaaccggcgttctggtttaccccgcctgctgccaacattcgccagccgctgcgctggaaacagtttctgataaccctgatggtcatcttcccgagtaccaacctggtgccgtggttgaccggcatggcgctaccggagttacggggaagcttgttactgcatctgattaacgatgccctggtggtcgcgttggtggtctggctgtggatgccaatcgtgacccgtctttttgccggctggttgaaaaaaaactaa

SEQ ID NO: 99714 - DNA, 882 bp, Enterobacter aerogenes
atgaaaagtcagtctcagatgatcttcttactgtttatcggctacgtgatcgtttacatcgacaaaaccgtcaccggcttcgcgctgctgcctatcgaaaaggagttcgggctcaatgccgagcagttgggctatattaccggcatcttttttctcgcctattcgctgtttcaggtaccggcgggctggcttaacgatcgcattggctacaaaacgatgctggtgctgtcgctggcggcactggggatattcgcgctgtgctttggcctgctgggagcgagcttcggcctgctgctgctgttccgctttctgtcaggcgtcggccactccggctatccctgctcctgcgccaaggcggtggtaagcaacttcactctggaacaacgtaccttcgcccaatcgatattgctgtcgtcagcgggactggcgatgaccattgggccgataattgccgttaacgcgctggcgctgctcggctggcatctgtcgttcaccgtactggggatcgtggcctgcgccatcgcactgctgatcgccctgcgcgtgccgcgccggcaaccgacggcggtggtcgcgaaacagagcgccgccggcgccgccctgtggcgtaaccccacggtaatcctgctctttctggctatcttttgcgtcaatattcccagctatggcctgatggcctggctgccgaagttttttgttcagagtatggggatgtcgctgtctgcatccggctacgtggtggccgcgggcggtctggggatctggatctcatcgctcggtaccggttggctggtgggtaaatattttctcaatcgcgaaccgttggtcatcgcgattagcgcgctaatcgcgaaccgttggtcatcgcgattagcgcgctaa

SEQ ID NO: 99715 - DNA, 339 bp, Enterobacter aerogenes
gtggcgatcttcgccatcttccatgcccaaacgccgcttatcgccagcctgctgctgtttatcggcgaaattttcctgatgtcgaccttcgtcaccgcctttaccctgccgatgaagcgcctgccggaaaatatgatgggctctgccatcggtctgattaataccggcggtaccctcggcggctttgtctcgccgatcgtcattggctatctggtggagaaaacccacggttacgccagcgctttcctgtttctttcactggcgatggtttgctccgcgttggcggtgctgccgctcatgaaacgtaaaaccgtcgtcagtcagcccgtaattgattga

SEQ ID NO: 99716 - DNA, 609 bp, Enterobacter aerogenes
atgtgcttacaatcccaccaccgcctttcagcggatcgccatctgcaccttcaatcccgactttcagcatcgggtttatgtcaaagatcttatccttgctcagcgagttattctcaacaacaactttgtccgttgcgaagtcagccatctcaacgtgattttcattttaccatcagtatcttactaacaattccctcgatgtttttaccgtaccggacgcaacaccacgatacgcggttttgctccccgttttccattttccccgagctgttaaagggcatgtacccgcataaccacttgttatcccatcagccctggcctgcgcctgaacggcaactggctggcagaggcgggattcagcaccgacacgccggtgatggtcagcgtggaacagggacggctggtgatcgagccggtcaggggctgacggttaaagagaagctcccagctcggaggccgggatcttttacagttaataaaaatcgggatcaatcagaccttcagctttcacgatttcaaggaagcgtttataggccgtttcatccagttcaagaagatcgtccagcaactcttcttttatcaaagcccaatgatgaatgctttctttga

SEQ ID NO: 99717 - DNA, 315 bp, Enterobacter aerogenes
atgaagataagagatcatagagatcacttaggtagggttgttgatgtttttagcgtttactggtttggtgatgagacatatttttatgggcttccaaaaggatatggcgggctgatgtcatatagagccactcaggtgacaataatcaaccctgaaataaattttaattcaatatatttcaaagaaagcattcatcattgggctttgataaaagaagagttgctggacgatcttcttgaactggatgaaacggcctataaacgcttccttgaaatcgtgaaagctgaaggtctgattgatcccgatttttattaa

SEQ ID NO: 99718 - DNA, 1326 bp, Enterobacter aerogenes
atggctaagtataaggcgtatccagagtataaggattctggggttgagtggctgggggcgattcctgaggattggtctgtcactaaattaaagtacatcgcagatttgctaaccgcaaaatctaccaattcagatgacttatttgttggattggaaaatatatcgagtggcgatggaaagtatatatcaaaagaagaaaacatagcagatggtgcatcagtgtcgtttgaaaagaatgacgttcttttcgggaagttacggccttatcttgccaaatcttggttagctactttctccggggtatgctcatctgagtttctggtacttcgcacagctaaactgcatccaaaatatttgaattatttttcattaacaaatgaatttattgatcaggttaattcctcaacttatggctcaaaaatgccacgagcaagttgggagtttattggtctgttacctgtaccaacctgttcttattctttatcagagaaggtagctgggtttctcgattacgaaaccgcaaaaatcgacaatctgatcgagaagcagcaacaactgattgaactgcttaaagaaaaacgtcaggcggtagttagccatgccgtcaccaaagggctaaaccctgatgtgccgatgaaagattctggtgttgagtggttgggtgaagtgccgacacattggggtattcctaaattactgcatgttacaaaagcgatcggagatggtctgcactcaacaccaaagtatgatattgctactggatattattttataaatggaaataatctagttgatgggaaaatatctataggttcaacagcaaaagaagtttccagagatgaatataataagcactatgtctgcttggataaaaaaactgtacttttgtcaataaatggaactattggtaatgttgcaatctataataatgaaaaagttatacttggtaagagcgcagcatatataaattgtggtagtgaactggatgttaactatctaatgtactatttcataacgaatgagtctcgttattactttgacttggaggtcactggtacgacaatctttaatttgtcgttaaattcaattaggcaaatgaaagtttgtattcctccattagaagagcaacgattaatagtcgaatgctgcgttgaaaaacaaaagcaatataattatttaatcgattctgctgaaatggcaattagggttatgcaggagcgccgcactgcccttatctccgccgcggtcaccggaaaaatcgacgtccgcgactgggttgccccggatacgcagggtgttgaggagccacaggaggccacggcatga

SEQ ID NO: 99719 - DNA, 1800 bp, Enterobacter aerogenes
atgaatgaattaataaaattcgataatagatatgcttgcgcttgggagttaccaactgatttagaatttagtaatgaacctattgtattgcaactaagatacaaaactcttagtcaatttgacattccagatgtgtttatttcctcacctaaaattgatgtttgccaactcccgcacttagaaaaaaatggcaagttatgtgtttggcctgacagttatatcatcgatcataatgatatgacctatgcagtcgatttactaaacgatgctatactaatgctaagaaaaggaataaatggagatttaaatgaggattttattgatgagttccagaactattggatttatcaatgtaataaaatagatcgacttataagcctgtgtgatctaacaaataaaaacacaaggttggttttcggttatcggactcggaaatttggagtaatatattctgacacacaaaaagaattaattaactggttggaaaaccaaaaaatattgccattagaatcggatgaaagtaattcaaaagataagcgaataaggcaacagcaactctctaaaataatttcaatcccattgatattcttcgatgaagcctggtatccgagtcagtatcccaaaactgcaagggatttttttgaactaataaatcagcaacaggaagattcagaaagcactattgaattgatcttaagatcttgtgctaatatgttcaatgtcaagccaataattctaatttcattcccaactccttctgggatgaatattataggaatacagattcccaagggcgttagtgatcttgcctcagaccgcttcgataccagaggtcttagtcggggccgattcagaaatacagctttattagatggatatagaaattacatcgatggaaagattttaaaaaatagaataggccaaactaaaacagaaaatctcatagttgaccgttctgacgattcttggttaacgggccgtgagcataacaaaacttacaagaaaatctctgaacataaagtagctatcgtcggatgtggttcagtaggatcttcggtatcaagactgttacttcaatcaggcattagaaaaatgatgctttgggatgatgatttaatgaagagtgaaaacttctctcgtcatctattaggatttgattctgtttataaaaataaagcattagctcttgcctcaaggctacggaaagagtttccaaatgcctatatagaagcttttaatgaagattggacagaagattccaagaataaccaaaaaattgcagaagccgatattatagtaagctgcactgcacattggaatactgaacagcagttaattaaaagacagtcggaagacattcttggtgctattgtctttgcatttgttgaagctcatgcgatggctgggcatgtaatagtcaaccaagtggattctaatgcttttaatagctggcatattacagaaggtaaatatattggtgcattaaaatatcctgctacttactggaaagaaaatactcgcaaaagaatagctgcatgtgccggagagttccagccatacggagctatcccattgactaatttacatgctctaactgcaagaacagtaatagatcttattatggatcgttttttaaatgaatcttttgcttatagttatttaggaagagaagcagaacttttagaattgggtggaaaatggaatgataaatggatagcacaattcggaaatccagaaaagggtgattgtatcatacctcttgtttttgaaaattctaattgggaaaaacgtgatgcataa

SEQ ID NO: 99720 - DNA, 1155 bp, Enterobacter aerogenes
atgtctgcaaagatatgtttcttccccgttggtaatggggatatgaccctcatccaaacggaagatgggcaaaatattttaatcgattgccacataagaaaagggaaggaacaccctgatgttctttctcagttaagagaaaagctggatcgtgatgagaaaggtagattatttatccacctatttatttggtctcatcccgataaagatcattgttctggaatttctgagcacttccatttaggcaaacccgaagactggagtgaaaggtcagataaaatctttattaatgaaatctggtccagtccgatagtatttaggcgacaccatgcacaaaatcataatttagtccaagatgcaagagatcttaattcagaagtaaaacgaagagttaatctttacaaagaaaaacgatatttagatggtgtcggtaatcaagttttagtcttaggtgaagatgaaaatggtaaaactgatgatatccctaatattgtactgcaacttgataatacaactcgactaattaatggtgcatattcatacaattttgaagctcatttgcttgcaccatcaccaaaaaaagatttggatgaggatgaagataagttaggtaagaatcattcaagtgtaattatcaattttgagttaaaaggcgataataaaacagcattctttttaagtggtggtgatgcggaagttgtttgttgggaaggtgtccgtaaccgcctgtttaaaaattacaatatgtcgtggcttgattacgatatactacaaaccccacatcattgctcttggcgatctttatcgcatgatagttcaagcggtaaaggagatgaagcaaaaacctccgaactggcgatggaagtattcaaccgagcaaaacaaaatgcatttataattgcgagttcagatcctattgcagatgatgctaatgatcccccatcatatcgagcaaaaaaagaatacgaaaatattgttgataatgtacaaggtcaatttttatgtgtatcggaccataaaaagaatggagagaatattccgttagaaattgaaatttcagataatggtattaagaaaattgcagcatctgcattaggcatggctgaatcatcaagtgccgctgtaaatagacaaggtggtggtggttatgcctga

SEQ ID NO: 99721 - DNA, 471 bp, Enterobacter aerogenes
atgaaacggataatctgttatctcttcttcctactcttacttgttgtccttgtgtatgccgggttagtaaagggggatgtgtttcctgaatggatcatgagtaagaagcttatgatccgttgtgggttgataggtatccttggtggaactctttactgtatccgtggagtgtatcttaacaaatgtgttaggaactgctgggatgaacgctggcatgtttggtatgtgttgagacctatcgttagtggtatctgtggtgttgtggcctacctgttccttaaagcgggtttgatagtgttagatgcatcacaaaacggtagtggtggcgattatggatatatggcatttgccttctttgctggcttgaatgtagataaattcgttggcaaaatcgaagatgtaggtatggctatttttgggattgagaaatctcgcacagcaagatcgggagataataccgatcagaaataa

SEQ ID NO: 99722 - DNA, 1119 bp, Enterobacter aerogenes
atgaagcaagttggcattgttggttggcgaggaatggtaggttctgttttgctgcagcggatgttggaagaaaatgattttaaggacatttctgtgcatttttacagtacctccagcgtgggggctgcgggacctgtcatcgatggcataagctatacgctcaaagatgcgtattccattgatgcgcttgcggaaatggacatcatcataacgtgtcagggcggcgattatactaaagcggtttatcatgtattaattgctcatggttgggagggctactggattgatgcggcctcagcgctgcggatgaatgaaagagcctgcattattctcgatcccgtgaatcgcacccatatcgatcgtgccgtcaaagaaggtcttaagctctttgtcggtggcaactgttcgatcacgctcagtctgatggggctcgccgggctgataaaggcagatctcattgaatggatgagcgtgatgacctatcagtccgcatcgggtgccggtgctcagtatgtacgggaattaatcacgcaaagcgcgtatataagcagccatttgtcagccgatgaactggcatcgtcaggttcagtacttccgttagtcaataaggtcagtgaactgattaatagcgctgaaatgccgacccagaacttcggcgcgcctttaatgggtagcatcattccatggattgatagtgatttaggcgatggcaacagccgtgaagagtggaagggtgaagcagaaacgaacaaaatcctcggcctttctcccggaacgatcccggtaaacggtttgtgcatacgggtcggcgtgatccgctgccacagtgctgcaataaccctgaagctcaagcgtgacgtcagcgaagcggagttttcggatttagtggcgcattctcatccctgggttaactatgtgcctaataacaaggaggagagtgtcagtaaattgacaccagcttttatcagcggttcgctccaggtgggaattggtcgttataagaaaatgtcgctaaacaatgacccgatttattcggttctgacggtaggtgatcagctcttgtggggcgcggcagaacctttgcgccgcatgttaaatattctgctcggcagagtttga

SEQ ID NO: 99723 - DNA, 603 bp, Enterobacter aerogenes
atgagcgttatccaaacactacgagaactctccgaggtatggcaattatttggtgatatgcctgacgacgctacgttaggtgtcgatttagcggcgctttacctcggtatcagtgttaaatcattagcaaggtatagacaaaacggtggtggtccacactacattcaataccaatcagaagacagcaaagcccggaatcagagggtgaattatctcttgaaagatctccgttcatggcgggatagccacagggtaagcagcacaatgcacgcagcacaagtcaggggattagcttttacttgtctttcggatcttacaaaacctcaacctttttggtgcatcactaacggtagcggctctgcaagcaaaatcatatcccatgcattgacccttcctgatgatgattttaagcagcttttgttagagactaatgcagaagtcgtctggatctctgtggaaaaagctctttttgatgcatggataaataaagatgaacgagctatctggcacaaggcttttacatcagtattaaagaacattgttcttgcatcggatgctgaagaggaaaggtatattttgaatgacattttggatgataaataa

SEQ ID NO: 99724 - DNA, 1410 bp, Enterobacter aerogenes
gtgaagcccacccttaaccatgcgggaaaagtcgttttcgaagcaaacccagagcataaaccttacatagtttttgatgaccaccgcgactcaccagttggctttggtgtgaaggttagtttgacgaaaaaaacctatgtaatccagcgaagagtatcttctggtgatcgtagtgtgagtgaaggtaagaaaccaagttctgtgcttaaagtaaaagttgggaatgtttctgattttccgagtatcgatcaagctcgtgaagccgccagggaattggttcagaccatgatcgccaccaaaagaaatcccaataggattaagcgagaaacagaggcttctgaactcactatcagcgaagtctttgctcaatacagaaatcatttgatgggtagatctaaaccagcgaaacccaacactttggctgtattggataaagcagaaaacagactttccgagtgggctggtttgcgagttaaagaccttactggtaatgaaattcttcggaagtttgatgagattgcttcaagagccagaacagcagcggaacagacctttaggtggattaatgttgctgtcagacatgcaatcgaaattgaagccagcaatgcccagacccagcaacgacaaccctctttgtcctacaatccattctctatcttgaaagttcagaagaagttcaggactcgttctgagcttgaggatagctataaagctaaaggaatccgaaaccctctatcgccaaaggatacacttggtcggttcttgacggcattacataacaagagaagcttcaatcgccttgggtgtgattaccttctactaactatccttcttggtgctcgtaaggaagaaacagcttcattatgttggaaagagcatctttcagtagaagaggtcaaaacgacaagttatgtcgatcttgaaaaaagaattattcgtttttatgacactaaaaacaggaacgatcacgaattgcctatatgcgatgctgttaaatgcatccttgaggacaggcacgatattgtatttgatgcagaaactcgtccagaaaggcaaaagtgggtttttcctgcacgttctacaagaagcaaggttggtcattactcagatagtaaaagcttaagggaatacctctgtcaggaagctggcattacaaagcttggtatgcatgatttgcgacgaacgtttgggcgtgtcgcagaagagctaacatcgtatgctgttgttaaaagattacttaaccacaggaatacaacagatccaactgaaaggtatgcggttcccgatgatgagcgaatttttgaggctctgcaacggattgagttgcacatgcttatgacggcacctaggttatacaatgcgctattggcttcttccaaatacccgccattgtctgataacaaggagtaa

SEQ ID NO: 99725 - DNA, 213 bp, Enterobacter aerogenes
atgctgcggcttcgcgaagcgattaccgccaatgcaaagcctttatttgcatttcttcagaaccattcgaataaagaaaaaaaggggcagtgtcattaccaggatggaataataaatggaccttctacatatttatctcatattacattcaaaaccattttgccgggcggtttcgtcaaaatgaaccatgccaataatctccctattcagtga

SEQ ID NO: 99726 - DNA, 324 bp, Enterobacter aerogenes
atggacgcgctgaccactagtcgcaggaacaagtgcctggcctgtgtggtcgacttcacgaaggagtgtctgacaattatcatcgcattcgggatttcaggcgttcaggtcactcgtattatggatagtattgcactatttcgaggctatccggcgacgataagaacggaccaggggccggagttcacttgccgcgcactggatcaatgggcctttgaacgtggtgttgagttacagttaatccggccgggtaaaccaacgcagaacggatttattgagagctttaacgggcgatttcgcgatgagtgtctgaatgagctctag

SEQ ID NO: 99727 - DNA, 1236 bp, Enterobacter aerogenes
  misc_feature (269)..(278): n is a, c, g, or t
atgacatctagcggtcttggtgggacaacgaagacggctactattaccaccaacactgcccagtttactaactttgaaaaacttgatttggctggatacaaaggtaaggcaaatgtcaattccggttcaacggcggcagacagtacttttgatttcggtattttaactgggaaagctgtatcggaatcaaatgtaacaggggttattaataatgttgtacaaccaacaacatccaccatcggctcgcaagggtttgtactctccgggcnnnnnnnnnngataaatgctgccggtggcagctcagcgcagctggaagttaccggtgatgcgactgctgccagcagtgttgatatcactttcctcaaggatgcagtaaccagttttggtattaactttaccgcaaccagcaatactgatgtaaacgccggttcgcttgcgttgcatagtagcagtacaacagacattttaggtaatgttactgggccacagttgacgactttaaatatcgcttctgggggcattggtaattttagtaataccttgactctggctgataccaatacccaagtcacagggattaatgttagtggagatcatgttctgaatcttaacgttggttcaggttttagcaatatccataacgtcaatgctgcaagtaatacagcaggtctgaatttagacttgggtgccagcggtactggcgatggcattattgtccaattgctgaaaattttgccattgagtgccgtgactattggcttactggatacagtgctgggtctggtaggactagggctgaataaaggctatcacattgatgttacggggacttcttctagtgatcattttgctgttcaggggaatactgttgttgctggcggtaacggtgccaaccagtatgtcctcaaatccagtacagtagataaaggtgtcactgtttctgattttaacagtgcaaaagacactatcattgacaatgtttctggcctgacgattaataatgatacttctcatactgccgttactgattatggttaccgtacttcagatcaggtagatgcattgttgggtacactggtcggcggcgtggtaggcggtgttgctggtctgttggctaatatccttggcttacaaaatggctctttaactcaaaaagttggtgtggcatcagttgtctggtccggacaatcaaacattgcagattcctacttgattattgataacaaaagtggataa

SEQ ID NO: 99728 - DNA, 141 bp, Enterobacter aerogenes
atgatgatgaacggctctaagtttttccatgtatactttttacctaattgggatgctttgaatgaaattttggcgtattcaaatgaaaaaccgttcatttttccggttgaagccctgttggggattgcttttatcttctga

SEQ ID NO: 99729 - DNA, 945 bp, Enterobacter aerogenes
atgaaacgtgtttctcaattgaccgcactcgccctgctcatggggcttgctgcttcctctactttcgccgctgataccatgccaacgctggacttttcaacgctgcaacagcagcacggcgtagcgatagatacccgcctcagcgctttctataacggttggccgcaaagcgccaacggcccacagggccatgaaccgcaggcgctaaacctctccgctacctggcttggcgcaatgagcgacgaacaactgcgtgcctgggctactcagcaccggctgcaggccgatacgccaatcgcgttatatggcggcgctgacgataacgccagggttgcggcgcgcctgaaagaagccggattcaccaaactcagcacgcttagcgacgctttcagtcagggcgagcgcctgcagaagctgccgcactttgagcagctggtctatccgcagtggatccacgatttacagcaaggtaaaaccgttaccgccgccccgcaaggcgactggaaactgtttgaagtggcctggggcgcgccgaaattttatctgctgaatcacattcccggcgccggttatatcgataccaatgaagtggaaagcgagccgctgtggaacaaagtgtccgatgaacagctaaaagcgatgctggctaaacacggtattcgccatgacaccacggtgattctgtacggccgcgacgtctacgccgccgcgcgcgtcgcgcagatcatgctgtatgccggggtgaaagatgtccgcctgctcgacggcggttggaaaagctggtccgacgcgaatctgccggtcgagcgcggtatgccagacgcagaaaaagcggtgaccgatttcggcgcgccgatccccggtcagccgcagttaatgctcaataccgaacaggcgcgtgggttactacaccgccaggatgcgtcgctggtcagcgtccgttag

SEQ ID NO: 99730 - DNA, 1071 bp, Enterobacter aerogenes
gtgcttaactatcggtgcctcactaggtctactgcccgtgagttcctgtggaactatgctggcaacaccatcattaaccagcattccgacatcaataaaacccacgatatcctgcaggacgagagcaaatgcgagatggtcgtggttatcgaaaactttatgacctcgtcggcaaaatatgccgatattctgctgccggatctgatgaccgtagaacaggaagatatcatccctaacgactatgccggcaatatgggctatctgattttcatccagcccgccaccacggcgaagttcgaacgcaaacctatctactggatcttaagtgaagtggcaaaacgccttggcgacgatgtgcatcaacgcttcaccgaaggacgaactcaggagcagtggttacagtatctgtacgccaaaatggtcgccaaagatccggcgctgccgggttatgacgagctcaagaaaatgggcatttacaagcgtaaagacccgaacggccatttcgtcgcctatcgcgatttccgtcgcgaccctgaagcgaatccgctaaaaaccccctccggcaaaattgagatttactccagccgcctcgccgatattgccgcccgctggcaactggaaaaagacgaagtcattaacccgctgccggtctatgcctccacctttgaaggctgggacgatccgttgcgcagccaattcccgctgcaaatgtttggcttccattataaggcgcgtacccactccagctacggcaacgtcgatgtcctacaagcggcctgccgccaggaagtgtggcttaaccccctcgatgccgaaaaacgtgggattaaaaacggcgacatggtgcgcgtctttaatcagcgtggcgaactgcgtattccggcaaaagttacgccgcgtattatgccaggggtaacggcgatgggtcagggagcgtggcacgatgccaatatggctggcgaccgcgtcgaccacggcgcctgcatgaacaccctcaccacccaccggccttcaccgctggcgaagggaaacccgcagcataccaacctggtcgaaatcgagaaggtttaa

SEQ ID NO: 99731 - DNA, 144 bp, Enterobacter aerogenes
atgtcaaaccttatccaagacctagcgccactccttgccaagctgcttgtgacgctgctggtggccgctatggtattcacgggccatcttaacggcggcctgttggctggtgcccttgaggctatcggccatgcattcacgtag

SEQ ID NO: 99732 - DNA, 1128 bp, Enterobacter aerogenes
atgccagaagtaaaacgtatcgactcgaacaattcaaagattaaacacaccgacgaactccgcacccacctgctggataaagaaggtaacaagattccgcatagcgtctttggtactgacaccacgcgcaccgagattatctctcaggctgacggtacaggcgagaccatgaatgttggcttcactgaccgctcaggtcgccctcaggcattcggtaatgacgtgactgactacgtacaggcccttgagtctgcacttgatgagacgcttaatgatggtgattttatcgatgggttgaataccgaagtattcccctgtgagcagcgcccatttgccactctgccgactccaattaaccgtgagaccctgaccgatcgcaccgtccgcttcctgtctaacggcgtgtataacccagagaagaacgccccgactactaaggtgaaaggcggtcagaccctgatggttaaccctgtgattgccgacaaggacgccaaagaaacaggtatcctgtgctcagctattacccacgtgtccgactttgcgatgatgggcggctggactggcgctggcctgatggctacggctaccgatatggttgaccagtatctgcgtaacatgacctctaaagttgtcgatgtgctgctggatgctccagaccttcaggcaaccaaagtgggcgcattgtctggcaaagcgtcagcacaagccgatgacattctggatgctgtagcggtgaacttgccgttctaccttggctcctcactcaccgattacactctactggtcccagagaagtacgaagctatcctcaatcgtgcagcccagaaagcgggcatgaccgagattagcgaactggttggcactgccgttgcgccttacagcggcgatgaccgtggcgttatcattctaccgaagaagtacgctatgttatctttccgctcaacccgtagtggcgacctcgttaacgtgttggttactcgtgacgctaaccgtgcaggctatgacgtcgaactggtaggcgcactagatgtcatggcaacgggtaccgttaaggttaaggccggggcgttcgacactgaggcggctgctagttatccgttggtccacgtcctgaagtttgaagactaa

SEQ ID NO: 99733 - DNA, 411 bp, Enterobacter aerogenes
atgtctatttcataccgtaagctcgacatcaatctgagcgccgacaaagagaccgtgctggtcttcggccaagagatgtccaccaagtatttcattgagattgtagtgacctcaatgctgaatggtctaccagccctgagcgcaggagcacacgccatcctgacctccctgcacgctgctggtcttaacgctaatgattacggtgcgtattccagagcgtgggctgagagcaacgcagaggcacgccgagaggctgagcgtcagcgcattgagaacgagaaagaccgtcagcgcatcgccgctatgtatgcaacccctgaagaaatcgctaaagaggccgcagagcgtaaggaacgcaaggcagaccttgagcgtcgcttcagccgtaaaggcgctgcattcggtctgtaa

SEQ ID NO: 99734 - DNA, 231 bp, Enterobacter aerogenes
atgatgcccttaccactagacctcccgccaccttacagcgttgacgtgaagattgacccccggacacctgaaggccgcaaagctatgcgcttgttggatgtgcctacggacgttctcgtagccgcgctgggtctcccgccgaagcacaccagacccgatatgtattactcgaagggtgcgctgtgtctcatggcgaccgctgaaggattgacccccatggacttcaagtaa

SEQ ID NO: 99735 - DNA, 756 bp, Enterobacter aerogenes
atgaacattattaacttagaccagctcgtctctatgacttccttggagattgcggagttgaccggaaaggagcacaaacacgtcatgcgtgatattcgcaagatggttgaagaacttaacgggtccaaatctgaggagcgagattctggcaactcaaatctgaggagcgagattatcggggttaacgggtccaactttgggcgcgttgacgaagaaatgtacaaggacgccaagggcgagacgcgtactctataccgactcgaccgaaagcacacctttgttctggtcgctggttattccgtacagctccgggcacgctgctatgaccacattcagatgcttgagcagaaagtcttccagctggaagaccagcagaagcgagcggccatacagtcagctaaccgtcgaggtgtgacgtggggtgattactgtaagacacacggcctccctgcacagaagctgatgagcatcctcaagcatgagcgcaagctctttcaggtccaccccgtcagcggtgaatggtcagtcaatccagcctttgcggaatacttcagggtcatcaagccaactgaccagcgattcaacccaagcggaatcaacattcggttcaacgctaagggccttgcgtacttcagccagcctgagcacgtgctcaagatgcgcggcaaggttattgccattcacggcactgacgctgagagacagaagcatctacaggatgtcggcaagctgcaaaacaagagcaaggacctgtaa

SEQ ID NO: 99736 - DNA, 507 bp, Enterobacter aerogenes
atgtctcagcagcagcaacaactatcagccaaccaaatcgcctaccttagccgcgctatgtcagacggtaagggcctcatcgaaatcggtgagttggcacggggtcttgggaaacagaaaggaaacgtcattaagaaattagagcgcatcttctcagaggaacggttattgaaattgaaaaaccgttcgttggtccccaatggtggtaatggtgctatgcgtgaagtctctacttacatgcttgactataagaccgctggcgctctggctatgtcatatgatggtgagttaggtattgaggtcttaaccattcttgaggattccctgagcaccatccaagcgataaccatcgaagccgcaaaagataactccgctggcgtccttaaggccgctgctggcttccgtgagcggtaccgtgagcgcttggcgttccgtccgggtgcctccgagaatgaggaccgcagcatcgcccttaagcgcctcggacgtaaggacctgcaaccatga

SEQ ID NO: 99737 - DNA, 1344 bp, Enterobacter aerogenes
atgcgtcagaatgaactagcagcagccgctaaggcattccttctggataagcccgaagtatccgccaaggagctgagagagcacctgatgaccatcgccgaggggttactcacagaaccaacggacgactactggaatggcgttgaggtggctgtattagaggacgctaaggcgaatcttcgccatatagcagcaagggagcggctcacagtcgagcagcaggcatacatagcggaagccttgaaggtgctgacggcaggacagcgcagggttgattacggggacgcttctggcctccttgagttcgtggcctctggccgaccctctggtcccaatagtaatgattacgatgataataaccacacaaacgagtcaactttaagtgacgctgtgtcgattctgaaaggtgagcaaggcgatgaccctgtagatttcaacaggctgacggattcagtgctagccgagaaggcgctatcactcaagaagtccagttatgcggacctgcgggcatctctggggtctgtcttgcgttacatcccggatgggatggatatcatgaatcgcgcggagtggctgggcgtccgggacgctatggtagctgatggccttgcctattcgacaatcaacaagttgctcaccaagtcaaagatggcgattgactatggtcttatgaataagcagttaccaaacggcaggaaccccatagagcgcctgaagctgaccaaggatgcggagtccaagcgccgggcattcacagatgacgaggtggcggccttactggaacaggtgggccatgtagacagcgccgacagtgttacccgcaagtgggccgcgatgctgtctgtagtgactggagcgcgggcagcggagatagctcacctgaccaaacgtgacattgtaacgattgacgggattacctgtattgatattaacgagaacggccatcataaatccgttaagaataaacactcggtgcgccttgtgcctctgaccacgagtaaggcgattggcttcgatgtggaggagttccttgagtgggtcagtagagttgactgtgataccgacgccccgctattcgggatgacgcctgccgcatattcccactggtttaacaggaaggtagtcagagaggccctcggtgatgtccaaaacgtttcactgcatagccttaggcattggcttgcttcacgtcttaaaggccgtggagtggcgctggtagacgctcagggagtactaggtcatagcagccagtcgataacgtttgacctgtacggtaagggccacgcaatcggcaggctcagagacgcgcttcaggtggcattgtccggtgagtttatccagtaa

SEQ ID NO: 99738 - DNA, 252 bp, Enterobacter aerogenes
gtgatcattgattttatcaacggcgatcctgaccgcccgatcgtcaccggacgtgtgtataatgaagccagcatgccaccatgggatctccccggcgacgccacccggatgtgctttatgacacagagtaaggatgggaatattgataacagcagtttcttgttcttcgaagataatccgggcaatgaatccatcgagatgcattcagagaaagatattaagatctcattacacatgctcgtcgttttataa

SEQ ID NO: 99739 - DNA, 384 bp, Enterobacter aerogenes
atgagcacaggtttttatgtaacaatggccataattgcgttagtatttggcgtattcccgatggcgagatttctttattcaaatgtatatccatatctcaaagatagcttttcacaggatgctgttttagaaaatggcatagtcgctaatgctaatattgtcgaaactttccagacaagcagttggacgggaaacaaaccaatatataagctaactcttcgtttcaatactgagactggccaggtaattgaatcctcactattgaaagcattaacgtttaaagaaattgaaaattacaaagaaggcaatcaagtgactataaaatatgatcctgaaaaaccagaaaaaatcgccattcaggaaaaaccgataattcttgggtaa

SEQ ID NO: 99740 - DNA, 516 bp, Enterobacter aerogenes
atgaagaagcttattgttttcggtttgttagttgtaatggggggcattgttgccggaatcgcattggtaccgactcaggatgctcaaaacgcagcaatgacagaagcatgtagctcaataatcaaatcgagaatgaaatcaccgtcctcctactcgatggaaaaggccattatcagctctgagcagttgtcaggagaagaacttaacaaaaagattgaaagccttcaggttgagtctttgcgcgagggggtgagaaatgggctttttacgcttaaaaatgccgatatatttgtagatttccaagcaagcaatgcttttggggtgcaactaaaaggtttgggtaaatgtgaatacaatattttcagtgatgattgggcatctcttgagtctgtgataattgatggtaatgcattgccttccgttgacgttactatcgaatcagtaggtaataaaattaactctggattctcctcaaagttaaaatatttacaatacaaacttcaaggcaagatataa

SEQ ID NO: 99741 - DNA, 219 bp, Enterobacter aerogenes
atgaacatgaaagaaagaatgacgcgcattgagacaatagcggaaaacgaagagaaacttatctccgatactcgcagtgacctgcacggcacaagccctgatatgcaatccatggagcgccggatagtcgataagatggacaaaaatcaaaaacagttggtttgcttgcttgttttggtaatcatcgtgcctatcttcaccgcattgattactaagtag

SEQ ID NO: 99742 - DNA, 162 bp, Enterobacter aerogenes
atgaaaggcatgagtaaaaacccgcagtttaatctgcgatggccgaaagagattttggatattgtccgtaaggcggcggaagaaaacggacgctctgtcaactctgagatctatcagcgggtaatggaaagctttaaaagagaagggcgcattggtgcgtaa

SEQ ID NO: 99743 - DNA, 252 bp, Enterobacter aerogenes
atggctagagacgatccgcacttcaatttccgcatgcctttggaagtaagagaaaaaataaaaaatcgtgctgcggctaatgggcgctctatgaatgccgagctcctgcaaatcgtacaggatgcattggaacagccatcgccagtatccggctaccgcgacgacgccgagcgcctggccgaccagcaggcagagcagtttaagaaggtggtattcgatacgcttaaaggtatctacagcaaggagaagtaa

SEQ ID NO: 99744 - DNA, 408 bp, Enterobacter aerogenes
atggataaattctcctcaaagattgccagaatttccggcatgaccaacaaggaaatcattgatctgcacctcgccatgcaggaggagatcaagaagcagtataaattgagagctaaccctaagaacctgcagaacgccatttctctttgtgagaaatgcgtcgccatatcaggaatcgtcatcgaggccatgaagaagaagcaccgcgctgaatgtgacgagtatgcgcgcctcgtaggccgcttatcgcctaattcaaagttctattaccccaaccacgcagcggcacgccaactttgcatcatcctcaagaagcaagggaacaccaatcaaattgcttacattgaagacaaaatggcgcgcgaaggctggggcagcggaaagagtgttgatttgctggatctttaa

SEQ ID NO: 99745 - DNA, 180 bp, Enterobacter aerogenes
atgaaagcaacagtacgccgctacttacgcgctgccggaagcattcttgatatcgctccgtcagccagatatacaagggatgtcaaaaaaaccagcgatatgcaggaaatcgagaaagatttctatcgcatcggtggtgatttcaggcgttcacttgcaagcacccgcagaacaaaatag

SEQ ID NO: 99746 - DNA, 588 bp, Enterobacter aerogenes
atgaaagaaatcgatattggttatctgaaacgtattttagattactgtccttcgactggtgtatttacatggaagaaaagagcgagagaagaattttcttctaaaagggcacatagcacctttaacgctcagtatgcgggaaaacaatgcggatcattaaccaataaatatctaacaatcaggataaacaatagcctctactatagtcacaggttggcttgggcgatgcactatagcgagtggccagttggtgatgttgaccatatcaacatggacaaaactgataaccggatcgcgaatcttcggcttgccagaaggcgagataatatgaataaccttactgccacaaaggcaaacaagagtggttttattggggtgtattgggctaaaagagagcggaagtgggcctcagccatcaccattgactataaatttcatcatcttggttactttgatgaccctgtaacagctgcaagtgcttataacgcagcctgcgaaaaggcaaatggtcggttctcgaaagagaaaataaagcacaatcttgaaagaatcgagttataccaaacgaatgctgctggcagacgttag

SEQ ID NO: 99747 - DNA, 753 bp, Enterobacter aerogenes
atgacacctttgaaagagattggcgagtgcctgattggtgctggagggcgtgaatacttcttccgcccatcgttccgtaacatgactcggatcggtgagccagaacatatcgtccgcactttctatgcgctgttcaatgacgatgtagcaaagatgcttgaagcggcgcgcgaaattcacagtgcgataccagagcatcagcgcagattttacgcccactatttcggtgacgtttcgctgccacgctgggcacttgatgcagcaggttctgccgcgtttgtgcgtgaggcattgctttcggctattaacgtcattcagtcatgctgtgatgaggacgtttctgaactgacaggctggcacgagccatcacgtactggaaagcgtgcatttgtatggcgccgtggcgcgctcccgcctgagaacctgattctgatagctcagtcgctgatcatgcatggcgttatcggacgggccaaggttcgtaagttgcagaagcacgaaagcaaggaaacgacaccggagtttcatgcgactgaatacatcatggccgcgcgcaatcatttcggcataagtcgggaagaggctgagaacctcacgatgacagagttcgccatgatgattaacgccaaatacccaaatcagaacggcttcaccagagaggagtttgactccgtaatgagtgaggatgataaacgctggaatgcaatgcttgcagctgaagaagctggtaaaatgaacaagcgcctagggtag

SEQ ID NO: 99748 - DNA, 756 bp, Enterobacter aerogenes
atgcaaggctgtgctaatgattttggcaagctgatcgggaaagtggctgtgctacgcatggcctttggctgccccgacgcagtgccagcgctttccgagtggaagcgtctcggcgctatgacgaccaagggcatcgactattcgatgaataccatcaactccgaggcagatgatgccaaagggctggtggagaacctggtcaacaacatggatctgacgatctctggtgaaggtgagtttcgcaaatctgataaagataacgagatcggcgcgtggcgtctgtcgaagtatatctttgacgaagttcaggcaggtcgtcagcctaacctgtgggtgcggttcgactttgcgggtgagaacgccggtacttacatccagggttacatgaacaccacgtcatggtctggtgatttcggtaccaacgatatctccaccttctccggcgagtggaaggtctacgacgctgacaccgttgtgtttgaagtcgctgactccatcgcggccactggcgttgaagtaactcctgcaactgcttctctggtcgttggagccacccagcaactcagcggcgcggttcagccaaccgatgcgactaataaagcgatcacctggacgacttcggcgccatccatcgccaccgtcagttcaaccggcctggtgacagcagttgccgagggcaccgcgactattacggctaccactgctgacggtgatttcaccgacacctgtgcagttaccgtgactgccgcgccgtaa

SEQ ID NO: 99749 - DNA, 381 bp, Enterobacter aerogenes
atggctgacccaatcacagcggcagacgtgcaggcgttcctcggtgaattgggttattccattcccggcgcgctactggatccgattctctgcgtggtgaacaagattatcccgtgcctcgatggcgcggggtatgacgagtgtaccgcgaaactgatcctgatgtacgccgcagcgcttatggctacctcgtccggcgcacgccgcatcaaatcacagggggcgccgtctggggcgtcacgttcgttcgattacggtgatgacagcatcacctggttgcgcgactcgctggcccggcttgatacaagcggctgcaccggtgaactaccgataagcgccggcaacagtgtgggcctttttatggtggtcgggggctgctga

SEQ ID NO: 99750 - DNA, 285 bp, Enterobacter aerogenes
atggcactggtaaaagtggttcgcgataacctgatttccggtgccaatctccagaagctggaggttggcgcgcaggtctcggtaagcggcgatgtcgccaagcgctgggtggccgccggtctggttgaaatcattagtgatgacgaccaggcgctggaagtggctacaccgggcaatgatgctgcagagcaggcagagcaggcagagcaggcagagcaggcagagcaggcagagcaggcagagcagcaggaagaatctgccagcaaatcgaagaaggcgaaataa

SEQ ID NO: 99751 - DNA, 183 bp, Enterobacter aerogenes
atgagcggcgtaaatttcgaatcgaagcgacatggcgatatctcatgcacgcacgttaagatcggcggcgtcgaagcgatgatgaagcaggtaggtgatcgcaaagtcattaagtcacaaggtcgcggcaacgtgcgccaagtaaaagctatcgtcagagcgttacacaaaactatccaataa

SEQ ID NO: 99752 - DNA, 588 bp, Enterobacter aerogenes
atgagtcaagaaaataaggcgcttgctgcggcttacctgaaagagtgcgtcaattacaacccggaaacaggactcttcacttggctgaatcggcctctggaacactttaagtcacttagggcgtgtaacgcttggaactcaaggtattccggcctggtagctggcagcatccgaaaggatggatattgcgcactaaaaattgacggcaacggctataaagcacaccgcatagcctggctgattgcgcataatgaatggcctgacgatatggatattgaccatatcaatggcatcagaaacgataaccggctatctaatttgcgacttgcaaatcgaaacgaaaattgtgcaaacgtaaaggtcagagtgaactgctcatctggcttttttggggtgcattggtttaagaaccgcggagagtgggtggcccaaatacgaactgggaaggtgaagaggcatcttggctatttccatggtattggtgatgccgtccgggcctataacgccgaatgcgaaaagctccatggcgaatacggcaagcgcaagatagagcacaatctgaataagctccgagaattggggctctga

SEQ ID NO: 99753 - DNA, 900 bp, Enterobacter aerogenes
atgttccgggatatcgagagtcggtatctcggcatcaagcacgcactgaaagcattgttcgaccagcgactgaccgggcgagagcgtgaggtaaacagccataactggcacttcctttgccatgaccacggcgaggatgtgcggctctaccaagtcaatgccggcaagtttatctacgacatgtcggcgcaggaactggcggacctgctggaaggggtgcaggtcattctcgacgattacctgctggatggtggcgagcaaaacctctgggcaatggattacgtcgccgcagaatacgaaagggggacgttcagtgcatacacaaacctttcccagcaatcaccagtatacgcagcgcaaaccagcatccatcaactactaagtagccccgcttacctcaaccaaatagctgcatcacgggtaacaacctacagtgattggcgaggtattagcgatgatgccaggagggatttagctggtgttattagtgatgctgtatcaagaggtgtaaacccaagagaaacagcgtcggtcattagcaaaaggctggatgtgagcatgtccagagctaaaacgatagcccaaactgaacaggtgggggcattaaggcgcgcgcagcgaaatgaaacagattgggcgaaagagcggcttggtctgaatactgccatcctatggatttctgcgctgaaatcgacgacaagggccacccatgctgcgaggcacgggaagacttattcgacagaagaggttgccgagttctattcaaagaatggcaatgctttcaattgctactgcgccaatgtcccatgcctattggatgatcaggggaaactttataacgatggactgactgaaaagctcaccaaagaaagagaaaactggaagtccaccgaggattaa

SEQ ID NO: 99754 - DNA, 216 bp, Enterobacter aerogenes
atgaccagtcatgcacgtaaaccaaaattcaaaattggtgatattgtttatttggttactggcagtccgagtatgtcagttgctgagccgctgattgaatacaaatatggtagcaatgagttccatggtaactataaatgccaatggtttgcgggaaagaaacttgagcatggaaatttccctgaagaatcattgaccacaacaaacccaaagtaa

SEQ ID NO: 99755 - DNA, 204 bp, Enterobacter aerogenes
atgtccgacatctaccaaatcacgctaaccacccaaacaggcgaaaccttcacgggcaagatgtcacgacgtcagcctgagctggttaacggctttgtgcccctggcgacggaaacgggcgagtggctgtattttgctccggccgatgtaaagcgctggcagttcacgcctttgactgatagtgatgaagataagggcgaatga

SEQ ID NO: 99756 - DNA, 642 bp, Enterobacter aerogenes
atgtcaatgaattttgacatttttatggaagtttcaggattcacattcgaccctaaaacattcgaaaaaatcatgcttggcaataataaattagctagctgcttaacaactcacttagctattgaacgctttcttgaggcgtggatatgctcttacgttggaattaaagaccttttcgttaacgactccaaagacaaaagcaaggttcgattttctatgaattttatgggtaaagccaagcttgcccagcgcatgggtttaccattgcctgcataccgcatcattgaaaagctgaacaacattagaaacaactttgcacatcaacacgactatgaaggggcgactcacagtgaatttattgaaattattgaaaacgttgacaagcttccttcatatgaccacaaggctttaggagatttagattacatggttttcattgatgacggccaaaatcagcaaaaacacaatctatcttcagaaacatgccctcatgaactgcgttatgcggccatcacttatggcttacttgttagatgtatgcttcacatgattaacgagctacctattaccagaagcaataattacggcgttgctgctggatatcaaggttcatcaattaccttcaaaggttcaactctctga

SEQ ID NO: 99757 - DNA, 210 bp, Enterobacter aerogenes
atggggactttaatcaaaggctggaaggtgatgcttctgaccaaggatgggcatgagtctggaaaggcacctgaggaagtcggctggcaaagcaccaatgagccagacattcgcgatggggtgctgattattaaaaatggactggacacccacggcgtaccgctcaacatcattcacggcttcagcatcgaagctgtaaaggccgaatga

SEQ ID NO: 99758 - DNA, 477 bp, Enterobacter aerogenes
atgttcgggttaatcagtttattccgcattttcaaaaacaatgcgcacattctcattccttgcgcgttcatcatccttgtcgctatctgcctgtgggggctaaatgcccgcaatcatcagttgacggcgacgaatgacaggctgacacagcttaacgacagcaaggatgtgcagatcaacgacctgagggctaaaaatgacgatctggcggggagcgttaaagagcttgctggcgccgttaacaggcaaaacgtggtcatgtctgaggtcgctgagcaaagggctgaatcggccaagcagaaccgaatgctacagagcgagattaagcgctacctggcggcagataagtgcgctgctgctcctgttcctgatgccgctgttgagcggttgcgctcagcagcagaagccgcccgtggaatatcgggtgataaagcagccggccctgaaccttccggcggaactgacgtcgcgcattga

SEQ ID NO: 99759 - DNA, 372 bp, Enterobacter aerogenes
atgaagaaaaccactatgcaagacagaccagatacctgggcggtgatgcttgcgtggcttgtaaaccacaaaaacgaagctggctattcggtactggcttttgtcatgtcgatactcgctacctcgcgcggcgcgaaatcaaagtggaaagaccggatcgccggcgcaacgatgtgcgggatcctttgcttcttcgctcagccgacactcacggctatatgggcaatcttcaactggaatttccctcctgagctttgctggccgatctcggctggcgtcgggtatgtgggggtggattcacttttcgcctatgcgcgccgtcgccttggcctgaatgaaccgggagacaaagcaaatgctgaccgtcagtaa

SEQ ID NO: 99760 - DNA, 645 bp, Enterobacter aerogenes
atgaaatgtaaggtagagggttgtgatagcgagtgtaatcactatcaaggcaagggcgtttgtcaaaagcactatttccgaatgatgcgctacggaacctatgagttgacgaagcgtggaaagagaaaggataggactaaaaactccaaaggttatcagatgattaaatgtccagaacatcccttagtcatggcaaatggatttgtgtacgagcatcgaaaagttatttatgaccgatatggcgacactctccctccatgtgagatatgtggcaaggaagtgacttggaaaactgcgcacatcgatcacatcgacgaagttgtcgataacaactctgattcaaatttgagggtgctttgccgtgcatgcaatgtgatgcgctctcgcgtacacattcctgagcatacaaaaaaatctcgtatggcaattaccttcaatggcgaaacgaaaacccctaccgaatgggccagagactcgcgggttttgatatcagttactgccatcaagcatcggctgaaaaatggtatgagcgttgaagatgctttgttttctccaaaagctacccatcggcataccagaccaagatccagaacaccgcaatacggcgagtatcgggggcctaagaaagtgggggagaccgcatga

SEQ ID NO: 99761 - DNA, 645 bp, Enterobacter aerogenes
gtggctaagttaccgcgccgcaagtgcgctcataaagcgtgtcgacaatggttccatcctgtacgcgacgggcaggtggtttgcagcttcgagtgcgccagcgcgatcggcaaagaacagacagcaaaggcccgtgcagccgctaagcagaaggaagcgcagcgccatcgcaccgaagagaaggaagctcgccaacggcgtaaggccaagcgcgagtcattcaagtccaaaacccagtgggataaagaagctcaatcagctttcaaccgctacatccgaatccgtgatggaggcaagccgtgcgtcagttgcggaagcccgcttatcggtaagagcaactacctgaccggcagcgctattgacgccagtcattaccgctcccgcggcgcagcgtcacacctgaaattcaacgttttcaacgtccactcagcctgcacccgctgcaaccggcagttgagcggcaacgccgttgaataccgcattcacctgattgagcgcattggcctggaacgcgtagagcgccttgagtttgataacgagccgcgccgattcgatattccctacctgcagcgcatcaaatccatattcacccgtagagcccgcgagcttgagaagcgccgcgcccgccatcaggaggccgcatga

SEQ ID NO: 99762 - DNA, 207 bp, Enterobacter aerogenes
atgactatagccatcgatcgacttaaagaagtgacaagggactttggccgcaggcatatcgcctaccagatggccagagagcagccggagcacctccgggagtatttcatggagcgagttcgctgctaccgcgagcagagcatccaactacctcgcgcttccgatcagcgctacatcgaaatggccgagcagaacgccaaaaagtag

SEQ ID NO: 99763 - DNA, 564 bp, Enterobacter aerogenes
atgaccagcaaattaaccaaagaatggttacagcatcaaatttcagcaatcgaagccgttggcattactgatagcaacacattggctgcattcaagctggcgctggccgcaatggacagcgagtcggttgaactgcctcttgactacctgcagggatacaaagacggtctggaatgggccgcccaactggcagaagccaatcaccctgaaacaggagactggctgcacaatgaccctatcgagctggcaaaagccattcgcaaaggtccagatatgccgccagtgcagccggtagcagacagcgagccggtggcagaagttttatctaaccgcccaggcaatgacacgtcgattgtcgacgtggcgcttcctgtcggcactcagctctatcgccacgcgcagccagcgctggtagtgccggaggaaataacttcggcaatcgaaggattgaaacagtcgctggttgactgcaaccgctacaactactgctttgatgcagttacgcgtgtagaaaatgcctgccgctccgccatgctcgcagcagcccagcaggagggaaaatga

SEQ ID NO: 99764 - DNA, 213 bp, Enterobacter aerogenes
atgggaataactgaaggattttgcgccgatttgtattgcgactgtgatgattgtcagtcagggaaaatctatccgcaggggcaggctgatttcatcggccggaatatgaccgacatttctcaacaggcgcgcaaagctggctggcgcatcagcaaagaccgccagcgctgctatgcgccgggccacaaaatttcaaggggagccaaccaatga

SEQ ID NO: 99765 - DNA, 537 bp, Enterobacter aerogenes
atgacaactgatatcaccgaactggcgcagagagtcagaatcaacgctgaatgcggtgagcatcttcccccggcggagaccatggagctggtagaggctctggaatcagagaaaaggatttgcgcaacgtggagaaaaacagctgaggctaacagcgaaaagctggagaaggcgcagaccatcaacgcagcagccgaaaaactggtccgctgcaaaggtcgctatcacagcgagcagaactatcgagcgctggcggcgctgtttggcgtgaacactccaaatctgccgccgctggagcatgaaaacgtccattatgccgatgctgaagagatggagattgaagcactgcgccagcgcatcgccgaactggagtcccgcaccgtaacctttaagatgccatttacaccagagccaagcgcgtttgctccgtgggccgccaaagctttttaccaatttcacaaggatacggttaagtcatgtgttgcggtgttttcagatgcgtgcgccgccgctggcatcaaggtggaggctgagtga

SEQ ID NO: 99766 - DNA, 555 bp, Enterobacter aerogenes
atgaacatcgaaacagtaaacgagctcatcgcctccctggagagcgcaggcgagctgtcgataagagagcagaagttcctgaagctggcgaaagcgtttaagcagctggcggcggagaatgtggtgctgaaaggtggtccgcaaggattctttgcatacggcagtgagtgtggatatgaagaattcgatacggcagaagaagcgacggagtttgctgaagctgagattgcagacttccgcgaccaggcatgtgatggatggtctgatgaagtaggaagtgtcgtgtgggggatcgtgatgcaacgcgcatccatgactggcctccgtcctgtttccgaaaacgataatgttccgtcacacatcgaagaatggtgcgattacacgcttctgccggcagtagaaaccccctccaccgatcgcatcttggcggccgccgaggcgcgcggggtcgagaaggctatcgctcacctggagaaaaagttcagcaatatcggcgtgcagatcatgaatttgcagtggctggcagactcgctgcgcaagggagcatcagaatga

SEQ ID NO: 99767 - DNA, 591 bp, Enterobacter aerogenes
atgaacgattctgaaaaaccgaagttcgcccagtctatggcggcgatcggggagatttacggcaaggatatctccgaagtaatgattggcatctactggaatgcccttaagccatacccggttgaagacgtgatgcgctctttccaggggcatacccgagacaccgacaacggtcagtttttccctaagccagccgatctcctgcgtcacatcgaagggaacaaagacgggaaggcgctgatggcctggtcgaaggcttacaaggccatttgcagttacggccgccgcaacagtgttgtgttcgacgacccgaccattcacgcagtcatcgccgacatgggagggtggattgagtttgctggcatgagcgaagaagagatgccattccgggctcgcgagttcgaaaaacgctaccgctcttacctgattaccggtgtcagcaagtgtgaagcggtgatgatcggcatggatgacgcgcaaaacatccgctcaggcttccagcgcgaaccaatgccattcctgatcggcgagagggacaaggccaaactcatccgcaacggacaggcacttatcgagcacaggtggcaatga

SEQ ID NO: 99768 - DNA, 930 bp, Enterobacter aerogenes
atggcaaacaccgccgaagtaatcaattttcctgtgcctgacgtggcacttaaggagccgcgcgtggcagatattgacgacggctatacacggattgctaacgaacttctggagcacatagcaagtgctgatttaaccgctcgtcagctaaaactgatgctggcatacatccggaaaacatacggtttcaacaaaaaatcagatcgcattgctgatgagcaaattgctcagctgacaggtttatccaggcagaacgtaaacaaagcaaaaagggaattgctttcaatgaattgcctgattgttgaaggcaataaaattggcgtaaacaaggcggtttctgagtggaaattcagcaagtgtctccaagttagtaatcttgtctctaagccagagacaaagagtgtctccaagttagagacaaatgaagtctctgagttagagacacacaaaagacattctttaaagacaactttaaagacagatcttacccctatagtccccacgggggacgagtgtgaaaaacaaatcgctgacggtgctgttcaggacgaaccgaaacctgatctggtcaggaaggttttcacacactggcaaacagaacaccaccacctgtctgcaaagctggatgacaaaaggcgcaagcgcatcaaggccagactggctgaaggtttcaccgcagatgaactctgccgggcaatatccggcgccaaaggtgatccctggctgatgggcaagaatccctccaagaaacggtatgacggcgtagaaaccattctgcgtgacgctgcacaggtcgaaagactgcgcgacctggcaggagatgaacacgctatggcggtcgcacaaggccagtactcggcaaccactgctcgcaacctcgaaaccctccagcgctgggctggcggtactgattcaggagaacttttctga

SEQ ID NO: 99769 - DNA, 1053 bp, Enterobacter aerogenes
atgagcgcggcagcttactacaacgagatcgacccattcgcggcgcagtggctgcgtaacctcatagcagccgggcatatcgccccgggcgaagttgacgaacggagtattgaagatgtcacacctgacgacctcagaggatttacccagtgccactttttcgccgggattggtggatggtcatatgctctgcgtctggccggatggccggataacagaccgatttggacaggaagttgcccatgccagcctttctcctcgactggcaaaggcgctgggtttggtgacgacagacatttgtggcctgcctttggctggcttatcaagcagtgccgacctcagcgcatcgctggcgagcaagttgcaggaggtcgtgcggatccatggttcgaccttgtacaaaatgacgtggaaagaatgggctacgccttcgggcttacgccgttcccggctgcgggtgtcgggtcgccgaacgagcgagagcgggcctactgggtggccgacgccaacctgcaatacgaatccacagccagaaacgaagcgcggactgcagaacctgtccggagcggtgaaattatctggctggcaaactccgctcgcgaacgacgcgacggggtcgacccattgctacagcggaaagaacccggacggtactcccaaagtctgcctgaaattaccgggagccgttctactgacgggttgggtaactccaacgtcacgcgactggaaggattcggcgggaatgacggcgcagcgggacgggaaagagcgactggaccagttgccgcgccaggcgttcacctgcggccccttgaggttaacggtttttggcgagatgcggactggctcttttgtcgagatggaaaatggcgtccagttgaacccggcacattcccgctggttgatggggctgccgcacgcatgggacgagtcgagcccggggtggcaagagtggcaagcagcaaccgcgtcggccgcctgaaagggtacggcaacgccataaacgcacaggcagctgcggctttcattcgagcttatatgggggtcgcatga

SEQ ID NO: 99770 - DNA, 486 bp, Enterobacter aerogenes
atgaaattctccaaattcacagagttggtagcccgcatctggtcaaacccaactacgcagcgtcgcgacccggagattaccatcgtcgtccactcacctggcagcatcgggccgtcgccatccgtcgaggtcgaggctattcacgcaggcttcgactgggatgctggacaggtgatgatctacccggcccagccactgaccacgctgacaccggaacaggtagcggaaatcagcgagagtgttcgaaaaggccagagctggcacgcatacgaggcttacaagaagcacaaatcgcagctggaaaacgctgcgcttgagcatgcgaaagtcgccgggcagcgcgacgagctgctggcagcactcgaagaaatgaccgatatcgttagcaagcatacctacccacaaccagataaacctaactctacatggggtcgattagaggctgccaaagaagttatttcccggttaaaaggcggtgcagcatga

SEQ ID NO: 99771 - DNA, 1176 bp, Enterobacter aerogenes
atgtccgcagcgacaaaaacgataaacaacgcttcagagaatttctcgctatttcgcattacctttgcggtttttctgacctatatgaccgtggggttgccgctaccggttatcccgctatttgtgcaccacgatctcggctttggcaacacactcgtcggcgtggccgtcggcatccagtttctcgccacggtattaacccgcggctatgccgggagactggccgatcagtacggcgcgaaacgctcggtgctgcaaggaatgttggcctgtgctctggccggctgcgcctggctggcggcggcgctgctgccggtgccggtaatggccaaatttggcctgctggtgctgggtcgtttgattctcggctttggtgaaagccaacttctgaccggcaacttaagctggggattagggctggttggcccgcggcgttccggtaaagtgatgtcgtggaacggcatggcgatgtatggggcgctggcggtgggcgcgccgctggggctgctgatttacagccgcttcggcgtggcggcattggcctgcgttacgatggcgctgccgctgctggcgtgggcgattaacggcacggttcgtaaagttcccgcccacggcggcgagcgtccttcgctatggagcgtcatcggcatgatctggcggccgggaattggtctcggcctgcagggcgtcggctttgcggtgatcggtacctttgtttcactctatttcgccagccacggctgggcgatggccggcttcacgttgaccgcgtttggcggcgcttttgtcctgatgcgtattttgttcggctggatgccggatcgctttggcggcattaaggtggcgatggtatcactgctgattgaagcgatcggtctgacgctgctatggcaagcgccgggcgcctgggtggcgctggcgggcgccgctttgaccggctgcggttgctcgctcatcttcccggcgctgggtgttgaggtagtcaaacgggttccggcccaggttcgcggcaccgcgcttggcggctatgccgcgtttcaggatatctcttacggcgtcaccggcccgctggctggcctgcttgccacctcgcttggctatgcttccgtgttccttgccggggcgatttgcgcggtattgggcattggtgtcactttactgacgctgcgtaagtaa

SEQ ID NO: 99772 - DNA, 807 bp, Enterobacter aerogenes
atgattctatataaatatgtcgactctgaaacagcagacttaattataaaaaactcaacattgaaattttcaagagcatcgtctctaaacgatccttttgaattaactggtttacactatggctcggaagagcaatataaagagcaaactttaaagtttctttccgcttccatatcatatggaattttatctttgactcgcgcaccattaaatcctctgatgtgggcacattatggcaagggtgcaaattatgatgataaaaaaagcatcttgcttgataaggataatggctcgcatgcaggagttgtttttggcatagatgccaacgaagcagaattaaatgatgagggtttgaatgtcatccccgcaaagtatggcagtgttatttatgcatcaactaaaccccataatccttacataaactctgataatcttaatttctttgaaggaatgcagtttcattacaatcctgattttctggaggcactacaaagaacctttctctacaaacctgcttattggtcatatgaggaagaagttagggtggtaagaaacatctcgcgatatagaaatgaaattcagcccataagtagctccagcattaaggaaatttacatcggccttagaaatgcatacaaacatgattatttaaaaacaatgcgagatagaatcactcaacacctcccagaatgtaaaatatacgtttgcttcttcgatatttatgaatgggcgttcattaaaatatctatagacgaagcaattgagcaaattaatttacataattcacaacctaataatccagcgtag

SEQ ID NO: 99773 - DNA, 669 bp, Enterobacter aerogenes
atgaaatttcttcaaagagaattgccaggtcctgatgtattggctaagtatgattataataatcatacatgggatgatgtatcatcacacgacaaaaaagaaatatggcgtcatttagttcaaatgcagggtaaagtgtgtgcatattgcgagaggaaaatagatttatacaaagaaggtgataaacatattgaacattttaaaagaaaaggcatacatcgcgagttgactttttcttggcctaacctttttggttcatgcggagaacaaaaacggtgtgggttttataaagataaacaaaagtataatgagactgaactgctgaaagtcgatgaaatagatcctgaggatttctttgtttttatatataacggtgatgttattgtgaaggaaggaataagtggtcgaaatcaagtaatggctgatgttactctgcgggtgttcaatttaaatccccaagttggtggggttaaagcagagagaagaaacgtcattgaaaaagacttagatacgataaaaggatatgtcaagattgcaaaagagttgattgaaagtggtgaagatgttgaagaggtaaggcaatgtgttcgtgaggaatactataatcatatttctcaaatggaatttaggactgcaagaaaacatgtttttgacgcatttcttccttga

SEQ ID NO: 99774 - DNA, 1413 bp, Enterobacter aerogenes
gtggcagataacggatacggtaaaacgactatacttgatgcaatcgcaatatcattaagttggcttcgttctaatatacaaaaaaaagataaaccaggaacatatattagagaggttgatataaacaactcgaaggatgcactatatgcatctattgcggcaacatttaaagtacaagagctgaacgcaaatgttcttgtaacaaatgtaaaagacggtgtatctttcaagcgtagtaatgatttacaagaggttaaatcattagcaacaatgtatcgttatgttaatacgtttttagagaattctagtttaccagtaatggcatattattctatagtccgttcggttgttggtggaggagttgataataaaagaaaaaataataaaaataaattatcttggtcaaagttcgatgtttatgatgatttcatgttcgacagaaatgatttcggtgaattcctgaattggcttatatttttatctaataaatcagctcatgagaatgcggctgcacttgataatccggagtcacttataaaggaaatagaaagtattgataataccattaaacaattaagtgttgtttctaacattgatgctgatattattagtcaattaaaaaatagtcgtaatgaaaaacaattcttattaaataagattaacagtgcaagccgtttcagtgcatcgaatttttacagaaatgtgattaatactatattgaagtttttacctgagtttgatgacattaaccttgtttacagtgagagtgatgttaagcttgttctcaccaagaaaggtattgagttagacgctcaacaactttcgcaaggtgagaaaactatacttactttagttggtgatttatctagaagactttctcttctaaatccaaacttacagaatccatttgaagggaaaggtattgttctaattgatgaaattgatttacatcttcatcctgcatggcagcagagaattgttgagcgtttattaaccacctttcctaatatacaatttatactatcaacacatagtccacaggttttatccaccgttccgtctcgaagcataaggattttagaggaagttgaggatgagctcgggatgatttctataaaggctttcaaaccttcttatcaaactaaaggtttaacgaatagcgatgctcttctatatggtatgagaattgacccaatgcctcctgttgttgaagtaaaatggctggatgagtataagcaagcaattgaattagaccaatttgatagcgcttcatctcttaaattacgtcaaaaaataattagtcattttggtgaggaacatcctgtggtcatggaacttaatcagatgatttctctcatggaatttaaacggaaaattaaaaaaaataaaactgatgagggatggcggaaatga

SEQ ID NO: 99775 - DNA, 150 bp, Enterobacter aerogenes
atgattcaagaaaaaaggctagataatattttttcagaatttattaatttggttgataatagtgattcagaagatcaggtggtttattcacctttgttggaattgttaaatgatgccttaaataatgacaacctatacttaaaaaattag

SEQ ID NO: 99776 - DNA, 939 bp, Enterobacter aerogenes
atgcagcttgcaaaaaaactatgtgaaaaattctctcttacccctttgaagctttctatgctctccacaaaagctccaaaaaaatatcgtgtttattatatacctaagcgaacttctggcttcagagctattgcacaaccaactaaagagttgaaggaaattcagcgatttttggtttcagaactggagcctattttacccattcattcttcagcgatggcttatagatgtggcattagcataaaaaacaatgcggaaaaacataagaataattcttttatattgaaaatggattttcagaattttttcaataaaatcaagcccggtattttttttgagaaatttgataatctcgatattcaatgcaatagtcatgatagatatttactgcataattttttgttttggaagcctggacaaaaaagaagtgttacgcatatattaagtgtaggtgcacctagttcaccattcattagtaattttgttatgtttgatttcgattcagctataagtgagtggtgtgctaaatttgatattgtttatactcgttatgctgatgatataactttttcgacgtcaaggaaggggattttatttagtgttcctaagatcgtgaaaaatatgcttgcagagtatgcgtctggtattactctcaatgaagcaaaaactatttttacatctaaagctcacaacagacatgtaactggcgtaactatcaccactgatggtaaattatctataggcagaaagaaaaagaagtatttatattcacttgtttttaaatataccaaaggtgagttaacaaacgaagagattttatatgcaaaaggcttgatggcttactgcatacatatcgaaaggaacataataactagattgaaaaagaaatatggttcggaagtaattaatcaattccttaaggagacaggagatgaatga

SEQ ID NO: 99777 - DNA, 297 bp, Enterobacter aerogenes
atgagcgtaattcatgatttaaagattggcccgctgttttttaatgctgtagcaaatggcgagaaaaaagcagaagtgagaaagaatgaccgtgattttaaatgcggtgattttctgctgcttcgtgaatgggagggggaatattcaggtaataagctggtcgtaaaggttacgcatatattgccgcttgatcgtttagttgtcggcggtggcaattgggtaatgatgtcggtttctcatattgaaaaaagtgatattcagccttttatggcagcagttatcgggggtgttcaatga

SEQ ID NO: 99778 - DNA, 246 bp, Enterobacter aerogenes
atgagcactgagatttcaattcgtgtaccaaaagtgattgccacgccagcagaatttgctgaatgggaagggtattcccgtggttcggtttatcagatgattcataacggcaaactggctaacttcattgaaaagaaagaaaaaaacaaagggcgtgtattcatcctctatctcaaatacaaaaaggagcaggcgcgcaaaaacatggaccaatcagcctttaactacaacgtagttgtaggttag

SEQ ID NO: 99779 - DNA, 633 bp, Enterobacter aerogenes
atgagatcaattaaggttggtaatgacagcggaggccgcgaagcaataaacaggctgattaaggcttataatttcagctcgcggcaacagctatgcgaccatctatccgtatcaaaaagcactatggcaaacagatacttacgcgatagcttccctgctgagtgggtaatacagtgcgcactcgaaacaggcatttcgttgctttggctaactaccgggcaaggggatatgcatgatgataataggcaagaaaaaaggtttgattttgtgaccccatcaagtatcaaaccgctatctgaggtggtagctcctgagatcgataaagctacgcttgatgcaggcgctttagtagaccatggaaaagttatattggataacagcctaataccgcagaacttgacgaatccgttacttgtccatactgatgatggctcttacctcgtagaccgtaacgcagcaactcccgtaaatggtgtatggctcgttgatattgatggaataaaaactattgcaaaactcacgaggatacccggtaaccgtctagtcgttcagcaaggggattcatcttttgaatgctctttggacgatattgaaattgtgggacgtgctctcaaatcaattaagagtatttaa

SEQ ID NO: 99780 - DNA, 1014 bp, Enterobacter aerogenes
atgaatctttggttatcattattttttatcggcttatacattgtggctctcttactcttgctttatctaacatacaagaatgagtggtacaaattaaatcatgagaatctttttagtcaaaaaatattctggatttccatattaacaccaacactaagcttcatttattttggtatattttcttggctgggacataaaccacaattagatagcgatggcatgactaattttttaaccataacaaaactgccattattcatccttgcagcagcagtaccactcggagctataatcaccaaccttcatagaacatatcaggtcgaagctcaaataaaaacagctgaagaaaaaaacaaatcagatgcattttacgcacattataaatattacacagaaactttttcgaaattagaagtaagtaaaaagccattaaagaatccaaaacaaagaatggatgatgtaaattcactcactattacaatcaacaaaacgcacactttatataagaaagcctttcatacctcatcacccattactgggcctaaattcactcctagctccatttttttaaatgcgacagaaaaatttgtggataattttctggaatcagtaagaaaaatggatcacgatattttatcacgtaagttaaatgatggaataagcaaaaaagatgaacacatcaaaagaatgaggataactttattaacgctctgtacctacttatgtatagaagatgatatctccgagctagattttcttgacatggaaataaataatagaaaagtttgtttgaaacttagcttgttgagattaaggttaatgtgcattaaggttagtatggccataattcaaatcctagacatattaggcgttgataataaaagccatcctgaattatatggaaaaatcaagaaattaaggacatgcgtaaaggaacctatatcaattttggataatattgagtggcacttaaatgctgaagcactcgaaggaaccctaaacaaaaatgattga

SEQ ID NO: 99781 - DNA, 1242 bp, Enterobacter aerogenes
atggcacgaaaaaccaagccgttaaccgatacggaaatcaaagccgccaaacctaaagatgccgattaccagctatatgatggtgatgggcttactctgttaatcaagtccagcggtagtaagctctggcagttccgttactatcgacctctgacaaaacagcgaaccaagcaaagcttcggagcctaccctgccgtctcgctttctgatgcgcgtaaactcagagctgaatctcgagttttgttggcgaaagacattgatcctcagcaacatcagaaagaacaggttagaaattctcaagaagccaaaaccaacactttcctgttagttgccgagcgttggtggaatgtgaagaaagccagcgtaacagaggactatgccgacgatatctggcgctcgcttgagagagatgttttcccagcaatcggtgatatcagtgtcactgagattagggctcatactctggttaaagcagtgcagccagttcaggccagaggtgcattagagacagtccgacgcctttgtcagcgtattaatgaagtcatgatttacgcgcagaacacaggcttgattgatgcagttcccagtgtaaatatcgaaaaagcgttcgagaaaccgcaaaagaaaaacatgccaagcatccgcccggagcaactaccacagctaatgcaaactatgcgtacggctagcatcagtatgtcaacgcggtgcttgttcatgtggcaacttctcaccattacccgaccagtcgaggcctctgaagcgagatgggatgagatcgattttgataccaacgaatggaaaattcctgctgctcgaatgaagatgaaccgggagcatacgattccattgtctgatgaagccctcgctattcttgcaacgatgaagtctctcagtggtggccgagaatttatctttcccattcgcatcaaaccaacccaaccgatgaacagccaaacagttaatgccgcacttaagcgtgctggcttaggaggcgtactcgtatcacacggtttacgttctatcgctagtacggcactcaatgaggaaggatttccgcctgatgtcattgaagcagcactggctcatgtagacaaaaatgaggtacgtcgagcttacaaccgcagcgactatcttgagcaacgccgccctatgatgcaatggtgggctgatttcgtaagcaaggccgatagcgggagcattgttgaaactgggaaaacggggttaaaacttgtgggatga

SEQ ID NO: 99782 - DNA, 300 bp, Enterobacter aerogenes
atgacaaaaccagcatccaccagtaaaactccccgtaaacagtacacgcctgaattccgtgatgaagcacttaaactggctgaacgcatcggtgtcgctgccgcagcccgcgaacttagcctgtatgaatcccagctctacaactggcgcagtaaacaacagcaacagatgacctcgtcagaacgcgagaatgaactggctgccgaaaatgcgcgcctcaagcgccaacttgcggaacaggctgaggagctggctatcctccaaaaggccgcgacatacttcgcgaagcgcctgaaatga

SEQ ID NO: 99783 - DNA, 1155 bp, Enterobacter aerogenes
atgactgcaaaactatgtttcttccccgtaggtaatggggatatgacacttattcaaactgaagatggaaaaaatatattaatcgattgccgtattagggatggagaagaacatcctgatgtccgctcacaacttagagaaaaactctctcgtgatagcgaagggcgtcttttcgtcaatctttttatttggacgcatcctgattcagatcattgtgatggagtatctgatcactttcacttggggaaacctgaaaattggagtgaaaagagcgataaaatttttatcaatgaaatttggtcaagcccaattgtatttagacgccatcatgctcaaaatcatccattatgtgatgatgcaatagcgttaaatacagaagtgaagagaagagttaatctttacaaagagaagggctatttggatggtgtcggaaatcaagtcttggtcttaggtaaagacgagaatggtaaaactgatgatataccatatattcttttagaattagataatacaaccagttatattaacggagaatcttcatcagtctttcaagcccggttattaggtccatcacccaagaaagatctcgacgagttagaagataaattaggtaaaaatcattcgagtgttatcataaactttgaattaagaggtgataacaaaactgcttattttttaagtggaggtgatgctgaggttgtgtgctgggaaggtgtgaaagatcgtctatcagacaagaatgaaatgtcatggttagattatgatatcttacaaacaccacatcattgttcttggcacagtatatctcatgatagtctaagccaaaaaggcgacgatgcaaaaacctctgaaaaagcaatggaggtatttaaccgtgcaaaacaaaatgctttcattatatcaagttcgaaaacaattgaagacgatgaaaaagatcctccagcttaccgagcaaaagaagagtatgaaaaaataacagatgataaaaacggtcaatttctgtgcgtatctgatcacaaaaaaaatgggaaaaatgttcctttagaaattgaaatttccagtaatggtattaagaagatagcggcatctacattaggtatggcagaatcatctaatacagtagtaaatagacaaggtggtggtggttatgcctga

SEQ ID NO: 99784 - DNA, 1875 bp, Enterobacter aerogenes
atgcctgattgtcttaaaaaaaagatagatcagttaaatagaatccttgcaccttatggtgcaaggaagctgtccaatactgaattatctattcttgatgcaaaatatgtatgtgtctgggaattatctacagatttagtattcaatgacgactcaattgtattacaaataaggtataaaagtttaacaccgcatgatatcccagaagtatttgtatcatctccagtaataaatgtatgtcaattacctcatatagaaaaaaatggtaaactatgtgtttggccaaatacatatattattgatttgagtaataattcatatgttcttgaattattaagtgatgcctattcaatgttgaaaaaaggcatcaaaggagatcttagagatgattttattgacgagtttcagaattactggatttatcattgcaataaaatagaacgtattattagcctatgtgatttgaacataaaaaacacaagattagtatacggctacaaagcaaaaacattaggatggatatattctgatggcgaacaaaaattaattaattggttagataatcagaaactactatcttccaattcagataactctaatgcaagagataaacacctacgccaaagacaactttccagaataatatctattccattaatattttttgaaaatgcatggtatccagaacaatatccaagaacaataagagatttattcaatttaatcaatgaatatcataatgagccagatatagttgatgagtttattttaaaatcaatagcaaatatatctaatcgcaacccaactgttttaatagcatttcctacgccctcaggaatgaatattataggaattcgaatttctgagaatgtaggtgatcgtcatacagataggtatgatacaagagctatcgctaacggtcgattccacattaattcattattagatggtcatagagattatatcaatggccgcattttaaagaatagaattggtgagttaaaagcacaaaacatcttagttgaacgtaacgataactcatggataatgggtagagatcataatcctacttataaaaaaatatctgagcatacagtagctataatcggatgtggctcagtcggttcatctatatcgaggctgttaatacaatctggcattacaaaaataatgctctgggatgaagactctatgaaatcagaaaattcttcacgacatctcctggggttcgattctgttaacaaaaataaagcatctgctctcgcatccaaacttcgtttagaatttccaaacaccagtatagagtattttaatgaagaatggtccgaaaacgctgaatcaagtacaagaattactgaggctgaccttattctaagctgcacagccgattggaataccgagcaacaactgttaagtaaacaatctcagtgtaatttgggcgttcttgtttttgcttttgttgaagctcatgcaatggctggacatgtaatagtaaatcaaatagattctggtgcctttaatgcctggcattacactcaaggtgaaaaaataggtgcattgagatatcctgctacatattggaaagaaaatacaaaaaaaagaattgctgcttgtgctggagaatttcagccttatggagcgatacctttagcaaacttacattcacttgctgcaagaacaataattgacttaatattgaatagatttcctgacagttcctttgcatatagctatcttggtagacaagaagaactggtagaacttggtggtcaatggaataattgttggataaataaatttggcaatccaaataaaggcgatcgaatcatttctttgatttatgaaaactcaaattggatgaataacgatgcataa

SEQ ID NO: 99785 - DNA, 1056 bp, Enterobacter aerogenes
atgaatggtaaattgatagttcgcttagttgaagcctccttggcggggaaacttgagcaagtaaaaatcatcactaacttactcagcagtgagatgctcagttatgacccagaatcaagcaaatccttaaaaaaattagtatctggttcacttcgctcagttgccgaaagggtcaatccacatccaataaagccagcaaatggaaatagtttgtttttggcaaaccaagatactgatgcatcagtttacgaattagtgctttctcaagaaaatgaaagtaaaattcatcagataattaaagaacatgaaaactccaaaaaattgcaaacacatggtttaagccctattaagactattctatttaatggacctcctggcgtaggtaagactttaactgcaaaatggcttgctaaaaaaatgaatatcccattaaggattgttgatttagcttctgttatgagtagccttttagggaaaacagggaataatattaaaagtgtttttgaagatgctgcaaataccccatgcatacttctattagatgagttcgatgcaattgctaaaaaaagagcagatgagcatgatgttggcgaattgaaaaggcttttaactgtattgctacaacttatcgattcatggcctagcacgtcgattcttattgcagcaacgaatcatccagagttattagatccagcagtatggagaagatttgaattaaagcttgattttacaaacccggacaatgaacaggttaaaaaatatctactagaaatttctaaagaacaacgaatttctgatcttcattttttatttgctgggatgtcatatagtgaaataaaaaatgaaattacaaaatgtaagaaaatcgcgattcttgatggtaaggatctcgcttatcagttgattatcaactctacaaaaaatgactcaacgttatcacttgaagataagaaaataattgctaagctcttagtacaagcaaatctatcgcaacgaaaagtatcggaattattaaacatttcaagaccgactattaaaaaagccttggctgaataa

SEQ ID NO: 99786 - DNA, 2283 bp, Enterobacter aerogenes
atgaaaaaagtagtattaggtaacggcgaaaaatatgcttttgacaatgtttacagaggcagaccgactggagatgaaccaagaccatatccttactcggtttcatcccgtcgcgtctcgaaaaaagtctctgatactcttaaagttgcagaaaaattgccaaaagatgcaactcctgatgatgagattgtcactgctgtgacactccacccaagctttttagctaaaagctactatccaacctctttattaaaagattactcactgaaaagtttaggtagcaaagaggtatttgtaaaaccagaagcagcagttaataaagagcaacaacagcgaccagtttcaacttctgtatactatttggcaggtaaaaaaacatctttcgaacgtttgttatctgatattgaaaaaaactccattagtgagcaatcaggtattgatttaggaaagattgaagatcttactcttttcagcagcgaacaaaaaataaaaaaacataccgaaagtgggattcatacctacgaagtagttttacacttaaaagaaagtgatacaaagaaaataaatgatttcatcaagtacatatatgatttgaatggtacgatatctaaagataaaattagatatgtgggtgatttagctttttgcttcgtaaaaattgataaccaacaaatactagacttagctagtttctcttttgttcgcgttgttagaatagcgcctaaaataaatcttttcaattcatcattccaagatggagatatcagctcaagttcacacaaacacttaaaggatcaaatatcgtataagaatagtgacttaaaagatttaggcgatgctaatgttgccgtatttgacggaggtctattctataataaacttacatctccttctttgagatactttgatcttacaggaagtaatgataatgattctgaaatatttacacatggcgagttagtaacatcagcaattatgtatgggacaatcgatgaattatcatctgagaatcatgaggtcatcaatgttgaccattataaagtttattgcgaagaagatgaagatgacataggtcttgttgatgtgttagaccggatttgttctgtacttgaaaacaaaaattataaaattgctaatatcagtcttggcccagaagtaccagcacctgatgatgaacccaacctgtggacgtctactctagacaaaatagcaggggacggttctatccttcttgtaattgcagcagggaatacgggtggcatcttgaaacactcacctcaagattatgatcttgcacgtattcaaccccctgcagatatgctaaatggtctaagcattggagcggcaaactcaaatgctgatatttgggaaagagcaaactacagtagcgttggaccgggccgtcgccctggttatgttaaaccagatgcgctatttttcggaggagatgacgaaccaactggcgataaattaagactacttggtttatacgactttgaagagaaattaaaatttggcacgagttatgctgcgcctttagttacacgtctagcggcccgtttagataatatgactttaggtaaaatgaatgtcgctacattacgtgcacttttaattcactcaactgagtcaactacagataaaaaaggatgcggttggggaaggatagcagataatattgaaaactatattttttgtgatgataatactgttacagtaatatatcaaggcaccttaaccaaaagtagtggtgtccgcgctgccataccttgccctgaatcattaaagattagtaagacaaaaatagatttagcggcaactttgtgtttttacactgaggttgatcacaagcatcctgtaagctattcacgagctggcattgaagtaacatttagaccacacagcgaaaaatttaagataaataaagaaactggaaaaatggcattagaagctaataccagaactctttttaataaagaaaatatattaggaaatgaacaaaacctccgtaaagatgcacataaatgggaaacttgctataaggtaaacgatgtttttcaagcatctaccattaacgatcccgcccttgacatcaaatatctaacgcgtgatgaaggtcatgcattgacaagtaaagaaatggcttcattacctattttaaactattctttggttataactttacgtacgagaaaaaatactaacctttatgatgagattataaatgaatatgatttattacagccaatatccataaacatcacaccagatgtaactgtataa

SEQ ID NO: 99787 - DNA, 342 bp, Enterobacter aerogenes
atgaagagaaattcaattagttatacagccttgcgagatagtgaggcaaaatcttctgaaagattttaccaagatctttctgctaaaacgttgaaatgtattggtcgcattacttctttcgacctagagtcatcgaccaatattaccgaggtaaaaagttacatgggcataaattacaatgcccttgctattatcatcacaaatttaaaaaactctggttatattaaattgtttttagattcaaattctccccaaggtgaaaataacaacgtaggccctgacaatttgaatattaagttaaccaaggatggactaaatgcgatcctcaataactcccactga

SEQ ID NO: 99788 - DNA, 897 bp, Enterobacter aerogenes
atgcgatcctcaataactcccactgaaaaagaaggatgggactggcgtctcatccgtaactcatttattaagataacattatttgctttggtaatagtgttaattaataaatatttccagtttcaattacctgagggtaatagagattacctatatgtcttttccattgggttattgttgagtgctattgagttaggttcacgttataaagacgagccaatttcggtaatgacatgttttcctggcgcattttatttagttatcaatggccttatttgctgcctaggactttttttcattaataccttcggcacacatgaaccaataacaaaaaccatggggattgctaataccaatgagtttagtacacatgtagcaaatatactctatgcttcattgggtagcttttttgttatgcgaagctcatttctaaaacttggtagtgataattctcaatcacaagttgacttaggccttaacatcattcttaagaaaatgattgatatgattgatcgacaagtcgatcgtgaccaagcgcgccgccgttcaaaagacatcacaagaattttaaagaatgttagtttcgattctctatcatcaagaatacatccattctgtatgcaggtaatgcaaaacatccctgaggcagaaatagactctttatttcgagagttgaaggaaattagtgcctcagatgattgtgatgaatccaagaaaatggccattggcttgcaaatatataatatagttggcaaaaaactttttgcttcaattattgaagatcttgagttgataaggactccaccgaccgataacaatcctaaagcccctcctgtgaatgatttcactcattcattcagcgagataattgaacaagtaaatactaaaggcgtataa

SEQ ID NO: 99789 - DNA, 564 bp, Enterobacter aerogenes
gtgaccacactgacgctacagaaagcctttgaggcctgtcaggcaaacaaatccgcctggctgcaacgcagggaagaactgacgcaggccgaacaggcataccgcgaacagcttgccggtgacggccatagcggccagagtctgcaaactcttcgcggtattattggggtaaaaaaatgggaaattaatcaggctgccggtcgctatatccggtcgcatgaggaggtgcagcgtatcagcatccgtaaccggctgaatgattttatgcaggtgcacggcgcggagctggtcgcagcgctcgcgcctgaattaatgggctatagcagtcagcatcccgccgtcagaaactgcgccatgcagcactcggtcgactatctacgcgaggcactaaatgtctggctggccgccggtgaaaaaattaattattctgcgcaggataatgacattttaactgtcatcggattcaggcctgacggggcttcacgcgatgataatcgtgaaaaattcacacccgcacagaacctgaattttgctcgccagcgcgcagaactggccgcgcagtag

SEQ ID NO: 99790 - DNA, 219 bp, Enterobacter aerogenes
atgtttcactgtccgttctgcaaaactggtgcgcacgcccgcaccagtcgttatctgtctgagaacgtcaaacagcgctacaaccagtgcgtgaatatcgagtgttcggcaacttttcgcacgcttgaatccattgacggggttatccgttcaccggcgacagagccggtcatccctgcatccgaaccggcggccatcgttaaccgtgctggcgcttaa

SEQ ID NO: 99791 - DNA, 744 bp, Enterobacter aerogenes
atgaaacccgaaacagtcatttctgccctgcagaacgttgtcgctaaacagagcgcggaaagcgagaagcacatcactgccaaactgaccgtattcactgcggccagagacacccacgcagccagcatggaaaagctgaaagagattgatacatcaattgaacgctgtaagcaggagcgacagaacgccctcgatgagagcgccgaggcggaacaggactggcgcagtcgcttccgtaccctgcgcggtaatctcactcctgaaatgaaagcggagcacagcaagcgtatcgccagtcgggaactggccgacgagttcaccggcctgattgcggagctggagactgaccggagtcgtgccatgctgaatgtctgctccaccggcaataattatcgctctgcgcatggcgaagcatttaccgcttacgccggggcggaatgggttaaggctatcaacgcggttcccgtcgcgctcattcgcgctttcctgctgcgcattcgtgccctggaaatgaagggggaaagcgcaccgcaatctgtcgccatcggtgaactgcgtgatgccctcaaccgtcagggcagtctgtatcacttcgatatgaaacaggagccggtcttatccgtgacgggtatgcagcagccacagattaccggcgtggatagggagctgttgcgcagtccacttaagcgaaacatgctcgcccagaagctggctgcacatgacgaaaccaagaaaggggcataa

SEQ ID NO: 99792 - DNA, 2334 bp, Enterobacter aerogenes
atgaaaatgaacgtaaccgaaaccgtaaaacaggcgtgcggccactggccgcgcattctcacggcgctgggtgtagcggtcatcaaaaaccgtcatcaggcctgcccggtgtgcggcggctctgaccgctttcgcttcgatgataaagaggggcgcgggacgtggttctgcaaccagtgcggcgcgggtgacgggctgaaactggtcgaaaaggtgttcggcgtgtcgccctccgaggccgccgggaaggtgaacgccctgaccggcagcctgtcgccggttgctgaggatattattgctgtcgctgaggctgaaactgatgccagccgcaaagccgcagccacgcttgccgcaaagcttctggagaaaacccgcccggccaccggcaatgcctacctgacccgcaagggctttcctgcgctcgaatgcatgacgctgaccaccacgcacaagaccggcggcgtgacctaccgcgccgctgatttaatcgtgccgctgcaggacgataccggcgcgctggttaacgttcagcttattaattctgacggtctcaaacgcaccctgaaaggcggagcggtaaaaggggcgtatcaccttatcaaggggaaaaaagaggcgggaaaacgcctgtggatagcggagggctacgcgaccgcactcaccgtgcatcacctgaccggcgaaaccgtcatggtggcgctctcgtccgtgaaccttctttctctggcgagccttgcccgtcagaaacacccggcctgtcagattgtgctcgctgccgaccgtgacctcagcgggaacggtcagaccaaggccgcagcggccgcacaggcctgtgagggcacggttgcccttccgccggtattcggtgactggaatgatgcctttatgcagcagggtgacgacaccacgcgcaaagcgatttacggtgccatcaggccagcggctgaaagtccgttcgacaccatgagcgaggcggaatttaccgccatgagtaccagtgaaaaggcgatgcgggtgcatgagcattacggcgaagcgctggccgtcgatgcgaacggccagctcctctcccggtatgaagccgggacatggaaaattatcccgacgtcaggctttgctcgcgacgtggccgggctattccagcgcctgcgcgcgccgttctcgtcgggcagaattgcctcggtggtcgacaccctgaaattgattattccacagcaagatgcaccggcacgacgtttgattggcttccgtaatggcgtgctcgacacccaaagcggattattcagcccccatagtaaaacgcactggctgcgcacgctgtgcgatgtggattttaccccaccagtggagggggaaatgctggaggcgcacgcgccgaatttctggcattggctcgaccgcgcagccgggggaaacgctcaaaaacgcgatattattcttgccgcgctgtttatggtgctggcgaatcgatacgactggcagctctttctagaagtgaccggtcccggcgggagcggaaaaagtattctggctgagagtgcgaccatgctcgccgggaaggataacactacctcagctactatcgaaacgctggagtcatcgagagaacgtgcggcggtaattggttactcgttgattattctccccgatcaggagaagtggagcggggatggcgccggtataaaagccatcacaggtggcgatgcggtctcggtcgatccgaaataccgcgatgcttactccacccatattccagcagtgattctggccgtgaacaacaaccctatgcgctttaccgatcgcagcggcggcgtgtcacgacgaagggtgattatgcatttcccggagcagatcgccccagaggaccgcgatccacagctgaaagataaaattgcctgtgagttggccgtcattgtgcgccagcttatgcagcagttcagtgaccccatgacggcgcggacgctgctccagtctcagcagaactctgaggaggcaatcaacatcaaacgtgacgccgacccagcctttgatttttgtggctatctcgaagcactggaacagccaaacggaatgtttatgggtaacgccaatatcgtcccaagacagccccgcaattacctttaccacgcctatctggtctacatggaagccaacgggtacaagaatgtcctcagcctgaaaatgttcggactagggctaccactgatgctcaaagagtacggcgtgaattacgagaaacgacatacccggcaggggacgcaaactaacattaagctgacggaggagagcaattccgactggctacccaaatgtgatgacacactcgtgatttaa

SEQ ID NO: 99793 - DNA, 1260 bp, Enterobacter aerogenes
atggctatcacagacgtagcagctcgcacagcaaagccccgcgaaaaagaatacaaactcacagactcccacggcttatatctcttagttaaaccaactggttctaaacgctggtatctgaagtaccgctttgaaggtaaagaaagcagggttgctttgggtgcttatcctcttgtatccctcgcaaaagcgcgtgaaaaacgtgatgagatacgcctcttgttagctgaagggattagccctaatgcaaaaaaagaagaagtgagagagcaggagcaagcaacgttaaatacttttgagaaagtggcaaaagactggcactcgaacaataagcgttggtctagcggtcatgctgaaagagtatggcgagatttagatcgcaatattcttccaactatcggcgctagaaacattgcagatttatctactcgagatctcttgcttccattgcgtgaagtagaaatgagcggtcgcttggatgttgcttctcgtttacagcaacgtatcacaggtattatgcgctacgccgtacaaagtggcctcattgaccgaaatccagcacaggatctcgctggagctattacatcaagaaaagcgactcacagaccggctttacctcttgagaaactacctgattttctccaaaagattgaatgtcataaaggccgtttgctaacacgtttggctcttcaactatgcctcaatgtttttatccgttctagcgagttacgttttgcacggtggaaagagattgatctcaagaaagcactttggactattcctgctgagcgagaggccattgaaggtgtgaaacattcccaccgtgggtcgaaaatgagaacaactcatctagtaccattatctcatcaggcgatagccttactcgaagagatcagaatgttaagtggtcatagtgatttagttttccccggggatcatcatccaactaaacccatgagtgaaaacaccatcaataacgctttacgtgggatgggttatgacaccaaaaccgaagtatgtggacatggtttccgtgcgatggcgtgtagtgcgttagttgagtcagggttatggtctcgtgacgcggtggaaaggcaaatgagccatcaggaaagaaacggtgttcgggctgcgtacattcataaagcagaacatttggaagagcggagattgatggtccaatggtgggctgattatttagatgctaatgcaaacgcgcatataacaccatttgagtttgctaagcggtatcagtcataa

SEQ ID NO: 99794 - DNA, 639 bp, Enterobacter aerogenes
atggaatcctggaaggttaatctcatttctgtctggttcggctgttttttcaccggactcgccatcagtcaaattctgcccttcttaccgctgtatgtctctcagttgggcgttacctcacatcaagcgctgtcgatgtggtcgggcttgacctttagcgtcaccttcctggtgtcggcgattgtctcgccgatgtgggggagcctggcagaccgcaaagggcgcaaactgatgctgctgcgcgcctcccttggcatggcgatagcgattttgctacaggcttttgcgaccaacgtttggcagctttttattttgcgtgcggtaatggggctaacctcaggctatatacccaacgccatggcgctggtggcctcgcaggtgccgcgtgaacgcagcggttgggcgctaagtacgctgtcgacggcgcagataagcggcgtgatcggcggcccgctgcttggcggttttcttgccgaccacgtcggcctgcgggcggtatttttcattaccgcgattttactgacggtcagcttcctcgtgaccttgtttctgattaaagagggcgcccggccgcaaatgagcaaagctgaacgcctgagcggtaatatagtcattcgcaccctggaaattacactttga

SEQ ID NO: 99795 - DNA, 159 bp, Enterobacter aerogenes
atggcaaatgctactaaaagcgccgcgacaaagcgcaacaaccgtaaaattcatgcccgtaaattcctggctacgccagagggtaaagcctggcttgctaagaagcaggaagaagaagcagagattaaattagcgcgagcagctaacaccatgttttaa

SEQ ID NO: 99796 - DNA, 147 bp, Enterobacter aerogenes
atgacctcttctttctcacgcctaaacttgatcacctctatcatcatgttggttttagtttgtctcgcatttctgactgatgactctcttatctccgttgcctacttcggtcgggtgttaattgatttaagagatcgtttgcaatga

SEQ ID NO: 99797 - DNA, 135 bp, Enterobacter aerogenes
atgccgaatcagcacattatggcgttagcgctcgcgctgtgcaacgtaagcaacggtaaaaccgtccgaatccctgccatgacaggaagccagcttcatttgcttatgatgtggctacgggctttacaggaatga

SEQ ID NO: 99798 - DNA, 309 bp, Enterobacter aerogenes
atgggtgagtatcaaatgactaacagttacggattgaaaacgcctgaacaatggcaacaagaaagtattcttgccctgctgtttcattacgaccacgtagaagcctgtttcatggcagatgcaatcaaggtgttaccagaagatcacgactggaacagagcggaggagtatttagaaagcctgatagaatggctggctggttatacggacgaaagcgaggcgagaaaggctatcgagtgttacagcgtcaaaggcagcgaagagcaaacagaatttttcttaggtgcaattctcggagatgagtattga

SEQ ID NO: 99799 - DNA, 198 bp, Enterobacter aerogenes
atggagattatagagatgaacgaacacacaaccgctttcagccctattaagagcgaagaagaattgaaattcgccgtagcatttttggacatgtggcagagaagccaggagcacggtgtgaactttgaacaggtgttgaaagatgcaattcaacaagcaacaccgaacgaggatcgtaaatgggtgagtatcaaatga

SEQ ID NO: 99800 - DNA, 195 bp, Enterobacter aerogenes
atgaaaaacagcttactggtgctgtcattattaccagccctggcaaatgccggacaaataacccttgttcttagtgacgaacaggaaacagacaacgcgcggatttgcgtttatagcaacgccaattatacagagacagtgacgatcagaccgtcgcagcaatgccgctacacaatgacctttgaagaggagtaa

SEQ ID NO: 99801 - DNA, 561 bp, Enterobacter aerogenes
atggcgaccacgaagataatcacccaggcagaggcttttaagctgattaactggcttgaaagtcataacaaacagctattcgcagatgtagcgatcactatggcctctttatgtttacgggtaggtgacacggtgaatttgaagttcagccagttcaaggaaggaaacacgctggaagtgttggagagtaagacgggcaagaagaaggaaatcatagtccctgcgaaggtgtgggagattgtaggacgtcgccgccaggcattcccgaaagacgaatacgttttcacgtcacacagcaaccgagcttcaggaaaagccccagtaagccgtgaacaagtgaaccgtgagatcaaacaggctgcggagaatgtcgggattaaaggaaccgtcgggtgccattcttttcgcaagttttctgccacacaggtgtgggagaagtctaacgggaatttggctttagcaatgaaagcgctgaaccattcagatcctaaagtcaccatgaactatttgaagattgacgttaagagcgtgggcgctgcccttgcaaacatttgggagtga

SEQ ID NO: 99802 - DNA, 462 bp, Enterobacter aerogenes
atgaatcattctcagccccacctcagcacatctcacacgccacatacaattgaactcaccaccgaacagatgtttgacagcctggtgccctatttcaccgaagtaacgcatccacaaaagcgcggtaagcaccccaaagtgctgactttcaccaccgatcataaacgagtgtgggcgtatctcagagagtgtgaggacgatacagccggatgtgtgatgttcgatctgagttgtacagcccgtaatctcggcatgactcagaaacgagtgatgaccgtcattgacgatctggataatgctggctggatactctgccgagacgttgggaacactggagctggcacctatcagatcaccatccaggacattgaaaccatcgtttcattatgtagcaccatcacgtatgcccagccaactatactaacgatggatgtgctgagaggctcacgcctggttcattaa

SEQ ID NO: 99803 - DNA, 165 bp, Enterobacter aerogenes
atgaaaatcaatttcacaacagaaacttacgaggcgttgatcaaccgtgccaacaaagaagacaaacccgctgccgctctggtatcggaactcataacagcgatccttagcaaagaggaaaataatgaagacaacaaaacacgaaaagctattcctggtgattga

SEQ ID NO: 99804 - DNA, 603 bp, Enterobacter aerogenes
atgaagacaacaaaacacgaaaagctattcctggtgattgactatgatttactcggaatcacttccgtagaagttaacggcgaaactcacgaagtaaaacttcaccacaagatcgtttattcctatctgcaaagcctgtccggtacattccaacaagtaaccccttcattaactggtattggtaaacggctcggacttggtacagatcaaactgtacgccgccacattaaagaccttgtttcttttggatggctacatgtgaaagagcgtccagggtgtacaagcatcttcaccgttctaccgtatgaccagaagtcacctgtaacagtgtctgacgaagtgccagcccctgagccagtgaatacagtagaaacccacgaagacacaccagcgataacgcctcaaagaatccgtacttctgacgcagtgaaacacctgcttgaaaatctctcacaacgacgagaggacgagagcttttattcctggtcatcaagagtgcttcaacgaatcggaatagatcattcaatgggaatcgagcaactatttcaggaaacacacccgtatgaatacacccagattgaacaatcaacgataccattttaa

SEQ ID NO: 99805 - DNA, 285 bp, Enterobacter aerogenes
ttgatacaatacataaaattgaacaacacaaaccagatacagatcaacgatagcgggaagggcgtttatcatgcgcttatctggttctggaaaggaaggaagaccaaaatttcttacggcgagctatctgataaatccggtgtaagtgatcacgggatcagattctggcttcgtgcgctgcgcaacattggtgtgatcgatatcgacgatgaaagccattatctatcattcacgctgaaacacatcgaacgagacaatgtagaatttatctactctaatttctaa

SEQ ID NO: 99806 - DNA, 390 bp, Enterobacter aerogenes
atgggaagaaaagagcgaaatccgattaaacggatagaaaaagcagtaagagcaacaaaacgtaaatacagccataagctaaaagattattccagagaatctattccaggctcactaaaaacaactattttagaacaccctccctctgtaccttgcggtgatgaatacaacgccttgcaagaaataattagcactacgcctggcgtattctggaaacctcgaaaaagaaaagaatacatcattgacagtagcgaccttcgaaaattccaaattctcggattcgaacattacgccgattatgtgggattttcagaaattaacggcctgagtggtcacactgccgatttggattttttatttaatgacgataaggaaaattataatgactaa

SEQ ID NO: 99807 - DNA, 339 bp, Enterobacter aerogenes
atgactaacgacacaattcaatctctacttcttagtttcgaagataactatcatctcccgctactacaggaagtgaataaaacatacattacagcaacgcctgagagcctccttaacgctgtcagacatacagagcaagccatcacagcccttgagcatcttcaaacctctgtagctcgtttggtggagcgtgacggcagcaccataacagcagaggaagcctggcgttcagcaaatgcccttgaagagcttgcttgctccctgcaatacatcaccgccgaacttgcggagctggcaatagacattgccgagaaatacgcagtaagtgagtttgaataa

SEQ ID NO: 99808 - DNA, 225 bp, Enterobacter aerogenes
atgttcttattaaataatcgcgaccgaatcctaaaatacaaagatgaagtgattttgtgtaaccctgaaatgatagctaaagtggctgaaatggcaggatgcactgtagaagaaatagaaaaggctgtagaccagtatttcccttctgaaaacaccactccaaataaattaagtattcaggaacggatcgccaataaagtaaaaaaggaatcaaccaaacaatga

SEQ ID NO: 99809 - DNA, 363 bp, Enterobacter aerogenes
atgattatcaccctatcagacgtttttccggttcgtaaaagctacacagacattgtgagtgctgcgaccgataattttgcagcagtagacagtaaagtgttcgcttctcttcctgctgatgtgcagtgcggcgatgttatagacgcttccggcgctctctatacatctgggaatgtggcttatgtcgtcgtgtcagacttcgttacagcaggtagtaataagccagtcaacgtcctacgcgctcccaacgttggatcatacgttgccctcaagagcgacaatctcaacgcagctaaccacgcagcagcgatcagcgcattacaggcgcaaggcttcgccactcgtgaatttttcacctcttaa

SEQ ID NO: 99810 - DNA, 1032 bp, Enterobacter aerogenes
atgattatcggaaatgaagttgtggatcttagtccactgttcgggctaacaagtacccgcaattttttactgtcgtcactaaacatttttgatggcgacggagttacatctcataaggtgagtgtgtcccgtctgctggaagataacaccagcctttataaccagccgactgcaaggttctccaacgaacataacgtaacatcccgtcaaagcggtaaagaatggcttattgagcttcctttctttatgagggaagatctcattgtcccagcagacattcagggcaaacgtaagccaggaagcgacattcaagaaaccgtgacggacatttacagcgattacatgagtaaacacgctgtagcgtttatgcgcactcgtgaaagctatcttgctcgtagcctgttctctggtcaggtgtatacgcctaagacagacgatctgttaatcgactttggcgatctgttcggcgtagccccgatgaatgccactcttgatctgtcagctacagatagcagcactctacgtgccattgacgacatggtgagtcaaatcaccgaagcggcacaaagccaggcgtcggcagtggagcgaattattgtttttgctaaaggctcattctatagcgatctgcgtttcagccctgcaatggaagcggctttccgctatgtcagcccactggacgaagggaacgtagtattccagcgtcgtgacctcctgccaggcgtgagcacttttagcattccaggcacaaattgcgatgttgtgaaagtaactgatccgctgctattagcacaaatgggtgatgctgatgctatcgctatcccgcaattcgctaagggaagcggtatttaccagaacatctacggcgcagcttcttcaacatttgaacttcttaatgcagcacctgcggaagtttatagctggagcttcgaaagcgagcgcggtaacgcaatcaatgtgatttccgagaactcagcactgccagttaaccacggcctgaacttctccgttcacattaaagcctcagaataa

SEQ ID NO: 99811 - DNA, 198 bp, Enterobacter aerogenes
atgcaggtagtactaaagagtgctggcattcatttacaggtgaatgcagatacagcagaagagttattaaatctggcgggagtttgtcgtgtgcttgaaatagatcacggtcatctgcgtcagttattacaccgtgggcgtagtgtatcagaggcactcaactacctggtgagtaagaaaggtggtggtaatgcttga

SEQ ID NO: 99812 - DNA, 1872 bp, Enterobacter aerogenes
atgcttgaaatccacacaagttctatcaagaacaccgtgacattcagcgttgatcgtaattcaatgaaggaagctatggacgctttcgatcaaattcagaagaaagcgaaagggataaaagatcccacaataaacatgaagagatttagccaggggctaaaatctgctgaaagagaattagataagctgaataagaaagcctctaagcctcgtagcaacgatgaacgagaaaaggcaagggcagctaaggcgcaagcccgtgtagaggctcaggcagcgaaagaggccgcaagaaacgcacagcgccgtgaacgggctgaattgaagctcttggacactgccagcagctttaagagtatgcagcaccttaccaacgtcgaattaacccaggcggcactggcagcgtcacggatcactaaggcttatgcagcaggtacaatttcgctccaacgtcagaccagcgagcttaagcgcttacagcagagctacagacgcattaacgcagagcgtagggcagcggcaaaggcgggaggagctaacgctcttgctggcggtggtaaagctacaggggcgatctctggctctctgatgggattaggcactggtgcgcttgctggcgctggtatcggtgcggcggcttacggtgcttattcatggggaaaagatgctgtaacagcccaggaagagcgtagcgagattgtcgcccgtgcgaagttgggcggggtggattacaacgttttacaggcactttcgcagtatgccacggctaacgggattgattccggtatggggctgcaagggcaacggaagttgctggactctgggaaggacatctccgaaaagctggcagatagctacaccaatagcacctttgataagaagtctggacaatggaaaggcggctcggctccagtggatgcagccctgaacatgggattcacaaaaaaagacctgaaaggctttcaatcaaaccctttcgccttcgtttctgcttacaccaacaccatgcaggggaaaggctattcacaagagcaaatccttcataatcttgaggatttagccgatgacctcggactctatcacaaggcattttctaatcaaggcaaggcgatcactgatcaggtggacgtgctcaagcgtaacgggcaatggctggacgaagcccagcaagatcagcttgtggcctatcgcaagtttaatcaggaaatggacattctcaacgatagccagaagttggcattcttcgaaggtttcatggagtctctcgaccctgcgacggttaaagagtttaaggaagctatgcaggaggcgttacccttcttcaaaggcttaggcaaggcggcgggtgatgttgtagatggcttaatgaagatgaccaactggatcactaagaagctgaatttcttgaacggtgacaacaccactaaagaggctgttagccagcactacggcactacgtcagcacctgcacaacctggtgataatgctacagcgaatagctatggggcaagccagccgcgccaggacggcacacaccaacataatgtgtttgatacggtgcgcgagtggtggaatggcacaggcgatgctaaagacgtgagcagttacgcacagggcgctaacggtgattattctcctgtctcgatgttgaaacaatccgcagcggctacagcaacaccgccagctcataatacagtggtgcagccagtggtattacaaaataacttaccggaaggaatgatctctctcactatttcccctgatccgacattcggaaacatgctaaatgcgagcgtagatcagcgtattaatcagaacaatcagcgcatggtgcttgctgtttcctctggacaatcatcaacgggcgggtaa

SEQ ID NO: 99813 - DNA, 675 bp, Enterobacter aerogenes
atggcaacaccaggaagtttaactattgtcaattcctcgcaagggattaattcaacctcaaatagtaataacagcagcgctacccgtaataaaggtgaaaacggattcactatccttgcatctgtttataatccggcttctgatagctacattcaaaactatcaggctattgtgtttgatgccgtgacagatacgggaatacgcagacaggctgatattaccagctatcccgttgagagtggggcagaggtgagcgatcacgttcagataaagaataatacattcaagctgtctgggattattaccgaaactccggtaaggctggagaaagatttattatacagtgctggcgttaatggcactcgtatttctcaagctatccagtatcttgataaaatctttgatagtcgtcagcctattacattagtgacagagcacaaagtgtatgaggatgtaattctatctggaatcagttacgattatagatctgaatttgctatgcaattcgatcttgaatttgaacagatcaggcttgttagcactgctacagttaatgtaattgcgactaaaacgcagggtaataaatctattggtggtacggtgaaacagaaggtagtgaataatgcacctaagaaaatcgaaggtgatactgttactacggagtttaaaaaataa

SEQ ID NO: 99814 - DNA, 1251 bp, Enterobacter aerogenes
atgaaatacaagccggatcaatacatcatttccgatagttacggaatttattacgtcaggatctcaattcctgtatggcttcgtaatgcatttggtggaagaaaaactctcgtccgtagtctgaacacttccgatcttcgtgtggctcgtaggaagcgtgatgttatagccgacgaatttcaccacatcaggcaaattgcagagccgccaaaaccggacagcttgcaggacacgatcagctttttaaagagcgtggctaagtacgcgaaagctgccccgaaagcatcagcgccgattatctaccactgcccctctctgaataagatgttggagatttacctcacgcataatgctgatcgtctgaaaatgggaacattaagcaagaccagaaaagccgttgaactgttcctgaattacctgcgaaagaaggatgttgaactaaatgatatcaaccgtaccaccgttacaggctggcttgatcatctccgagagacaaaggcagtccagacagtggctaactacctatcagcaatggcaaacattctcgatcttgcctcttcccgataccaggacgccccaccgctggaaagtaacgtgttcagggggcataaactcaacacagcgcagagccgccagagttacgaggcattcacggacgtagaaattacgaagctcattagtgcgtttaacgagttaggagaggacgaactaagggatgtgaccgctatcgccgcttatagcgggatgcgcattaatgaaatagccagtttgaaatctgaaaatatccgtgaagtcgagggggtgttatgtttcgaggtgacggagggtaagacacgcaatgcggcgcggttggttccacttcatagtgcgattaaaacaatggtgctggaacgctgccagaagccgcacaacggctttttattctaccgtgcaagtgtgaccaagagagaggacggcaagcgctcatcgtggcacgtaaaccgctttggacggcttaaacgcgatattctccctgggcaggaaaacaaggtgtttcactcgatcaggcatctggttgctcaaacgatggacaggggcggggttggatttgcagaacttaagcccgtaccagaagaccggatcgcccttctcctgggtcattcgagaggggaaacggagagtttcaagacatactctaaaaatgccgcctctcctgttgaactacggcaatacatcgaattgctacgttatccagagatagagaatctataa

SEQ ID NO: 99815 - DNA, 1017 bp, Enterobacter aerogenes
atgaatttccgcttatcggcatattgcgcggcgatgctcgctgcttcggctctgtttaccgctccgcaggttatggctgctgacaatggcgacggcattgtggtgtataacgcccagcatgaaaacctggtgaaatcctgggttgacggctttaccaaagaaaccggtattaaagtcacgctgcgcaacggcgacgatagcgaattgggtaatcaactggtgcaggagggggcagcctcgccggcggatgtcttcctgaccgaaaactcaccttcaatggtgttggttgataatgccaaactgtttgcgccgctggatgccgtgacgctgaatcaggtcgcgccgcagtatcgtcctgagcacggccgctggattggcattgctgcccgcagcaccgttttcgtctataacccggcgaaaatcagcgaatctcagctgccgcattcgctgatggacctggcgaaacctgagtggaaagggcgctgggccgcctctccatcgggcgcagacttccaggccatcgttagcgccatgctggcgttgaagggcgaaaaagcgacgctcgactggctgaaggcgatgaaaacgaacttcgtagcctacaaaggcaacagcacggtaatgaaagcggtcaacgccggtcaaatcgacggcggggtgatctaccactattaccgctttgtcgaccaggcgaaaaccggcgagaacagcaaaaacaccaggctgtattactttaaaaaccaggacccgggcgctttcgtgagtatctccggcggcggcgtactggtgtccagcaaacataaagagcaggcgcaggcgtttatcaaatggatcaccggcaagcagggtcaggatgagctgcgtaccaataatgctttcgaatatgcggtgggcgtgaatgccgcctctaacccgaaactgacgccgctgaaagagctggacgcgccgaaggtagagccgtcaacgctgaatagcaaaaaagtgatcgacctgatgacccaggctggcctgctgtaa

SEQ ID NO: 99816 - DNA, 684 bp, Enterobacter aerogenes
gtgatcccgaaggccatcttccttaccgcgatgtacggcggcattatttttatcgtcgcctcgttctttatgcagctgttcttcccggatatccatcgctttaaagatccggatgccgcgctgccggaaattgcgctgtatgtcggcggcaagctgttccagtcgattttcctgtgcaccacttttgttaataccctggcatcgggcctggcgtcacacgccagcgtgtcgcgcttgctgtacgtgatgggccgggataacgtcttcccggaacgcattttcggctatgtgcatccgaaatggcgtaccccggcgctgaacgtgattatggtgggcatcgtcgcgctgtcggcgctgttcttcgacctggtgaccgcgacggcgcttatcaacttcggcgcgctggtggcctttaccttcgttaatctctcggtatacaaccacttctggcggcgcaaggggtataacaaaacctggaaagatcgcttccactatctgctgttgccaatggtcggcgccctgaccgtgggggtgctgtggttgaacctcgaggcgacctcgctgacgctggggctggtgtgggccgcgctgggattgctttatctgacctacctgacccgccgtttccgtaaaccgccgccgcagtttgacgcgacgaaagcggagcaggcctgggagtcgtaa

SEQ ID NO: 99817 - DNA, 513 bp, Enterobacter aerogenes
atgaaaggattattcaccgctctggcggccatgcttatggccgttggatgtcaggcgcaacagccgccgacgcaggttatttatcgtttcgatgaccaccgctatctggagctgaaggggtggggctgtgaaggtgaactctggtacacggatacactgagggggattcacaccgaaccagttagccaattttacagaatatatactaaaaaatttattcatccttctgagcgctatattgctattcctaactgggaaatagatgggtttattgtctcgaaagataacggtcaaacctggagccctgtcggatattcgccgggttataacgagccggatgggatgaattctccccctcgagatgatgttctctctttcaccgtcgtcaacgaccaggttttttgcagaccaggcatcgcctgtatatgtcgtccaaaccgttcgacgatccgcgtctggcggctggtggccctggtatccaatatgtcattgaaggggaaactcacactataa

SEQ ID NO: 99818 - DNA, 447 bp, Enterobacter aerogenes
  misc_feature (430)..(439): n is a, c, g, or t
atgaaaagcactgcatggtatttattcataatagctatattttcatattcagcccctggacaggcgacgagtgatagccagcaagccctggagattattcgcaaagctgatgatgttcgctcaccaaatgaacctttccgctataacgtgactgtacttgagtataaagaaggtagaacagagcctgaaaataagcaatcgctggatatatcgatgcgatttattaagccggtaaacggtttgaaagctgatgctcgttcacttatacgttttacctatcctccgcgagataaaggcaagatcatgttatctgattggtataatttatggttttatacaccggaactacgcaggcctattcctatttcgcgctcacaacgattaattggtcagatctccaatggggatgttatcgttacgaacttcgagnnnnnnnnnngcctatga

SEQ ID NO: 99819 - DNA, 396 bp, Enterobacter aerogenes
  misc_feature (30)..(39): n is a, c, g, or t
atggggatgttatcgttacgaacttcgagnnnnnnnnnngcctatgattccactctggaaggggaggaaccctgcggtgataaaatttgctatcgactgtctctcactcgtaactccgaggccgttacttatcctaaagtgatttatctggtggagaaagatgcagaataccggccattcaaagcatcttattacactcttgataataaacttatcaaaagtgtcttatataaaaactatcagatggtactagggaaatatcgtccaacagagatcattgtgcagaatgcgcgctatgaaaaggggtattctgtcatgaagtatagtgatgtccgcctggagtcgttacctgaatttcacttcactaaagagtttattcagagaggcatgaagtga

SEQ ID NO: 99820 - DNA, 1506 bp, Enterobacter aerogenes
ttgattgtactccttctttgggctacaaatggtggtgatactttgaaaacaactctcaaccaggcttttattatcaacaagttaagtattaatgttaagcctgaactcagtagctctggaaaagtcgttttcgaagccaaccctgaccaaaagccttacatagtttttgacgatcatcgagattcacctgttggcttcggtgtgaaggtcagtttgacgaaaaaaacctatgtaatccagcgaagagtagcctcgtcagatcgtaatgtcagcgagggtaagaagccaagctctgtcttgaaagtaaaggttggaaatgtgtctgattttccgagtatcgatcaagcccgtgaggtagctcgacagttggttcagaccatgatcgcaacaaagagaaatcccaacaagattaagagggaactcgatcttgctgaattgaccgtgagtgaagcttttgcccaatacaggagccacttacttggcagaaccaaacccgctaaaccaaacactctcaatgtgttagacaaagctgagaatcggttgaaagaatggcaaaaccttcggataaaagatcttacgggtactgaaatccttagtaagtttgatgaaattgcttcaagagcaagaacggctgctgaacaaactttccgatgggctaatgttgcagttaaacatgcgattgaaattgaagctggcaatgcccagacacaacaacgacaaccttcgctgtcctataatcctttttcaattttaaaggtacagaagaagttcagaacgcgatctgaactggaggatagctatcgtgccaagggagttcgaaacccattgtctcccaaagataccctgggacgttttctaactgcattacacaataagcgaggttttaatcggttgggttgtgattatctgttgctaaccgttctgattggagcccggaaagaagaaaccgctgcactgtgctggcgagagactctgacagaagaggaagccagaacgacaagctacgtcgatcttgaaaaccgaatgattcgattctacgacaccaaaaaccgtaatgaccatgagttgccaatctgcgatgctacaaagcgaattctggaagatcgaagagatatcgtcaacgataacgaaaagcgagcagataaacgcaaatgggtttttccggctcgttcatcacgaagtaaggttggacactattccgacagtaaaagcctacgtgagtatatctgtcaggaagcaggcataacgaagttgggtatgcatgatctgcgcagaacctttggccgtgttgcagaagagctaacttcatatgcagttgtgaaaaagttgcttaaccaccgcaataccaccgatcctacggaaaggtatgctgtgccagataatcagcgagtttttgaggcacttcaaaggattgagttgcatatgctaatgactgcacctaaattgtataatgcacttttagcatctgcgaagtatccgccattaccagaaaggaaagagggatga

SEQ ID NO: 99821 - DNA, 591 bp, Enterobacter aerogenes
atgagtgttgttgagacgttaagagagttttcagaagtatggaagctttttagtgagattcctgatgacgcgacacttaatgttgagttggcatctctgtatcttggtattagtgtaaaatcacttgctcgatataggcaaaatggcggtggaccagcatatatccagtaccaagtagaaaatagcaaagcgagaaaccagcgagtaaattacttgctaaaagatcttcgagcgtggcgtgataatcataaggtccaaaatactatgcacgcagctcaaatccgtggattaacatttacgtcattaaccgatttatgtgagccacatccattttggctgtctaatttttcaggacaaaaaataatatctcatgctttgacaacctctgatgatctttttagaaagttattgtcagagcctaatgttgatatagtctggatttctgttgagcaggctattttcaaagagtgggaaaataaaaatgaacgaattatttggcacaatattttcataacaattctaaataatttgagctatgcttcagaagcagcgcaagaaagatatacaatgaatgatgtcttggggaattaa

SEQ ID NO: 99822 - DNA, 858 bp, Enterobacter aerogenes; identical to SEQ ID NO: 6882

SEQ ID NO: 99823 - DNA, 618 bp, Enterobacter aerogenes
ttgtcgaatgtctcagggcgtgaagcggtctttgcttcattgacccatccggggctggtgattagcctgtttttcaccaccctggttatccagttgtgtaacggctctatcgggccgattctggcgttatttatcaagtcgatggcgccggatagtaacaacatcgcgtttcttgcggggatgattgccgccgtaccggggatttcggcgttgatttccgcgcctcggctggggaaactcggcgatcgcatcgggacgtcgcgtattctgctggcgacgttatgttgcgcggtggtgatgttctttgcgatgtcgttcgtgacttcgccgctgcagctcggggtattgcgcttcctgctgggctttgccgacggcgcgatgttaccggcggtccagacgctgctcttgaaatactgcagcgataacgtcaccgggcgtattttcggttataaccagtcatttatgtatctgggtaatgtcgccgggccgctcattggcgcttcggtctcggcaatggcgggtttccgctgggtgtttattgccactgcgttgattgtcctgattaatatctggcaactggcgattatgttacgccgaagccgccgcgcggccgtttaa

SEQ ID NO: 99824 - DNA, 189 bp, Enterobacter aerogenes
atggattttaatgatttgagagtagagaaaaccacgggttcgccggtgtctctggcctacgtcaatgccgcagggcagcgtattgcgcagagtgatattcagagagtaaaagtccagcattgccccctgctagctcccccggctgtcagccaggaacaggtcccgtttaccgggacctatttcgtttag

SEQ ID NO: 99825 - DNA, 708 bp, Enterobacter aerogenes
atgaaactttttaacagtaaaaaaacccctcagcctgatagccctaatccgtatctcaatgcacgtcgttcatggaatatccacatgggccatgtgcagcagttcggggcgctgggtattttcattggtgtagcgggtctgcttatcggtctggccgctgtgggggggattacttacatcgggagtcagtcgaaaactgtcccgatggtttatgaacaggacaaggcaggtaactacgtcagcctgacacgggcagaccgtttgccgccagcgaagatcgacgactaccgcaccgctgtatggaactttatcgatcacatcagaacggttacgccagatggtgaactacagcgtaagtcagtattgcgcacctacgcgtttttgttcccggatgatcccgccacaacaaaagcgaatgaatacctgaatggttcgaaagaacgtaatcctttcacccgtgcaaaaacggaaatggtcagcactgagctgatttccgttctgcagcaaacgccagatacctggcaggttgactggattgagacaacacgtaaccgcgacggtacgttaaaaaatccaccggtccgaatgcgagcactggtcaacgtttatcagaacactaatctgaacgcaaaaattaacgaaaacaatgatgtgatgaacccacatcgtattttcattaaagatttcaactggtcaaaacaactgtaa

SEQ ID NO: 99826 - DNA, 2544 bp, Enterobacter aerogenes
atgaataccgcaattcctgtcttagttgcgctgatagggctgatcttgcttggcatgatgctggcttactatcagcgtatggtgaaggaatatcaccttaaaaaacatcgctcgaaggatgaagccttagccgacatgctgaattacgccgctgttgttgatgatggcgtgattgtatgtaagaacggttcttttatggcgtcattcttttttaaaggtgcagacaacgcgagcgcgaccgaccaggaaagagagcttgtctcatttcgcattaataaagcgattggcagactcggcaacggctggatgatgcacgttgatgcaatgcgtaacccggctccgtcatacagtgaccgaaacgcttcacactttcctgatcgtgtttccgctgccgtggatgaagaacgccgccgtctgtttgaaaagctggggcaactgtatgaagggtgctttatcgttaccttcacctggttcccgccagcgctggcagaaagcaaatttacggaactgatgtttgatgacgaccgcgaagcctccactaataaagacgctacgctgaatctcattgaaaaatttaagcatgaaatcagcatcgtccaggcgaacctttcacaggcggtttcgattgagcgactgaacggcgtgaaagtcgaactggaagacggctccgttgcaacgatggatcagcagctggaatacctgcagtattgcattacgggtctgcaacatcctatacgtctgccaaacaaccctatttatctggatagcctcattggtggtcaggagtttattcctggcatcacgccacgtatcgggaagaacttcattcaggttgtggcgattgaaggctacccctctgaatcttatccgggcattctcactaagctggccgaacagccatgtgaatatcgctggtccacgcgctttattttcctcgattctcacgaagccatttcaaagctgacggcattccgcaggaagtggaaacagaaagtacgcggttttatgtctcagctgttcaataccaataacggctacgttgatgaagacgcattgtctatggtcaacgatgcatcttctgctattgcagagactaactccggtttggtcagtcagggttatatcaccagtgtcattgtcctgatgaatgaggaccgccagaaggtcgaagatgccgctgagtttatgcgcaaggctgttaacaataccggcttcgccgcgcgaattgaaaccgtgaatacggtggatgcctactttggttccttaccgggccatggtgttgaaaacgtgcggcgaccgttggtaaatacccttaaccttgccgatctgatgccaaccagtacaatctggccgggcgaaaataaagccccaagcccgatgttcgaagtaggcgcaccgccattgacacactgtgtcacgtcagggaatacgccattcagacttaatctgcatgttcgtgacctcggacacgctttcatgttcgggccaacccgtgccggtaaatctacccacctggcgttaaccgctatgcagtggcgtcgttacgctaactcgcgcattttcactttcgataaaggtctgtcgatgtttgctacctgcaaggccgtaggcgggaagcatttcacaattgccggtgatgataaccagctggcgtttgcacctttatcacgactggatactcctacacgccgtacatgggcgatggaatggattgaagccattctgatcctgaacggggtcaaagttgatgctcctatgcggaatgctattgctgacgccattaagagtatgtctgaatctcatgacaaaaccctgtctgaattcacggtcacggtacagaacaataccgttcgtgaggcgctccaacaatacactattgatggcaacatgggtcatctgctcgatgcagcagaggatggccttgatatttctgacttcatgacgtttgagattgaacacctcatgaacatggatcagaaatacgcgctgccggtgctgctctatctcttccgtcgcattgaagaatctctggatggtagtcctacactcatcatcctcgatgaggcctggctcatgctgggtcatccagagttcaggggcaaaatccgcgactggcttaaatccatggctaagaaaaactgctctgttcttatggcaactcagcagcttagtgatgcggccaactctggcattctggatgtcattattgagtcaaccgcctgccgaatcttcctgccaaacagcaacgccctgcaggaagaagctatgcctctgtatatcaatatggggcttaatcgccgtcagattgaaatcatctcgtctgccgtaccaaaacgcgattactactacgtatccgaagaaggccgccgcctgtatcagctcgcgctggggccacttgcgctggcatttgcgggagctactgatcccgattcaatcgctgcagttaaacaactgtccgaaacatacggtgatggctgggttgatgaatggctacgcactaagggtctggacttaaatgattatgagtatgaggtcgctgcatga

SEQ ID NO: 99827 - DNA, 327 bp, Enterobacter aerogenes
atggcattacgcacgatccccattcgtagggcggcttcaagaacgaacctcttcatgggcggggaccgtgaattggttatgttttcaatcctgctggcagcggtccttatctttacatcacaagactggatcgctgccggtgtaggcatcgtgatttgggcgggagcacttttcctgttaaggaaaatggctaaatcagatccgatgttacgccaagtttatttgcgtagcctcaaatacagccagccgtattatgcgccccgcgctacgccgttccgcaaaaatacaggaacccaaggcaaacgttatgaaagggtgaaaaaatga

SEQ ID NO: 99828 - DNA, 384 bp, Enterobacter aerogenes
atgaaaacaggtctttcccacttcaatctcagcaaacacgcctttattgcatttttgggcgcgatgctgtttttcatggcagctgaacctgctctggcgtcaaacacatctggcggtggcctgccgttcgatgactggatgaccaacatccgtacttctgttacaggaccatttgcatataccgcttccattatcggcctggtaggtgcaggcgcgatgttgatcttcggcggtgatatgaacgggttccttcgtaccctgattttcatcgttcttgttcttagcttcctggttgcggctcaaaacacgttgtctgcaatcacagggcagggtgcagaactggcagcaatgctgaccagctctaaaacagggggagtggcataa

SEQ ID NO: 99829 - DNA, 957 bp, Enterobacter aerogenes
atggacgctgtagattccgttgatttaagagcgatagaaaagctcaaaagggacatggggccaagtctgatggaagcgttggaagatcctgaaacgctggaaatcatgctgaacccggatggcaagctgtggcgtgagaaattcggtcagcctatgttctgcatgggaacagtgcctgtacaacgttcaaaaaccattcttcaaactatcgcgggctttcacaaaaagattatcgatcacaaatcgccatttcttgaatgtgaactccctattgatggttcccgttttgcgggtcagctgccgccactggttgcaggtccaacctttgctattcgtaagaaagcctcacgcattttccttctggatgaatatgtagataaaggcgtaatgaccagggcgcaggctgattttatttgtcgcgcaattgccgcgcataaaaatattctggttattggtggtactggttcagggaaaacaactctgttaaacgccatcattgctgaaatagttcgtcagtttccagacgagcgtatctgcattatcgaagatacgggcgaactgcagtgcgccgcgcaaaattttgttcagtatcacaccaccgttgacgtcaccatgacagacattcttcgtctgatcctgcgtatgcgacctgaccgtattttcgtaggtgaaacacgcggcccggaagccctcgatatgcttgacgcctggaacaccgggcatgagggtggcgcggcctcacttcacgccaacaacacgctttctgctctcacgcgtctgcgttcactgatctcacgtaacccgtttgctccgcgagaaattgagccggtaattggcgaagcggtcaacgtgatcgtccagatttctaaaactactgagggtcgccggattaaagaaatccgcgagattcagggttatgaaaacggggaatatatttcccagctcattgcagcttaa

SEQ ID NO: 99830 - DNA, 405 bp, Enterobacter aerogenes
gtgtacaacctaattttttttactaacatcctcagactgcttgaagaaagaggcatgacaaagcaggagctatcccaaaaagctggggtttcaatctcttttttgtcggacctaacaaatggaaaagcgaacccatctttaagggtgatggaatccattgctaatgccctcgatgtagcccttcccgttctccttgaaacaactgatcttgatgaacacagccttatgctgatggctgatggtaaacctgttaagagccttccccctggctatgtaagagtgtccgtcatactttccgaacagcaagcctttcgggtacgtatgtggagtgatcaggcgcgccagaagttagggcaggaagcaaaggcaatgctggaaaaaatgcaggaaaagaaagacagttaa

SEQ ID NO: 99831 - DNA, 372 bp, Enterobacter aerogenes
atgaaaaatcttaatcgttttcagtttatcggaaatctaacaaaagacacagagctacggtatacagcaaaaagcacaccgatcgcaattttcgatatagcggttaacggaagctataaggaacaggaaagcggtgaagtcaaggaatataccgactttttccgtatcaaggtatggggtaaggctgcagaaaacgctgcaaagttcctggggaaaggttcgcaggtctttgtagaaggttctatgcgtaacactcagtatgaatcgaacggccaaaaagtgtatggcatcgattacattgctgaaaatatccagtatttaaatacaaaatccccggcaagcagtcccgcagctgctggtaatgaaaactga

SEQ ID NO: 99832 - DNA, 894 bp, Enterobacter aerogenes
atgaagcgcaccgccaaaagcgccatcgattctgttaaagaagcgctgatgaaaactcatcgcgatgatcttatacacaaatcagatgaagaattacgccaggcacagctttcgctctttgatctcgcaccttgggatgatgacatgcgggctatgccgaatgattacgcgcggtctgctctgttcactgtaaggaataagagaaaaaaacgtgaagcctgtgataacaaagctatttatcacgttaataaagacgtcagtatcaactacaccggtattgagttacgggcagaagatgatgagctggtatggcaacaaatacttgagtacgccaaaaactatcctttaggtgagaaaatttacttttcgttttaccagttgtgtaaagacttaggctgggctgttaatggtcgctattacaaaaaagctgaggaatgcctttccaggctgcaggcgacatcgatggctgttacatccgaacgattaggccgattgaaatcgctgtctttaatcaaagagtttgacgttgtggaacgtggcaccaagaaagccgtttgtgaagtagaactctcaccacaaatggtttatctgtttgcaggtgatcactatacaaaattcatctggataaaataccggaagctgtccccgataacccgccgcttattcgattatatggcttcacataaagagccgtttccgctcaaactcgaaaccttcaaaatgatgtgcggctccgatacagaacagggctggaaatggaaacaacaggccaaagatgcgtgtgcagaactggctgagagtggtcttgtcagttcctcctgggttcagggcgatgcaattttttgtgtaagggctgctgatgcgaagccaggtgaagctgatgcaaaggcttag

SEQ ID NO: 99833 - DNA, 300 bp, Enterobacter aerogenes
atgattggtagctttaaggacggccagaacggtgagcttgcaacgttctacgtgcatgggacacggagcgcacagataccggccatcattgaaaagccgcttcgccgtaagctgtctcttctggccgctgccagcagcgaaaagtcattgttctcgccgcccggtaacaattatgaacgcttgcagggtaatctcgctggatggtcaagcattagggtgagcattcagtggcgtctaatctttcgttggtgcgatggccatgcttacgacatttatctcgatccacataagtaccgctag

SEQ ID NO: 99834 - DNA, 309 bp, Enterobacter aerogenes
atggatacgatcaccgcagaaccaaccactgtaggcgaaatgctgtcagaagagtttttaaagccgctgaacatcacccaggcagagctggcattggtaatgggtgtgtcccgcaaagttatcggtcagataatcaataacagccgccgtatcagcgtagcagaagcctcacagctggccgtattgttccagactgatgaagatttctggattaacctgcaggccgctcatgaccgttgggagagccgaaatattatagcgaataaccatttccgccctattcaggatctgctcgcggaggcaggttga

SEQ ID NO: 99835 - DNA, 249 bp, Enterobacter aerogenes
atgatcaattacgtagaaatagcccggagctggcgattacagaacccggaacatgctgatagcggcattgtgcttatctggaatgatgcggtttacggctggaaaaactgcctgcgtgatcctcaacatgaaagacctggagcaatcgctgttgattccagtgagcatatttttattaccgaaggcggtaacgagtatgatggtgcgaagtgttgggtagttttggaaaataagaaggaacttatatga

SEQ ID NO: 99836 - DNA, 579 bp, Enterobacter aerogenes
atgaatgataatgcgcattttgaaacggtattttctacattcccgctattttattttgcaatggttgttgctggtttgtcgtatataacttttgcggtaatgatgaatttaatcaagcgtagtcagtttttaaagaaagttttagatggtaagtatgatctacctgaaaatggtgataatgaagaagaggtctggaagaaggaaccatttttaagttttataaaatgggacagaaaacgctgcattatccagtcaatagtatctgccgttttctttgttttgatcattgcatcatttatttactatctgcttgaggtgggaaccaaaaaggatttatatctgtttgtttttactttttcattacttgcaagttgtcacaatttaataaagtctattcaggcaatgattgacgccaagaaaatgaataaagatctcaaagagaatataagtgctgatttgtttaattcacactttacaaaaatgattaaagcagaaggtatttatttatactgctctctattatttgatattgcatgtatcattgtctttggctggatgctttattcagaatttgtctga

SEQ ID NO: 99837 - DNA, 198 bp, Enterobacter aerogenes
atgaaagatgtacttaagaacctccctccccttgtcgatactgtgaccgttaaagttgctaacgtaaccaagtatgacgatcaccaggtagaaattcgcgaagcagataccaatcttcttatctggcgagcatgggattttgaaccggattttgaatataatttcaagcagcagctgcagcgtttcttaaaacgttaa

SEQ ID NO: 99838 - DNA, 507 bp, Enterobacter aerogenes
atggaaaaatctacatttgaagcaattgcaagaaatctggataatcgcctttacagtggcggtttacattttcttattggtataactggcacaggtaaaagttctatttgtgaaattatacaaaaaaacaacaaatctgatgctgtttattttgatgttcaagcggaccattcaattgaaaattatgctaatttggtagaaaaaatcaacctaactaacaaacatattgtgatagatggtttggtaatttttaaagaaccgggtaacaaggttttagatgccttagtaaaacatgttcatattaaaaagatgggggctttaatactgacccaatcttttgatgatttatcatatgaacatattaatgcttcatcatctgtatctttgatctcgaatttgtatcctcgcgaaattagtaatgtgtatctacattccgttgatataaaaaacgatataaatgaaaaatacagaagtctaacagagttttggattaagtattcccgttga

SEQ ID NO: 99839 - DNA, 468 bp, Enterobacter aerogenes
atgaataatgaagttatcgttactgctcgtaagcttacagattatgaggaacgcctgatgtttatgccgaaatttttcggtcaatactggcattttgtggaaaaccacacttataactggatgcgtaaattaagccctgaaaataaaagccaatatttgagtagtgcgctggataaaattgaagcccattacgatggtggtgagtgggatttttatgagctttcgaatggtggttattttatggcaccaaacagccgtgaacattaccgtatttctgtccagggtaattactttgacggtttgttaaccgcagaagctgcaggtatggtggcaaccagttttgtgctggcccagcttgctaattctaatctgccattttcagaaagatgcagtgcttattatcatcagctgtttgattacgccagcgggcatcaagaatatgcgcagttccgtgcggccatcgattaa

SEQ ID NO: 99840 - DNA, 1119 bp, Enterobacter aerogenes
atgtccaaacattatcctggcgatgactctcgcgatcagcaaatggaagccattgcgcagcagctgccggacgaccatcgcattctggacgcggcgtactcagcgctaattgatttgaataaagcctgtatgaccggtgatcctcaacagcgtcatgatgctgtctaccggtttgaagcctgtatctggaaaatgaacggtaaaaccttctttgggtgtaatgccggtgaacatgaagcggctcatgttatcagtgaatattgccgtgctgatgacggtagcgttcctatgtggggccagcacggtgattttatcatcgaaagtttcagtggtatgcgagcaagggttaaggtcgaagccggatgtatgatgggttatctttccacctcgtttcatgccgttgatttaggcgcaccctttgtatccgaaacagggtatcgttcgcatttcgttcagctttcagatgtcagacctggcgaaaccgttgatgcacacgtatcccgcgtatttcaaagcctgattgacgccagaaagaaaccagcttttatcgctgctgattctcgtgacaggctggcatctgagcctttacctgattggttaaaatccctttcgccaccccccgacagaacgcctctaacgctccctgacggctttgttagggttgaggcgttattacccgcctctaaagcatttatcgcccgtaaatgggctgtagcagctcaggaacgcattacagctattatccagcgagagcgggaggctgaaagagaggctatgcgggccgaaagcgaacggcgcaagcagctggcaaaggaacgtcccaaagaatacaaagatcggatgattacggttcagcgctataaggaattttacgttggtgctcgatgtgaaatcgtgagtgtgcatcatccggtgtttgctaaaaatattggcactattgtaaaaatcgttacgatatacgattcaggatgcgtggaggcgcatgaagataagccgatacgttatcgagtcaaccgtcgcggaactcaggttgtggattttgaccctacctgcgttcgtactttttacaatgttgatcaacttaaattactggaagacaacaaaacaggtgaatcgtga

SEQ ID NO: 99841 - DNA, 261 bp, Enterobacter aerogenes
atgcaaactaaaccctaccctgtctcaatcaggtcagaatgttttttaccctttggtgcgggatgggtttgtccgacgccagaagaaattcgtactttgatgcagatggcagagctaacaggaagcaaagcggccacactcaccggcctgaaagatagtcgaaccgtcaggcgctggattgggggcgatacacccattcctttttcggcctgggccatcctggttgaatatgccggattgggtaaaatctggaaggtgtga

SEQ ID NO: 99842 - DNA, 324 bp, Enterobacter aerogenes
atgaccaatgtcgttaaatttcctcgtcacgaggacagtaaaccgcagcagggccagccggtcgagaatgctgccggtcaaacatcagggagcgccatgcggaatatcatgcatggtgtcattggtgtggtgtacatggtactggtcattctatggattcctgttcgcttcctgctgatcgcgaatgttgtcattcagtttttcaaaatgatgtttaaatggagtgatggcccgtttgctgcagcctggccgtttgtgatcagtttctttgtactggcagccctgacttacattatggctacttggaagcccaaagcgccgtaa

SEQ ID NO: 99843 - DNA, 378 bp, Enterobacter aerogenes
atgatttatgcaggtgttttgaagccgtttgtgggagctatcggcgtcggctttttgatttcgcttatcattgtaatttgtttaatgtggcgttaccgcaagtggggtaaggatcggtttcttactgagagtctggtgatgttggttgtatttattgctagtttaatcacagtgtttctgttaccaacttacaacgatgaagacgtgaaatatggcgagaagttatccagctgcaagatgattgaagaaaatgccttcaatggttcttttaatgaaaatgtcaataaaatcgattgcgatggcgtgatcacaaatattcctgtcagtacgtaccaaaaaatgatttacgcatatcaggaaaagaataaaggaggttag

SEQ ID NO: 99844 - DNA, 474 bp, Enterobacter aerogenes
atgataaagattttaactaccgcagaacacaatcaagcaagagctgatctcgccacattaaccgctatcgttgagaactacgcagttacccaccccaagaaacatggctggagtaccctgggcgcactttgtatgcctgctgttttcgttcttgctgttggataccccattatgacggatattgattcactgactggcgcagtattctcattgattggatgtgtcatgttgtatggcgctgtaggggctgcaggttatctccagggagaatggcataacgatgaacttgatatgtcagatcttcataaaattcgtgctttttcaccatttgtgaaacagctgatcactaacggcatggcaaagaataacggtctgctgacttataccctgcttgaaagcctgctctgtgaaatcgagttcgcgctgaaagaagatgacctgcgtttcaatataaataagcaacttaatgtgtag

SEQ ID NO: 99845 - DNA, 786 bp, Enterobacter aerogenes
atgacaggtgcaggaaaaatcgaggttccaaccaaggaacggctgaaagaggtcattttaccgaccttattcagcgatgcaaatgcgataagcagatatggcgcatcggaaatttcttctaatgctatggaccgctactcgtcgcttatggaaaagtcagctgtctccgcattatccggctcaataagccaaatagttaatgcgctggctgaggccgatccccggaccattgcaaggaaaccatcatggtttgcccgtttctcaggtacacatcttgaaaaaaaggttcgttatcaaaaagctcgcatgaatgttgaggctttaattggtgaagggaaaagtttcatggagcacgtatacgaaatgcttcatgcgctggaagatctcatggtgattcatcatcaggaaattgaaaggctcaaagtgttcattgacgccggaagggaatatttacgcgaaataccagaagaaccgaaagccgacgacctgaatattgtcttcgataagccgcgtgaacgatttgccaggaaaatcgcaaaccttgctacgttgcttgcttcgcatgaaatgagcgtcatgcaaatgaaaattacccgcgctcagtgcattgatattctggaccgtttcaacgaaaccgtgaatgttttggttcctgtctggcgacaacataccctgtcgctaatcacgacaacaaacatggacccggatatggtcagtaaagctacccaggcacaccaggcgcttatgaaaagtctgcataagagtttagaggggatcgataaatga

SEQ ID NO: 99846 - DNA, 1113 bp, Enterobacter aerogenes
atgaatactcaaactgccaccaatactgcaattacgccgtatgtcattaatgcaaccgaactggaaaagtttggtttacgccaggaagatgaatctgagattcaggccgttgcagagcgtattgatgccagcaacccggacacggtgtatcagtttggccgtgatgttgccgaaaatactgcagcttatgcagatagcctgttggaacagatcagaaataaagatctggatgacgctggctctaagctgacggaagtcgtcaacctggcccgcagcgtgaatgtttcaaacctgacggaaagccgttctaacctgccggtcatcggtccgattatcaataaaatccgcacacggggtaagaatttcgctgcacagtttgattctacccgcgagcagatagatgcgctggtatctgaggtgtctattacgcagcgtagcctggctgctaataacggtgcattgcagcagatgtttgaagaggtggtaaaagaacatcaccttcttggcgtccacattgccgcaggcaaggtccgtctttcgcagctgcagctgcaggctgagaagctaagagcgagtgtcggaaataaccctgcctctttccaggaagtagccgatctcgatacgctgatttctaatctggataagcgaatcggagatttgatcgtgtctcagcagtcggccatgcaggttctgccgatgattcgtatcatccaggcgaataatcagaaccttgttgataaatttcatagcgttaaagaaacaacggtcccgaactttaagagacaattcctgttggctatttccctgaatggtcagcgtaatgctgttaacctggcgaatgatattgataacgccaataacgaactccttcgcagtaacgcaaaactgctgcaccggaatgcggttgaaacgatgcgcgctaatcagcggcttgtaatcgacgtcagtacgcttaaagaggtacaggatacgctgatccagactgtcggtgacgttattaagattcaacgtgagggggcgacaaaactccgtgagactgaaaagcaggtgttaaccatgcgtgaaaatctcagggccagactgactcagaaagggatcactcaggaggtttaa

SEQ ID NO: 99847 - DNA, 891 bp, Enterobacter aerogenes
atggttaagactgacagtatcgggcaggaggtatctgcccttgataaacgtactcgcactatcagcagaagcggtattgttttacttatctcagggctggcaacactggtcgttgcgggagtaggctatgccatttcgcgtttgttaagtccgggtattaatgattttatgatagatgtaccggggctattgttaccttctgccggtcatggagaagcaagtgatgtgttctcatctgcaatgccattcacatcagcgttctcaggctacctttcatcgccactgttcaccgctatcccggtggtgattgttgttgtgtacgttgcttttaaggtgtttgacggggaaggtgtaacgtccgttcttcctctattgggaatccttcccgtcatcttcggagccaagatgatgttgagtactttaactgaaacgccagaagatgattcctcttcgccgacagaagtagtcaggcagcttatcaaggatgataagccagcagagcttgttacctatcttgaaaaaatcagcggccagactccagaaactgccaagttacttgattacgtcaaagcgcaggccagtatccgggagaacaaacccgatatcgatctggtcaggaaggttgtagccgactatcaacgtaatccagctgagcctgtccctgctgatgtcagatacgggcttgaaatgactgcttttaaggaaacaatcacgccaccggctacccgttatgcgcagggaaaactgaaaaaggcacgtttctttacctctgtttcatctgcaggattttcgattagtgggattcttgttctcctcggaggcatgttattcctgtggggggcgcagatgaaaaaacgagtagctttcatcaaagatgttgcactgaaataa

SEQ ID NO: 99848 - DNA, 354 bp, Enterobacter aerogenes
atgacgactgttaatagtaatgacccgcacgttgccaaaactggcgatgaaaaaagtgaaaaaaaacgcctgactaatgaggtatttgcaagagttacccgaagcctgaatgttggtaagcaaacgcttgatatcgcttacggcgtactggttgaagggagaccgcagaaatattttgttgaaacgctggatatttctcgcggggctgtttctcaggcagttaacagagtgtgggatgcctataaacaagaagtacctgacggctttgtgcgtattgaagtagtgttaccggagcggcaggctttcattgttaaaaagtgggctgacgaggcaaaacgtaaacaggaagaatag

SEQ ID NO: 99849 - DNA, 765 bp, Enterobacter aerogenes
atggctatgaaagtattggttacagcaaatcaaaaaggtggtgttggcaagacttccaccctggttcatctggcatttgatttttcagaacgaggcaagcgggttgctgtaatcgatatggatacccagggcaacgcctcttttaccctgaaacagttctcgtccggcattaaagcgaatgaaatgtggggcgagatcgagccaactcgctttacccaaattcctgagagcggaatttctctcattgagtcagatattcagctggcaaacgtagaaaaattaaatctgccggaaatggtgaagcagttccgccataacctgcagcagctggccgacagtggctttgacgtctgcctgattgatactgcgcctacggttaacaatgcgcttatcgttgcgctggcgagcgctgattttgtggtatgccctattgagcttgaggtgtactcaattcagggtattaaaaaaatgctgaccaccttcacccaggtgaaacgcaaaatgaacagcaagctggaatttattggtatggttccaagtaaggtagatggccgcaatcctcgccatgtaaaccacctgcaggagctgcagacggcctaccctacgttaatggttcctgtgtctgtcgggttgcgaagcagcattgctgatgcactggcttcacatgtccctgtctggaaaatcaagaagacagcagcacgtaaagccagccaggaaatgagagcactggccgatcatgtttttactaagatggagattgcataa

SEQ ID NO: 99850 - DNA, 1014 bp, Enterobacter aerogenes
atgactaaaaaaaattcttccggccttggccttgataccgttggtgatctctccgactttcttgatgcgtctgcaggtgctgagggtaaaccactgatgctggatgttgatgcgattgatccagatcctgaacaaccgcgtaagcaggacaacccaggattctcagaggaatccattaaggagctggctgataccattaaagcgcgtggtgtgaaaatgcctgtctccgttcgcgagaacccggagcaagcggggcgctatatcattaaccatggagaacgtcgctggcgagccagtaaagtggccgggaagaaacaaattcccgcttttatcgataatgactatagcgacgatgatcaggtcattgagaacatccagcgtaatgacctgacggcgcgtgaaattgccgtacacattggccgcaaactggctgagggggtatcaaaatctcagattgctaaacggcttggcaagtcgccagcgttcgtaacccaacacgcagcgttgctggacctgccggattgtatagcagatgcttttaataaaggctcaatccgtgatgttaccgtagttaatgagctggtaacggcttacaagcaagacccggaagaagttcaaaaactgcttgaagagaacgagggtgaagacattacccgtagtgcggtgaaagttttccgtgagttcctggacgaaaaagaatccagcaagcgtgatccagacaccattgacgccttcaatggccgtaccgattcggaagctgccgaagatgatacggacggccacgatgataacgatgtgaccgataaggtccgtaagacgccagaaaaggaaaccgatcctgataaattcaaaaaggctattgttatcgttgagtacctgggggagcagggccgccttatcctgaccaagcgcccaagtgaagaaggacttgcctggattaagtttgattcaactggtgtagaagaagagctaaatctcgaaaacgtgaaaataatttgccttattgaaggataa

SEQ ID NO: 99851 - DNA, 198 bp, Enterobacter aerogenes; identical to SEQ ID NO: 27304

SEQ ID NO: 99852 - DNA, 1014 bp, Enterobacter aerogenes
atgagcgacaaaaaagacccgtatctgtatccgggtactgatacccttatcaacaacgctgggatcagggataaaaaacagcttgaagagtttgagcgcgacactgtagcgcttaacttatcgcagctggaagaaagccctatcattggtcctttcgacaagcagcgcctaaaagaaactcacaaacgcatttttaacggcatttatccgtgggccggtgaattccgggaaaataccgggatgatggtcaaagagcgtttgggtaatcaggtgatgtacgctgattcagcctacattgaaccggagctgagtaaactttttctctccatggagaaagagcaattctttcatggaatggaccccgaaaaattttcagagcgtctagggcattattacggcgagttggatgctttgcatccattcagggaaggaaacagccggacgctgagacagttcacgtcagacctggcattaaatgccggtatgaacctggactggtctatggtggcagcagatgatgatgcaaggagaaaactgtatcttgcgcgtgacgtggccgttatcaacgcagattcatccatgcttgctgacattataaaaatagcagtcagccctatcccgacacagacggttgacgataacaccaggagtaacaccgacatgagcaaacagcgtgttcttgtcatgaacggccagcgcgtgctgcaaagcgaagaagcaggcaaatggaaaaatgacaacgttgataaagcgggcagcataaagccaggcatttacccgctttatctgtccaaggggccggataaagccagctcttataatgggccgattttacacgcagataaacaatcagtatatcagcaggtaggtaagcagattttcaagcatgatcgccaaaatttcgataaactgccagaagtaggtacggaaaagagtatttcgtatgaccagacttccggtaaagctcaggtagcagcagccacagagaagcagggccggaagttctccagatag

SEQ ID NO: 99853 - DNA, 681 bp, Enterobacter aerogenes
atgaagccaactaccccatttaaaaatcccggcgcggtccgggatacctccccccctcgtcagcagcctgatattaaacctgatcttatcgcagagtcggaagctgtgaatatccaggaacaggtacagcagctgcatgacgagcagcagcagttgatcaatgacccatcccatttacaggattcgcaaactgacgccggtaacatcgagcaggaatataaggatgcggtagaggcggcagtagcggataaagaaacgcaggcagaaaaccttgaaaaccggctagaatcgctgatagacaagcaggaggcggttctgcagcagatgatgagtcgtcagcctgggtttttggctctgcccggccagaaggcaaaatggcagtcgcaggtacaacaacaacagtcattgctgagtcgcctgcagaaccggctggaaactgtcaaagagattcatgacgggatggggttacatggcccgcgtatacacgaactggcgacggccaaagtgcggcatgataaaccagagcttgccgaaggatgggatgaaatgcgggccgcacagcgagcgcatgagaatctcatgcggaagcaggcgaaagaacagaaagaaaagctacaaagagagcaggctccatcactaagtaaagggaatggtctgagccttacaagaacaataacttga

SEQ ID NO: 99854 - DNA, 234 bp, Enterobacter aerogenes
atgcaaaacgtgtcaatgatggaagaaacactgcgtaaaatgagaaaacatggtagccagactatcgaagtaacacagtctctggaagcctttggccgctataaaccccgccctgctttccaggactggatctaccgtttgaagaaaggcgaacgcttaccacggggccgttactttgtaggcaaaaaaccaggtcgcccatttcaaatcatcgacgaggttctttaccgttag

SEQ ID NO: 99855 - DNA, 441 bp, Enterobacter aerogenes
atggatgataagacggaagaactcattgcgctcattgctaaaaagcatggtatagcactggatgaaaccgatccgattatggtcgttcctaccctgcttcggtatttgctggatgaaagccaggagaaacagggagaaattctggatgagtttaaatccgagctacaaagcgccctgatgcaatgggattacagcgcgaaggataaggctgaccgtatccttaacgccgcgctaaaggccaatacggaagtaatggagcgtgttttgacatctgcagctacagaaaccgctgccataatcagaaaagaagttcaggacgagatcagaaaatcgcggtcgcacatagaaggggcaagaaaacttgccatgatgaatatggcggcggcggtgatcaccttaatggctgcagccgtcgcattcattgcaacattttacaagtga

SEQ ID NO: 99856 - DNA, 786 bp, Enterobacter aerogenes
atgcctactgcagacaaaaataaaaaacaaagtgaagctgaatcagtgccggtacgccatgctgttcacagcgcccagcaaggaaaaggtggttgtggtaaatccgttagtaccgctttgctgggaatgtacaagattagcaaaggtgaactaccgctgtgcatcgataccgatccgctcaatccgacattctctaattatgaaaaactgaacgtccgacagctgaacatcatggaaggtgatgaaattaatcagcgcaaactggataccctcatccagtggattgatgaagccggtgacagggacgttattatcgataacggcgctccgtcatttattccgttatcaagttatatgattagccagcaaatccccgccctgctttatgaaatgggtaaacagcttgtcattcatatctcgattgtgggggggcaggcacatgattacaccgtcgaggggttcaaggccatggtggagcagtatccgtcagaaacccgttttgttgtctggcttaacccgtattggggcgcggtggaatccgatcagggagtgccattcgaagaatcagaagcgtacctgatgaataaagacaaggtggatgcgcttatccggttgcctacgctcaaaaaagagttacacggccaggactttgccgacatgctggaaaattacaagaccttcgatgaggccattgaagataaatcattatctattatggttcgccagcgtctgaaacaggttcgcgcccttgttttcgaacagcttgatttagcaacggtgatctga

SEQ ID NO: 99857 - DNA, 549 bp, Enterobacter aerogenes
atgccgcatacaccggaaaaccaacgttttccgggcggtttacaactgttatcctgctcaaatacacacggaaatacacagaaatacctcataaatacacacgcaggttatcggatgggaaaagactatttaactgacctacaggagtgggttaagcagaaaaaggggctgaacggcaagagtgcaaacagcgcgagggtagtcttcctggcaatccgggaagacgtcaaaaacgcgattgaagccggttactctcttacaacgatatgggaacacatgcacgaaactggtcgtgttaataccacatacgaaacttttcgtcggcatgtccggcgatacatagatgagcgaaaacgtgcagctgctgttagcgaaagtacacctgctggagcggtggtaaagaaagaaagccaacaagccggactgtcaccaaagaaagaaaacgtgatcccggagagaacgccggtcaaaagagagccgcctacgaataccggcagtcagctgccaacttttaattttaatcctggaaaaaagaaggggactaactaa

SEQ ID NO: 99858 - DNA, 360 bp, Enterobacter aerogenes
atgacggaacaagtgaaaactacacgtaagcatggcaagcacattcgtgtgccagttctgccagaagaagaagcgatcattaagcgcaacgcagatgccgctggtctgagtacagcggcatttctgcgtaaggttggaatgggttatgaagtggaatccatggttgatattgaacaggttcaggagctgagtcgggtaaatggtgacttaggccgacttgggggattgcttaagttgtggctttccaatgacgagagaacccgtaatttttccgcatcgctgatcaaaactcttttgggaaaaatcgagtcaacccaaaacgagctacgcacagtaatggacaggatactgagcaaatga

SEQ ID NO: 99859 - DNA, 318 bp, Enterobacter aerogenes
gtgataagtcttgtcgccctcagagcgcgtgttacgccgctgtgttggctctatatcatagcgggctgcatcaagaatgttttcctgatgacagttcgtaaccttaataacgcccacgcgctcctgtttgctttgcgggtcttgcagatactttgcaagctcaacaaaactacttttcttaacattacgcattgggatgtgacgcgaaatcacgatgccccctggattttagccgctaaaatcatttgctcagtatcctgtccattactgtgcgtagctcgttttgggttgactcgatttttcccaaaagagttttga

SEQ ID NO: 99860 - DNA, 132 bp, Enterobacter aerogenes
atggattttatttatagcgatatggatatgcacattatcagtgtcgtaatgaacagcactgacacgctgatgatcggcatatcccatagcctcgcagatacgttcttctgcagcgtccagaacctcctgtga

SEQ ID NO: 99861 - DNA, 207 bp, Enterobacter aerogenes
atgaagaccgtcatctccggcatcgcgggatacatccagacgtttaccaccgtcacggatagcactctctcccacgcggtaaataatcgtcccttccttcgttacgctgtccggtttcagtccagggatacggccatcttttttgactttatcgccatgcagaatgttggcctcttttcgggcctgctgtgcattccgctggcgtaa

SEQ ID NO: 99862 - DNA, 477 bp, Enterobacter aerogenes
atgagcaaagacgacaaagatatgccggaacagaacgaaccgatgcaggacgagaacgaagcggcactggaaatgctactggggcaaatgagccaggattcacaggacgaagcacctccgctgatgccggaaacggatatggaaccagcagcagcggaagacgaactggcacaggcgatgcttttactacagcaggaagccagccaggaaggagtgatgacacccgtacagggagaagtcgagcagccgaaccaaatggcgaacgaggacatagtaagcccaacgttgcgcgacctggacgccagccgccgcccacagcaaaaaaccgtctgcgagcaatgtccgaactcggtatggttcgcatcgccggaggaagtgaagtgttactgcagggtaatgtttctgaccagctggagcacaaaacagccgaacgtgctgatcaactgcgacgggatatggctggggcaggaggaataa

SEQ ID NO: 99863 - DNA, 156 bp, Enterobacter aerogenes
atgaaagaaaaagaatcaacaccggtgttgtgtgaatcccctaaaggagtggggatagtgatcccacttgtaacatcatggccggattcagtcgtagtaatggatgtcacccatgatgactggaagataaaagaggaagccaatgagaaagcctaa

SEQ ID NO: 99864 - DNA, 1947 bp, Enterobacter aerogenes
atgagaaagcctaataacgctgtagggccgcaggtccgtaataaaaagaaaactgcgagagggaaactgatcccggcgatggccatcacttcactggcggctggcatccaggctgccacacagtatttcgcttacagctttaattatcaggaactgctggggccaaacttcaatcacatctacgcgccgtggtcctatttcaaatggtattcagcatggcatgaccgtttacctgatgcgttttttgcagctggcagtgtcggggctacggtcgctgccggtggtctggtcctgactgcactgacaagtatgatgaaagcaaactcatccaaggcgaatgaatatcttcatggttctgcaagatgggctgacgagcaggatattaaagctgctggcctgctggggaatgatgaaggggtttacgttggcgcatgggaagacaaaaacggccagctgcagtatctgcgtcacaacggcccggagcacgttctgacatatgcacctacccgttcgggtaaaggtgtcggcctggttgttcccaccttgctttcctggaaacattcaacggtagtggctgaccttaaaggtgaactgtgggcgatgacggcgggctggcgtaaagaatacgccaagaatctgtgtctgaaattcgaacctgcagctgccaatggttccgtcgcctggaatcctctcgatgaaatccgtgtgggtactgaaaacgaagttggcgacgttcagaaccttgccacgctgatagttgacccggacggtaaagggctgaacgaccactggcagaaaacatcacaggcgcttttagttggtgtgatcctccatgtactttacaagcacaaaaatgatggtacgccagcaacgcttccgtatgttgattccatcatggccgacccggaaagaggggctggggaactgtggatggaaatgacgcaatacggccacgtaaacggcgagaatcatccggttgtgggtgcagctggccgagacatgatggaccgcccggaagaggaagccggttccgtgctgtctactgcaaaatcttacctcgcccttttccgtgatccggttgtggcccgcaacgtcagcgagtcacattttaaaattaaagacctgatgaaccatgacgatccggtttccctgtacatcgtcactcagccaaacgataaagctcgtctgcgcccgctggtacgaatcatgctgaacatgattgttcgcttgctggccgataagatggagtttgagcgcgtcaataacaaccttacgctgtggcagcgctttaaacaggcgtttggtttttctgtccagggaaccaaaagagtacagacgaagaaaacctacaaacatcgtcttctggctatgatcgatgagttcccaagcctgggtaaactcgaaatcattcaggaatcgctggccttccttgcgggttacggcatcaagttctacctcatctgtcaggatattaaccagctgcgtagccgtgagacaggttacgggccggatgaaacaatcacctcgaactgccatgtgcagaacgcatacccacctaaccgtaccgagacagccgagcacctttctaagctgaccgggcagacaacggttatcaaagagcagatcacaaccagcgggaaacgtgccagcgcgatactgggtggcgtgtccaaaaccatgcaggaagtacagcgcccgctgctgactgtggacgaatgcctgcgtatgcctggacctaaaaagaatgcagaaggtctgatcaccgagcgcggcgacatggtggtttacgtggcagggttcccggccatttatggaaaacagccgttgttcttccaggatgaaattttctcgcttcgtgcctcagtacctgagccaaaaactaccgaccgtattcgcgccgcagctgctgcgaatgatgacgccagtaatgaggctatcgcaatatga

SEQ ID NO: 99865 - DNA, 534 bp, Enterobacter aerogenes
atgaaaaaagtgacccggtacgctgccattggtgttatttcagcttcattgattggtgcagttgtgtgtggccttggatatgccgccgggttacgcatcaataccacgaaaagtatccctgttggcttgtacaaaatcagccagaaagcgccagagaagggcgactatgtaattttctgcccgcctgaaaaggctattttctccctggcacagaagcgcggttacatcggcagcggcttttgtcctggggggtatggcgagatgatgaagcggattttagcggctaaaggcgatgaagtcgcttttcgtgatgatggtgtttacgtcaatggacagttattgccttacagcaagccgttaagtgctgatccgggcgggcgtaaactgcccgccattcgtgaagtgtacacgttgggtaaatctgaactgttgctgatgactgaccgcagcgcatcatcatttgacgggagatacttcggcgcggtcacaaagtcacagattatttctacggtattacctgtaatgacctggtaa

SEQ ID NO: 99866 - DNA, 330 bp, Enterobacter aerogenes
atgggattatttcatcagagtgcggagaaagagaagttagaagcactggaaaatgttatttcaaaaaacaatcggggtatttttaaacgaattgatgagaatcgcgagctactcgaattgttatatgaaaaaacgccagagcttatggatgaatgttcctggattcgtggctggattgaatctcaggatgaatttttaagtaagttggcggaggtttctggtgtggaaaatcgaacctataaccttactgctggtaaaccgtacccacgcccttttccgaaaaaaccggattgtcttacggattcttcgaatgagggtaataccgtatga

SEQ ID NO: 99867 - DNA, 327 bp, Enterobacter aerogenes
atgaataatctcattatgtatgctttgaaaactattcgttatcgcagtctcattgctgaggcgcttttgggtaatttatcagagtgtgaagatacaaaaaggcgaagtgaaattatcactgtttgtcatcgctccgctgatgtgattgaacatatatcacagtacgcaattgaagattgtcttgataaacatcaattgatacaggatctggagtccgctctattcattcttgatgttttcagttttgaattaaataaagttaattcatgtatccctgatagtgaagaaattaaagtgcttatggcagaaatagggagtgtcaaatga

SEQ ID NO: 99868 - DNA, 2028 bp, Enterobacter aerogenes
atgagagtattcattgcagaaaaaccaagtgttgcaaaagccatcgctgaaatattaggcgcaacgaataaaaaagacggttacattgagtgcggtagtgactatgtgacctggtgttttggtcacatgtatgagcaggccgaaccggatgtgtatacaccagataatgtgccgcgcaatgagagcggcaaaaaaatctggcgagaagatgatctgccaattatcccggaaaagtggattattaaccctcgtgaagatgctgagaaacagctgaaaaccatccggcatttggtagagcgggctgacactattgttaatgctggcgacccggatcgtgaggggcagttactggttgatgaaattcttgatgacatgggatgcactaaaccggtcctgcgttactggtgtaatgcgaacgatacggtaagtgttaccagggcgctgaaaggtctggagagcaacgataaatatgtgaattttggtcgtgcagctcttgcgcgtggccgggctgactggttggttggcatgaacctttcaagaggattcacgttgtcggcagcgcgtggtggctcgcgtgttctgttgacggtcgggcgagttcagacaccaacgctggcgcttgttgttgcccgcgatcttgaaattgaaaacttcaaaccaattccgtatcacaatatcaaagctgtctttaaacatgataaaggggcgtttgttgcgggatggcaggccagagaagatcagcctggtcttgattctgagggaaggctgattgacacaaaagaagccgacaagttagtcgcagctttaaccgggaaaaccggtaaggttgtggaatataagcaagagcctaagaaaaaatatcaccctaaagcctattctcttggcggtataacaagtgttgcttcaagcaagtttggttattccggtgagcaagtgctggctatatgtcagtctctttatgaaacgcataaacttaccagttatccacgttctgatagctcttatttacctgaatctcaacacgcagatgcgcctcaaattctggcttctcttcgggttacttatccgggaatagctgccctaatcgataaagctgatccgaaagtaaaatcaaaaacttttgatgactctaaggttacagcgcatcacggcattattccaacgatgcacaaaggtaacgttgagaggcttacgccagaagagcgtaatatttacgatctcattgtaagaacatatctggctcagttttatccagtgcatgaatataaagcgacgacaattattattgatgttaatggtgaaacgtttggggccggtggccgcgtaaccactaaaaacgggtggaaagacgtttattcagatggagaggatgaagacgaagaaaatgagtctgaacagtctcttccatcaatgaaaaatggtgacgaaattgtttgtgctcaggcacagcgtcaggatgccaaaactaaagcgccacgtcgctttaatgacggtacgctcaacaccgcaatggaaaatattcataaatacgttgaagacccggcgcagaaaaaattactgcgtgaaggtgatggtatcggtacatcagctacccgcgccacaatcgttgccgagttaaagaaacgtggctttatcgaaaacaaaggcaaagacattatcagtaccaggctgggaagggggctgatagccattctgccagaactggttaaaagcccggtcatgacagcaatcaacgaacgtatgttgctggaaattgagcagggcaaacgtgacgttgattcctttgtgaagatgcaggaaaaatttgtacgagatcagattaaggttattaacgctggagctatcaaagttgccggtggtgtgcaaatttctgacaagtacaaatgcaaggtatgcggtaaagggcttattcgccgtccgtccaaaaaagccggtcacttctggtcctgcagcggttatcccacctgtaaggagtcttacccggatattaaaggtagtccgaactataaccccgtaaaacgcgcttaa

SEQ ID NO: 99869 - DNA, 186 bp, Enterobacter aerogenes
atgactgacactaacgcagtaattcgccctgatgttaacgacgcaatacaggacaaatatcgcgatttgatgacaccgggatatgtagccgagttttccccggatgaagctgatcttgcgggagcgttcgaagatgatgcactgaatgcgcgtgacgcatatgaaagtgcttttgatgcggagtaa

SEQ ID NO: 99870 - DNA, 3960 bp, Enterobacter aerogenes
atggcagaagctaaagcgaaaaaaccatttcatgagattgtggctgaaaacctgatagcccagctcaaagagggtacggcgccatggcagaagccatggaatccgggcgcaccaggtgccgctcttcccatgaaccctaccaccggtaaacgctataagggcattaacgctattcaccttatggcgcagggttacagcgatcagcgctggatgacctataagcaggcgacagctgcaggtgcgcaggtgaggaaaggcgaaaaaagtacgcatgtccaatactggaaattcactgaggaacgtatcaagcgcaacgatgatggtagcattgtgctcgataaagatgataagccggtaaaggaaaccgtccagctggagcgtccgaaagtatttatcgcctcagtgtttaatgcggagcagattgacggtcttccaccaatggccgttcgccaggataagagctggaacagcattgaacgtgccgaatccattcttgaagcctctggcgcgaaaatctcacatgaccaggtagaccgcgctttttaccgcatgtctacagacagtattcacttaccgcagcaggccgcttttccaagtgccgaccgttactatgccactgcacttcatgagctgggccactggaccggtcacgcctcacgccttgatcgtgatctggcccatccttttggtagtgaaggttacgccaaagaggaacttcgcgcagaaattgccagcatgatcatgggcgatgagctgggaataggtcatgacccttctcagcatgtcgcctatgttaaatcctggattaaagccttgcaggatgatccgctggaaattttccgtgctgcagctgacgctgaaaaaatccagggcttcgtgctgggccttgaacagcagaggacacaggaacaaccggtaacgctggaaacagagctgcgcgtaaaagagcataatgaggtcttggccgaggtacagcggctgactaacccgcagattttcgatgctgaaacagtgcaactttaccatttcactttcatgactctggagcagacagcggaggaagctggttacgttacctattacagtcgtggcactggtgagctgggcgaagaaaccattcgtgttaactacgaagacagtaacggcaatactattcctgttcatactgatgtggttgggcgcggaaaagcgttgacgtatatcggtgatgaacgtgtacccggaacgggattctcttctgataatgaatggcaaagtaatgcccttaaaaccgcttttgccagcatagataacaacctgactttagcggctaaaaaggttcagagtcagattgaaaatatcagtggcgacccgcgagaattaccgcaggacgctaagtttcctaaaaactggtggcctaattccagttttctggcgtcaaaacctaatggagaatcttccgcagcgcctgcgtcagaagaggaatcccttgaggtttatcgtgaaaggaagagggcagaattatttaacaagccagcgcttcccaaggaactacaagaacagctgaaggaaaacattaagcggcatgctgacgccatcgaaacggggcgcatcaatatgagcactaaacctgaaacgtctgttacacccgaacagcagcggcagtatcgtgctgagaaattcattctttctaatctcgatagtggcctttctaagcacgtccagaatatgaaccgtcgccagcttacactatcgcgtaacgtcctctttgatgcgcagaacagcaatcaggatagtgatttctggaagcgtaacagcgaatttcattcttcattcagtcagaactggaatgaggctcaggacaaaattaagagcgcatatcgtgagcttgatttagcattaaccctcctgcctgagccgaaatataccattgtggaaaatcccggccagaatgagcatgtgaatatcatcatgcagaccaacagcgcggttaaggcgctggccgccgttaacgaaggggataaccgttcaatttatgactcacgtcttatcgataacggtcaggtcgatctgaatgacctgcagaacaatttttaccaaacgcttgaggcagaaaaagcagccttaacgcaaggtgttatcaagcctgatgatgagattagcgtactcccgccaggagaagcgcaggaatggtatcaggaccgtgttgaaagcctgatggagggtgctgacagcccggatgaaatgaaacgcgctctggatgcgctggggccggaaccgggcgataatgaggctgttttccttggtgaagacggcgggcgagttctcccggaattcagcctgaatgttgcgcaggaaaataccccaatcaatgtaccctacaaagaacgcaatgaagccaaagcgcttggggctaaatgggatcgaaccgaacagacctggtttgtaccaaaaggcgtatctcttgataaatttgcaaaatggagcggtgagccagctgcagctgcagaaaaaaatacgccggttgcatctgtgaaagacgtaacgccagaagtgggtgagcgtcaggatctggccgtcccttacaaagaccgtgcagaagctaaagcagctggcgctaaatgggacaaagagaaaaaaacctggtacgccgaagccggggctgatatgcaaaaactggcgaagtggaaacctgaaaacgtagtgatcgagcagtcaccggcaatgacgctgcaggaggaagtggaaaccgcgttgaaagatattgggtgcatcctcgatgccgatactgaccggggccagaagcatccaattatggatggtgagaagcatcggatcacggtagagggtgacaagaaaggggagaagtcaggtttttatatcatccacactgacggccatcctgcaggctttatgcagaacaaccgcaccaaagaagagttacgctggtcttccaaggggtatgtgcagtccgacgaagaaaaagcgctcctgcgggcgcaggcagctcagaaacaggccgaaaaagcagcacagcagcaaaaagaccatgagtcctctgcaaagcgtgttgaaaagcagctcgccaaactcaatgaacctcagcagcaaactgcttacctggagaaaaaagggctgcaggtgcataaaggcgtgttcacagacaaggaagggcagaaaacctttatccctgcttatgatgtccagggtaagcaatggaccatgcagtacatcaacgaggacggcacaaaacgttttgccaagaacgcccgtaaagagggatgtttccatgtcgttggcgggctggacgcgcttaaagaatccccggtgctgatcgtggccgaaggttacgcaacggcagggagcatcacagaggctactaatatgccaacggtcgccgccttcgattcaggtaatctggaacctgtcgctaaagcacttaaagaagcctaccccgataagccaatcatcattgccggtgatgatgatatttctcagtcatgcaaaatgaaggtgaaggataaggccagtgtaaacgttggcagggaaaaggcgctggagacagcgaaagctgtcggcggtgtggcggtgttcccggtatttgctaaaggtgaagtacctgggaaagacgaactcagccagattaaaccggcggcgtatcttgctcaccagaccgcctcgcgcaaactggaggctcatacgagcggtgataagccactcccggatgccgaagtgaaggtactgcaggcagcgcaactatcggaaaagcagcttgatattattcgccgcgctgatcgttacactgactttaacgatctggccgtaaatagttctcttggccgggaaggtgtggcgatgcagttgaaagccgtcattgctgaccagctgaataaaaaacagcagcagtcacaggtccagaccgaagagaaaaaactcgttcaggaaaaagagaaaaagcggaccattcgccacgctatgtaa

SEQ ID NO: 99871 - DNA, 465 bp, Enterobacter aerogenes
atgcaaaaacgcagttatacgcaagatgcagcgatgcctgcaggtcgtaacagtagcgacatcggggttatcatgaagccagaaggctccatgaaaatatgtgtgctcaacggtagccgccaggtagataaagtggtcggtggtgaatggcaaacacagaaggtattgccggaggccggtttgccaaaaggcatttatcagctttccgaggcgcagcaggcatccaagaacgtttatccgcattcccatgtaggacaagtgctacacgttgacgatcgccacgtctaccagctgtctcagaaaggcttagtacagcataatcgaaatgcctgggagaaggagccggtagtagggcaaaattacgaggtggcttactctcgtggagtagggaaggtaaagagcgaactgacccaggatgaagcgcagaagttaaataacagtcagtctaaatcgcgctcgctttaa

SEQ ID NO: 99872 - DNA, 492 bp, Enterobacter aerogenes
atgaaaaaaatatataccgcagcgtttttattaatttttacccctttaacttatgctaccggtatcccatgtgccagctgtgcaacggttgagaatgcgataaaaggaaatactgatgaaacaccaataatggtgacgctggatactccgattgacaaaaatgatattacgccaaaagaaataaatttaatctcacaggacactaaatgtctttactctggcgtgcttacgcagactctttcagataataaagacagtcgtattattgacgtgaataaaaaggtttgcggctccaatactgaaaaagtgtcttactccgttttacgtattagtgccagcgaacaatacagcaaaggtacaccgctaaaactgtatcatgccgccgtaatgactcccgcaggcccgttattcagcgccgatgtaatgagcgaaatgattaaagatattgcagatgctgcagaccaagctaaggcaaaaggactgactaagtga

SEQ ID NO: 99873 - DNA, 459 bp, Enterobacter aerogenes
atgaaaaatgaaaagccctatgcaggtttgcttaaaccagaacatctttactcgatgttaagagcctacatcatcgaacacgcaccctttgcgctgtcaactgttgttgtatccgacgtgattaacgcatatatgggtagaaactctggctatccatttctaatgtccgatgatttaccgccaaaattcagcggtaaaggttttgaaattttcggtgcttacaaaaacaccgaaaatgagagcacgctgatcgaaaactcagcggcatggacttgttgtaaattaacctatttagaaacagaagatgacgtcaatacttttaatgaagcccttaatgcaatgatgcgctggatgtacgccacggagtatctaattaaggacgaatgcggctaccttcctactcagaaattatttagcgaattaacattaaaaatcaaacgtgagtacggcgacaactaa

SEQ ID NO: 99874 - DNA, 207 bp, Enterobacter aerogenes
atgtcccgtatatcgtataggaaaatcgactcagagaacagcaagcgccttgctttgttatcccttcgtgaatttctgaacgaactaccaaaagtcaccattgacgagatagaaggtctggcggctaccaatacccatctggtagaacagatcccacgctacctgagtgagatggtaagctacgaatgccgtttaattggtttctga

SEQ ID NO: 99875 - DNA, 624 bp, Enterobacter aerogenes
gtgctatatatgttgatctgcagtgttctgatgctggcactggtaaaaatcatgtggcagtcgatgatcgcggcggcttctggagaacgccagttaatcaaaaataatgccaaacttgtatttacctgctttccagcaatttgctttattatctcaccgtttattttgtctttcatttctggtgaaggtatttatacagttaaaacactttcacaactttcagttgcgtcacaatggctggggtttatttcatctttagtaatggttatagtattttcattttattctgaacgtggaaaaaaattctggaatactggttgttccgtgctttcattaattctcgcatttatattttttgacagtgcaatgttcaataccggtgagaatggttccgctaattcgatatttattcagtccatttccccggatgtcaagtgtgaacgtggaatggtcatttttaaatacaaaaaaggcgatgaatctgaatggcgctgtcctacatcaattgcaatgatgcaggaatcaggaaagatgtttattccatggcctgattatgaagatggcaaaagtaaagatttgactaaaggcattgataagctgcaggatgaatttaaagataaatag

SEQ ID NO: 99876 - DNA, 198 bp, Enterobacter aerogenes
atggaaattttctggaagccgctgggtatgggggcagtggctgtatttatcgggattgttttgctctggcttattcctgaatataaaaagacgcccaggaaagcggctgtagctgtaattaatatcggagtagctctcatgctcgcggtggcagtaggaatgattgcagtgatgatgatgacgccagcaggaacctga

SEQ ID NO: 99877 - DNA, 192 bp, Enterobacter aerogenes
atgaacaaagtgatgaaagctgtgggttgggcggggataaccactatagttcttgatctggctttacctttcatagggggaaaatcatttatcggccccggattaatcaagagctacccttttattatttgctgggctgtgattactgtcatttactatgcgatttacgccaagaaaaagaaaatttcgtaa

SEQ ID NO: 99878 - DNA, 324 bp, Enterobacter aerogenes
atgggcgtaaaagactcgaattatcagatagtttacagaagtgaagtgctggatcatcttatccctggtcaatgggtattcttccagcgcctgaaatcttatggtggtggttactggcttggtcgtacatatccagatttttatcagtttggcccggagctacctgtatcgttatctcagggattacagtacattatggcctctgataaggttgaggcagaaagccatgtcttcgatgacgattttgaactttacggaggatgctttaatgaacaaagtgatgaaagctgtgggttgggcggggataaccactatagttcttga

SEQ ID NO: 99879 - DNA, 249 bp, Enterobacter aerogenes
atgaaaatatttgctctttttttttatattttccctttggcttcttttgcttcaaacgaaaatgtagatcacgtttttataaaggcatttcaggctgcagtggcttcatcattatgtacagatgtagctaatgtaagtaaagatacccagcctgaaaaagagcttgagcctcttataaaaatgtgcgcagagaaaggcgaacagagtcgcgctattcttaacgcttataccaatgcagcacacacttga

SEQ ID NO: 99880 - DNA, 885 bp, Enterobacter aerogenes
atggatctaacacagatttcattgcgaacgtcgagagatcaagtcgagcgtatcaaaacctatgctaaagcaagtaacctgtcagttaacgctttcctggttaacctgatagagaactcactaaacaacattgctaatgatggaacacagagcgaacttacacggcttgtagctgaaccggtcaaaacactttcaaggcttcatcacaaaatttgcgatccctggaatacaaatgaacctgctgatctgactcccgctgaaatagcttttttgacagatgcggccaggaagcaactggatagcaaacatttggctggccctgattactttgcaatacgtgaccgcatcgataataccctaatagaaagcagtcttaactattatcaggatctgttcggctttgcacatcgcttctatattcgtgatgaagaatccagaaggacgtttgcaaccgaacacgcgccggtaggcatccaatccgtcgattattcgtttacggttgggaacaagacctttacgattattgtccggggaaatgacagtaattccttcgatacaccggaggataaccgccctcctgttctggcgtttacctgtgaaaccgcgcaatttgatacccgccatgattgggatactttcattgcactggtgaggctcatgaacgcagtacataatggtgaagaatctaaatgccacgccggtacgcatacccgccttggccgccgtatggatagcgaaaaaccatggtcacttttcttagggagactgcagctgctgctgaaagatagcgagctaaaggatatggctgtagaatttcataaacttgttaatggtgatgcggctaacgttatcaaacaaatacgtttactttacggtgagggttaa

SEQ ID NO: 99881 - DNA, 657 bp, Enterobacter aerogenes
atggatgcgctacttggtcaggacgaggaccgcgctatagctgatcgcttatacagagaatacccggcaatgcggtggatcagcaccaaattggtccaggagaggcgcaaaacattggggatagaaggctgtggtcgaaatagatcaaaacccaccggcagcaaaccgaggaaatctactgtagttacccccacatggacgccggaagaggatgcaatcttgggaaccgactcgctggcaaaagtatccgttcggctcagtcgcccaacaagccagattcaaaagcgaatgaaagagcttggcattgcccattttgcgcaacgcggtacacctcgtagttctgtaaagttacaagctgaagaggcccaaaaggaacgaaataaagtcagactcattcagcgaatgcgtaaaggtgcggttatcgcggaaggggtagcaaatggttatacctataccgctttagcaaaagagttagggatcagtcccacagcggctaggaatcagttttttatgtttcttagagtagcaatgcttccttcgatgctaggcgaggaaataccacgggatttcaaaaacataccatctcatgttctaaaaaaggctgtgtgctgtgtagagaattattgtattaatcttgaaaagacaggggaggaataa

SEQ ID NO: 99882 - DNA, 345 bp, Enterobacter aerogenes
atggcatatagcaaatatctaaataatcccctcgatgaacgctatttgatagaaccgggggaatacgtagaagagggggctattccagatgaagagctggaagttagaaagcaattggctgcattgaaattatgtgaagaacgtctgcgtaaatgtggtttcttttggtgtttatttaattcggaagaatataaaggctatcttcatatagctaaaacagttaatgacaatctaatgaaacttgtgaacaggacaccccagcataaggctgccatcaggcgtattgtgaattcgatgcctgaaaacaatggcgggcgtgaatccttaaaagactttattaaatga

SEQ ID NO: 99883 - DNA, 507 bp, Enterobacter aerogenes
atgaaaaaacctgatccaatttttcttttaatagataaatactgcaggagttataacaaggaaaacagaaaggaaatttattccagttggtattacataccagcatttagcgcgatagccgctgtgatgtattggaaagtgggtataaatggctttatgtgctcaatggtagctatttggggattgttccttacagtcgccgtgattttgaacaggagaatgagtttagccaagttaaggatgaactattctgattttaaaaatggtggtcctgtaatgggaatgattagtgatgattttatttcacttctggccgattctggaagcattgataattacgccaaaagaagacttgcagaaaaacaacaagaaaaatgtggcgcgctcagatggaatgatttgtttgaaattagagaagaacttttgttattgaaagaaaaggataaaagtttaataggtaagggagctgcaaaattacagcagtacaatcaacaagataaatgctga

SEQ ID NO: 99884 - DNA, 447 bp, Enterobacter aerogenes
atgagtataaaaaacagatgtttggttgttttaatgatgacgttctcattggtcaatgtcgcttatgcgaaaaatgaacagccttatagggtggttaacatgaatgatattgccgatgacggaaatcaaaatgttaaatttattaataaaaagggtgactgttactatttcggacaggcattattagtttccgtgaaaaatgcaaaagtattaggtgtggaaatacctgatgcaccgaaaagcaaagcatgggattttattatcaaaagcagagtctgtcagggtggcgaccgtgataaaactccatactcagtcaatcaaacattatatttaacccctgatacaaagacaattcagagaaatatgtattctgcattaatccctgcaggtactgagtttcttgttttttcatctgaggaagaaagaaacaaatatttcggcaagtaa

SEQ ID NO: 99885 - DNA, 651 bp, Enterobacter aerogenes
atgttggggggggatgtgaaaatagcgcgagtgtatttgcgggttagtacagacgaacaggatttgacccggcaaaatgagatcattgaaaatgccaggaaaactgggttctatgttgccggtgtctataaagaaaaggcgtccggtgcaagagctgaccgcccagagctgcaacgtatgattaatgatttgcagccagacgaagtagttattgcagaacacatagatcgtatcagtcgtttaccgctcgatagtgcgctggcgttaataaactctataaaagagcggggcgcgaaactcgccattcccggaattgtggatcttaccgaactggctaacgctcaatccggtgttgcgaaggtagttctggaatctgttcaggatatgttactcaaagttgccctgcagctggcaagggatgattatgaaaaccgtcgcaaacgccagaaagagggtattgaactggctaaacggcaaggccggtatcaggggcgaactgcagatctacggcttcataaacgcatcattgagtatcgttcaaggaagacaagtattgcggaaacagcgaaactttgtgaatgtagcgtcagccttgtaaaatctgtatgggctaaatttaaaaaagaaggaataaatcacaatgcgaaataa

SEQ ID NO: 99886 - DNA, 324 bp, Enterobacter aerogenes
atgcgaaataaggcttatttattattcattgcggttatagctataccgttttattccttttcatcaactacaaccatcacgaacttacacacaatgcagttgcaacaacaaatctcaagaaatgcagcagtaaactctggagttactaccaatcatagtaagtctgtaagaagtagcggtggtggcataccagtgtatgatgctgctgctgttgaagcagcaaagcaccagttatatgagcagtggttaaaagaaagtgacaaacaaatggtttatgaaaaatggaaagagatgatccttaaggaggatagtaatgaaaaataa

SEQ ID NO: 99887 - DNA, 255 bp, Enterobacter aerogenes
atgaaaaataataataagaagacagtaacgaagcgggaggtagctatcagcttcttcctttttatgatcatttttctaatgtttttaacgggtattccaaaattttatgacctgagctaccttacaactcctatgatcgtaggtaagttattaacggcttttgttggtgtatttcttgttgcttataatggagctagctttgtttataaaattttaagttactttgaaggtttaaaagacaaggaaagcgactaa

SEQ ID NO: 99888 - DNA, 504 bp, Enterobacter aerogenes
atgagaaaattaattttatgtaatatcttgatattacctggtttattctcatgtgtcgaagcagcgccagtgattatggtaacacgaatactggatggtgatacccttgagatcaaagatgatagtgagttgataagaattaggcttgtagatattgatgccccggagaaaagccaaccgttcggccaaagagccaaacagaaattgtctgagctggtaaaagatgctaatggcgttgctgtatcttcaaccggtaaagatcgttatggacgtaccttagcgaaggtctatgtaaaaaaatgccagccagcatgtatggcttattacgtgaatgctgaaatggttaaaagtggcctggcatgggcctatcgctaccatggaaaggcaacaagtccggctatggaagaattggaaaggggggcgaagcaggccaaaacagggctttggtcattaccagatgctgttgaaccatggcgttatcgatatgaacataaaactaagtaa

SEQ ID NO: 99889 - DNA, 687 bp, Enterobacter aerogenes
atgcctttcaaaaatgtagaactcattaagtgggtcgctttaatcttaatgattggcgaccatattaataaatacttattaaatgacacaatacccattctttataatgccggtcgtgtcgtgatgcctcttttttgctttgttctggcgtataaccttgcaaggccagattcatacacctatagcgtatattcaaaagtctgtcagcgcctgatgatatttggccttctggcgacacctgcgtacataatgctgggtggtgtaattgatggttggtggccgcttaatatcctttttaccttgcaggccgtcaccatcatttgttacctcattgaattaggcgagcgcagacatcttctttttgctttattagtttttgctggatatggcgcaatagttgaattttggtggcctgcggtggctatgggtgtatgtatctggctatattataagaagggaaggggagtgtttattctccttgcatttgtcagctgcgtactacttactgttattaaccataatttttatgcactactggcaacaccgttaattgcaattatcgggaatatccgtattaaactcccccggctaaaattgtttttttacgtcttctatcccgcacacctttatctgattctggctttacagctttaccttgctacaaagggctatctgtttttcacatga

SEQ ID NO: 99890 - DNA, 771 bp, Enterobacter aerogenes
atgccgtatttagatatgccaccggctcaggttgaacgtgtagtttgctcaattactgcggcgataaaatatcaggttccggctaacatcatgttagccgtagctgaaaaagagggtggtagtaccgggcttgagaataaaaaccgtaactcaaatggcacatatgatgtgggccgtatgcagtttaatacgctttatttaaaggatctggaaaaatacggcattacagcggaggacgtagcacagccgggctgttattcatatgatttggctgcgtggcgtatacgcggccatatcaaaaatgataagggcgacatctggacaaaagctgcaaattatcattcaaaaacgcctcaatttaacgaggtctatcgtgctgacctgataagaaaagcagctaaatggcagacctggattgaagcacgctttaatacgtttgatgcgacaaagcctgccggaacgactccacagccgcaactggcggctgcaggggttacgccagaagaaagggcggggaaaagcattgcgcaggttactgaccttgcacaaagcgacacacacgctacagaaccgccaaaaaatgacgggacagcagcaacaccgtctacgccggatcaacttattggttttgccgcttctgtaaaagaaataccggttaaaagcgtcgcaaaggctgactatcagcagcccgcacagcaactacctggtcgttataacaaggctgcagcggatgcacttgctgcagtatatggaaatatcaaactacgttga

SEQ ID NO: 99891 - DNA, 306 bp, Enterobacter aerogenes
atgaaagcaattctttccgttctggttttagctgcaagttctgttgctatgacagccccggctaaagccgcagatccatgcgaacaggtgttatgcctgtatggtgtgatgacaaccggcaatatcgcaagcggatgttcagggccggttggtgactattttaatatcatcgagaaaaagcacggttctttcctgccggatcatacttcccgcaagcgtaaaaaacagctggataagtgctcatccgctggaagtgatgtggttgaaaaaattaataacaagtttggccgtctgcgcgggctgtga

SEQ ID NO: 99892 - DNA, 1605 bp, Enterobacter aerogenes
gtggtaaatcaggcgaatttacaaaaagccccgaaaagaaatggtgacagaatgaaattcaggcatctaatttatccttgcttatctgtgttgctgatattaatcagcacacaggcacaggctgcaccattagatagtgctgggttgcttgatgatatccttaaccgctttgcaaatgttgccagcaattgggctggaaccatacaaaattacgcgacctggatattttggtcattagcggtaatttcaatggtatggacattcgcaatgatggcaatgcagggcgaaggattatcggcagctcttgcggaagtagttcgtttttttgctgtgttaggttttttcttctatctgctaaaaaacggcccggcaatatcggtagatattcaggattcattacgtcaactcgcggctaatgcttctggtttatcaaaatcattctcgccttcgggcattgtagatatagggtttgatatcgtatcaagagtcgttgaccagtcttctatttggtccccggcagactccactgtcggcttgattttagccggagttattctatgcgtattagcacttgtcggtgtgaatatgcttcttctgctgattaccggttggattttaagttacggcggtattttcttactcggttttgggggttctcgttggacttccgatattgccattacatacttcaaaacagttctaggaattgccctgcagctgttcacaatggttctaattgttggtattggaaaatccttcatagaccagtattaccaggcgatgggcgctgacgcagtacaaatgaaatctatgtttgtaatgcttgtagcctcaattgttcttttggttcttgttaataaagttcctcctatggttggcagtattgtaggcggtgcttcaatgcaaggcattggtggttttggtgccggtgcaattattggggctgcagctgcagcaggagccgcaatagcaacagctggcgctgctgcggcggcgggtgcagcaaacgctgccgggggcgcatcagcactcaaagcggcgtttgaatcagcacaagcggcaatggccgaagaatcaggttccggcggttctggcggttccggtggaggatttggcggcggggaagataccggttccgtagatacttctggaggccaaccatctggcggttccggtggttcgtctgcaggaagcagttcaggtagtgccagcggaggaagtcaggggtttgcttcatcgttctcacgagctggccgcatggcttctcacatggcgagtagtctggctgacggtatggctgcacgcaatgcggccaagcatgactcaaaaatcagcgcggcaaaagacaccattgcacagactgcaggtggtcagcttgcttctcaaatccgctcgcaaacagctgcgcgtcagtctggtccgatggtatcagatgacacggctatgcagggcgctttcgctagtaacgataccgccagcgcaaatcagtttggtggtgacggactgagcggaagtcagccggatacagacactggatcggcagagtcacagacgccacaaggcagtgatgaatatgaacagttcaaaaacaaacaaaacttctaa

SEQ ID NO: 99893 - DNA, 174 bp, Enterobacter aerogenes
atgaaatatatcattcctctcattctgtcggcgttctttatcactgcttgcgaccaaaaaaccgatcccaaccaggttgattgcaataaggcagtatcaaagatgactgaccaggaaaaaacgcagtgtggtaaatcaggcgaatttacaaaaagccccgaaaagaaatggtga

SEQ ID NO: 99894 - DNA, 1395 bp, Enterobacter aerogenes
atggctgaccaagataaaatgtcccccgacgcttctccgggcgttgctaacaaaaccggtgtacgccgcgttaacaaaagacctatgtacattgctataggctgtgtggctgcattctgccttgtcgttgcatacgtcgcgaataaacgtgccaaccagggcgcgtctgatacggcagaaacgactgttcaacgtggcagcagccgcgatacctcagcaatggcaatggatgttatgggaggcggtagttccgggcttattgaagcaccggcaacaccgccagagattccgaaacaggatgataaaaccaaaccgagcacagattatacagcggttcccgttgcgccggtggctgatccagatcagccgcccgttccgcaacggtcggaatcgccacggcagaatgatccagaagcagaccagattcgtcgcaataaaatgcgtgattttgttgaggccgtaaaagctaaaacggaagtgagtctgcctaaccagctggggcgctcaaccactgcaggcaatacaccgcaaacccgcgacgaaatgctgcaggaaatcgctaacgttcgccgtcagatggaacagaacaatgctggcgatgctactgcaagttatgacgctcaggttcagagaatccgggcctctatgaatggcggcgcagatagcggcagcgatactggtatgcagctggcatcagtgggtggtgcttccgtttcccgaaatgacatcaaccagttcggtaagaaagggcagggtgacagatggttactggatgaaaaagtttctgcaccacacagccagtatgaacttcgtgcgggctgggtcattcctggcgtcatgattagcggtattaactctgatcttccagggcagattgttggtcaggttgctcaggacgtttatgactcggcaacaggcaaataccttcttatccctcacggtactcgcgtgataggtacatattcaagcgatgttgcctatggtcaggaaggggtcatgattgcctggcaacgtctggtgttcccggacggaaaagctcttgatttaggctccatgccgggcgcagacatggcgggttattctggtttccgtgatcaggttaataaccattacttccgtatctttggtaatgctctgctgctgtctggtatcaccgcgacaattgcttattctcaggaccgcgaccagaacaataacaactcgaatcaggctccgaacatgagcagtgaaatgagtgcggcgctgggtcaggtattcggtcaggccattgcgcaggttgtacagaaaaacctgaatatcgcgcctacgctcgaaattcgtccgggttatcgcttcaatatcatggtcactaaagacctggcattcacaaagccttatcaggcatttgattactaa

SEQ ID NO: 99895 - DNA, 453 bp, Enterobacter aerogenes
atgaaagcagcaatgaaattaacctctgctatggtgctggccgcaagcctgttaatgactggctgtgtctcttcgggttatggcaactattcaaatgccagcatgttcgcctctacgagcatggcagataacaccgttgctcatctggcggcgctgtatcctccgggacgtactacgttcacgatgaaacagcctgccaaagatcagttcggttcggcacttgttcaacgtcttcggtcgcggggttatgccgttattgagttcacgaaagacggtaagccacagagcgccctggcaaattcagggaccactcttggttatgtcgtgaacaccgtcgcgcctaacctctaccaggtcacaacgtatgttggtggcgtcacgttaagccgtggtttcgctctggcaacagacggcaaagcatacccggcaggcccatggactcgcgaggaataa

SEQ ID NO: 99896 - DNA, 441 bp, Enterobacter aerogenes
atgcgtgttaaaaccagccgcaccaaatttatgccgtatgtgtcttttacctacccggaagacgcgcaggctaaatgggatgccattcggacgcgtgaagccaagcagctgcgtgacaacacaattcctcaaactggtgaatacctggggaatctggatttcaactacaaaatcagcggttctgctggctggaaaccggtacgtgtatataacgatggcgtcaaaaccattatccagttccctaaaacgatttcttctggcgaaaccccaatccttctggttgtgcgtaaagaaggcgggctgttctctaaagacgaaacgcagcaggtaaacctgcgtacccagggagacagaacgattgtcgatggcctgtttgacaaggcatatctggtaattggcgtcggttcgagccaggaaaaagtaactatcacaaggggctaa

SEQ ID NO: 99897 - DNA, 1500 bp, Enterobacter aerogenes; identical to SEQ ID NO: 34767

SEQ ID NO: 99898 - DNA, 756 bp, Enterobacter aerogenes; identical to SEQ ID NO: 13499

SEQ ID NO: 99899 - DNA, 327 bp, Enterobacter aerogenes; identical to SEQ ID NO: 5986

SEQ ID NO: 99900 - DNA, 327 bp, Enterobacter aerogenes; identical to SEQ ID NO: 5975

SEQ ID NO: 99901 - DNA, 1539 bp, Enterobacter aerogenes
atgaacagcttacttcctgacaatatcgatgaactgaaacgtctccttgccgaacaggaggcgctgaaccgtgcccttctggaaaagctgaacgagcgtgaacgcgaaatagatcacctgcaggcgcaactggataagctgcgccggatgaacttcggcagccgctccgaaaaagtctcccgccgtatcgcgcagatggaagccgaccttaagcagttgcagaaagaaagcgatacccttaccggccgggtggatgacccggccgtgcagcgcccgctgcggcagacccgtacccgcaaaccgttccctgaatcacttccccgtgacgaaaaacggctgctgccggcagcgtcatgctgcccggaatgtggtggtacgctgagttacctgggtgaagatgccgccgaacagctggagctgatgcgcagcgccttccgggttatccggacagtacgtgaaaagcatgcctgtactcagtgcgatgccatcgtgcaggcccccgcgccttcacggcccatcgagcggggtatcgcaggaccggggctgctggcccgcgtgctgagttcaaagtatgcagagcacaccccgctgtaccgccagtctgaaatatacggccgccagggtgtggagctgagccgctcactgctgtcgggctggatggatgcgtgttgccggctactgtcaccgctggaaggggcgcttcaggactatgtgctgactgacggtaagctccatgctgatgacacgcctgtcccggtgctgttgccaggtaataagaaaacgaagaccgggcggttatggacctacgttcgtgacgaccgtaacgccgggtcagagctggcgccggcagtgtggttcgcttacagcccggacagaaaaggtatccacccgcagagccatctcgctggcttcagcggtgttctgcaggcggatgcgtacgccgggttcaacgaactgtaccgcaatggacagataacggaagctgcctgctgggctcatgcccgccgcaagatccacgatgtgcacgttcgcaccccgtcagcgctgacggaggaagccctgaaacggatcggtgagttatatgccatcgaggcggaaataagggggatgccggcgaagcgacgccttgcagaacgtcagcaaaaagctaaaccgcggctgaaatccctggaaagctggctgcgtgaaaaggtgaaaacgctgtcgcgacactcagaactggcgaaagcgttcacgtacgtactgaaccagtggccggcgctggcttactatactgacgacggctgggccgaggcagataacaacatagctgagaatgcgctacggatggtcagcctgggccgcaaaaactacctgttcttcggttcggatcatggaggagagcggggagcgctgctgtacagcctgatcgggacatgcaaactgaacggagtggagccagaaagctacctccgttatgtccttgacgtcattgctgactggccgataaaccgggtcagcgagctactcccctggcgcgtagcactgccaactgaataa

SEQ ID NO: 99902 - DNA, 906 bp, Enterobacter aerogenes
gtgtctataataaaaagtttttcagtaggaaatggtgatatgtgttatataaagcataatagtgataatttcacaatcattgattgtaacattaatactggaaatgccaaaggcattatagaagaaataaaagagcaatcagctcaaaagagtataacgcgatttatttcaactcatcctgatgaagatcatttcgggggtattcatctgcttgatgatgaaataaaaatccataacttttatgtaataaaaaataaagcgataaaaaaagatattacagtttcatttgagagatactgttccttacgtgatgattgtgataaagctttttatatttctaaaggatgcacacgtaaatggatgaataaaagtgatgaaaaccgttcaagctcaggaataagtattctatggcctgaactaaataaccctttctttattgaggcgttaagtgcctgcgaaacaggtgaaagttataacaatgcctcagcagtaattagatatagcctcaataatggtgccagcataatgtggttaggagaccttgaaactgaatttatggaaaatattgccaatgacatacacttagaaaaaaccacaattgtttttgcagcacatcatggtagaaagtcaggaaaaataccagattcatggctgaaaaagttagatcctcaatatattattatcggagaagccccatctcgacatttaaattattataccggataccaaaaaataacccaaaacagagccggtgatattacaatgaaatgcatcgatgataaagttcatttttacgtatcgaatgcagcctatgaaaaagagtctttgagtgatgaacaagtatatgacgcatctctcgggtactacatcggctcacttacagtagaaaaagaatatacgttatag

SEQ ID NO: 99903 - DNA, 255 bp, Enterobacter aerogenes
atgattataaacggtaaaaaaataaaagcgaaagatttagcgaaattagcagaagtatcacgttcaactgttattaaatactatggtatttctcgtgaggattacttgaaagaggcatctaaaaaaagaagtctttcatttcagttgagatcgtccggtttgaaatggaaagaggtggctcaacagatgaatactacacagcacagtgcgattgggtattatagaagatatttagcatcacataaaaccgaataa

SEQ ID NO: 99904 - DNA, 861 bp, Enterobacter aerogenes
atgagaaaagaaatatataatgaggataaatacaagagccaaatacaaaaatatgctctatgctgtgatgattttaatgatggtgtatacaggaaaccgagagagaaagctaccttaaagaaatatataggatataacaataaatattttataaatggttttgtttttgatgtggatcatgaatatggggcaattgcgtgggatatggctggactgcctaaaccaaatgcgatcatacaaaatacaataaatggtcatgctcatttactttatgctctaaaaataccagtattaaaaacaaactcttcaaaaataaaaccactaagattagcttctgttgtgcagtgtggatttacagaaagattaaaagcagataaatcttacgctgatattctaatgaagaaccctcttaacatctttgaatggagaaccacgtggacagatattaaagcgtatgatctatactatttagctgattttgttcctgatgtaattagaaagaatgatagcaacaaaagaaatatatatggattagggcgcaatgttaatttattcgaagatctaagagtaattgcatataaaaatatactaaaatatcaagagagtaaaaatgagcatgaattttataattatttgtatttaacggctgatataattaacaaacagagcaactctaacaacccattatcacataatgaaattaggcaaatttgccaaagcgtttgtaagtggacgtggaaaaatttctcaaaaaaacagttttcaactattcaatctaaacgagggatgaataatgttggaaaaataaaaaatactgataccaaagaaaaattagaaaaagcattgaggatattattatga

SEQ ID NO: 99905 - DNA, 651 bp, Enterobacter aerogenes; identical to SEQ ID NO: 92116

SEQ ID NO: 99906 - DNA, 498 bp, Enterobacter aerogenes
atgtcaaagggtgtgatatttattaattcaattgtggtattgctattagtatttgttgtttataacattgtttttaattttggcgatgctaaattttcatttttgaacttactacggcaccggcgaagaacgttttctaccatttccgccattatattaggtggttgcgccatatttttatatggtggttttatcaactactctttttggatactcaaagagcaaacaatacgtacaaatattggacatgtacagatttataacagcacctactttgaaaccgctaacaaaaataagagtctgatatctgattatattacactgaaaaataaaattttgcagaacgccgatttttctgatgtgatttcaacaatctccggacaacttgagtttaccggaataatctcacattacgaaactgaaacatctaattatttttcagcacagggcgttgctgtaatgtatgttttattcacttcctgtagtagcgggagatga

SEQ ID NO: 99907 - DNA, 786 bp, Enterobacter aerogenes
atgtcccgtagcacgtggtattacaatatgaatgcactgaagcaaggggacaggtatgcgggtcttaaagagaacatcaggaagatataccactatcacaaaggtcgttatggctaccgcaggatcacgctcgcactgagaaaacaggggctgcggataaaccataaaacagtgcagcggctgatggcagaactgtcactccggtctgtgataagggcgaaaaaatatcgtgcctggaaagggagaacgggcgaggccgcgcccaatatcctgagccggaacttcggtgcgtcaaaagccaacgaaaaatgggtaacagatgtgacagagttcccggtacagggaaaaaagctttacctgtcgtcagttctcgatctgtttaaccgggaggttatcgcctacagcctgtcggaaaggccggtgatggagatggtgaatacgatgctggacggtgcgttcccgaagctcagaccgggagatgctccgctgctgcactcggatcagggctggcattacaggatgaggagctatcaggaacgtttaaaggcgcatgggatgacgcagagtatgtcgcgtaaaggaaactgcctggataatgcagtgatggaaaacttcttcgggaccctgaaatcggagtgtttttatctgagggagttcaggagtgtcagtgcgctaagaaaagccgtagaggactatatccattactacaacaacgagcggataagcctgaaattaaaaggcctgagtccggtagagtaccgaacccaggctctgagagccgcttaa

SEQ ID NO: 99908 - DNA, 522 bp, Enterobacter aerogenes
atggctaaaccaaagtattcccctgaaacaaaactggctgtggttaatcattatttgtccggtaaagacggagaacagagtacagccgacctttttggtattgaaagaacatctgtccgtcgctgggtcagggcatggcagttccacggtgcagaaggcctgactgcaaaaaataatcattattccgatgaatttaaactcgtggtcgtccgggcggttatcagtgaccgcctgacgatgcgtgaagcggctgcccggtttaatctctccgcagaaatacttgtccggcgctggctcgacgtgtacaacgatgccggagcggaaggtcttttaaacatgcaatgcggacggcccggacaaatgacaaagccaaaaaatatcccaccactgacagataaagagctggaaaaactctcccccgaagagctcagggccgaactgcgttatctgcgggcagagaatgcctatctaaaaaagttgaaagccttggttcagagcgaaaaaaatggcaaaaagccctga

SEQ ID NO: 99909 - DNA, 591 bp, Enterobacter aerogenes
atgccgcaactcatcccagatctcctgggtgttgttgtagtgcatcggatagcccatccgggtggcgatttcgctgataatctgccagtcggttttcaggtcccacttcggctccaccgctttaaagaagcgctggaagccgcggtccgctgcggtatacacgccttcgtgctcgccccacgaggtggacggcaggatgacgtcggccgcggcggcggttttggtcatgaaaatatcctggacgataaccagttccagctgttcaaacgccttgcgcaccgcggaaagctcggcatcggtctgcagcggatcctcgcccataatgtacgccgcgcggacttcgccgtgttcggcgcggtgcggcagctcgctgatgcgataaccggtatgttccggcaggctgtcgacgccccaggctctggcgaacttctcgcggttttccgggaacttaacgtactggtagcccggataggtatccggcagcgcgcccatatcgcaggcgccctggacgttgttctgcccgcgtaccgggttgacgccgacgctcggcttgccgaggttgccggtaaggatcgcgaggctggtcagtga

SEQ ID NO: 99910 - DNA, 405 bp, Enterobacter aerogenes; identical to SEQ ID NO: 6159

SEQ ID NO: 99911 - DNA, 456 bp, Enterobacter aerogenes
atgcacttcgaactgcgtccgggaaccgcggaaggcgtgatgcaaacaatgctggaggtcgatcgtcaaaaactgaattacatgaaccagatgccgacctggcgtcgctttagctggccggcggacaccgaagcgccgggggccagtttaagttggatcagcacccgggcgggaacacgccagtacgctgacctgaccggggcgtggggctggatccggttactggataaagccacggtgagagcttatccgggcacaggcagtagctggagcctgagctggaaagcgccggatggactgatgctgaactatacgctccgtaccgaagccggcgaggggccgctggcgctgttggcgctgcgcaactttaccctgccagagaccatttttatggtcagcgcagaaacgacagacagtgacctggagagtgaaagccgaggggaggatatttattaa

SEQ ID NO: 99912 - DNA, 1764 bp, Enterobacter aerogenes
atggaagatttaaccctacgctattttgacgctgaaatgcgttatctgcgcgaagcggcaaaagagttcgcccaaacgcaccccgatcgggcggcaatgttggatctcgacaaagccggtacgccggatccctacgtggagcggctgcttgaaggctttgcgttttcgatgggccgcctgcgtgaaaagatcgacgatgatctaccggagctcaccgaagggttggtcagtatgctgtggccacattacctgcgcactattccgtcattatcgatagtggctctcatgccggaacttacggcgatgaaaatggcggaaacggtacctgctggtcttgagataacgtcccgcccggtggggccgagaaataccctttgccgctaccgtaccactcgcgatgtgacgctgaatccgataacggtggcgaaaattgccatggtcagcgagccggacgggcgttcgctcctgaggattcgttttgcctgcagtggccaggctgactggtcccacgccgatctgcgccgcctgccgctttatctcggagaagacgctgtaaccggcagcgccctgcatttgtggcttaccaaacgccaggccgcgatgtatctgcgcctgccaacgcaagctgagcggataaagattaacggctatttctcaccgggtggattcggcgaggaggacggcctgtggccgaagggagagagtgcttttagcggttatcagctattgctggaatatttttccttccgcgaaaaatttatgtttgtccatctgcagggtctggacaattacacctttcctgctgggataactcattttgatatcgaggtggtgttcaaccaactttggcaaagcgatttacccataaccgaagactgcctacgcctgcactgcgtaccggtgattaacctgttcaccctggaagcggatccgttaactatcagcggcctggagagcgaatacctgctgcggccgaaacgtttgcaggacggacatactgagatttattccgttgatagcgtcaccggctcagggcgatcgggcgaggcgcgatatgtcccttttaccagtttccgacatcggggaggaatgatgcgccgccatgcgccggagcggtattaccatacacgcgtgaagcgcggcgtcagcggaatgcacgacacctggttaatcctgggcggccagcgctgggaagccgatcggggttttgaaagagaaaccgtatcgctacgtatcactggcaccaacgggcaattaccgcgccgggcgttgcaaagcaccgtgcttgaccgctgtgaccaggtttcagaaacgcagctgagcgtgcggaatctgtgtaagccgacgttgcctgcttatccgcccgcagaggatcgctttcactggcgggttatgagccatctgggtactcgttttttaaatatgatgagtaacgccgaggtacttcgcggcacgctgtcactctataactggcgtgacgatgagctgaattaccgccgtcttgaggcaatccagtcggtcaagcatcatcgtcttcagcgttttgaagatgggtttctgttacgagggttggaaattgaagtgaccctcgacagccgagggttcaccggcgaaggggatattcatctgttcggcgaaatgctgaatcgcttttttgccctctatgccgatatgaatcaattcaaccagcttacgcttattgttcagccagaagggaaatatattcggtggaaagagaatcacaatccgcgcctgcccggttga

SEQ ID NO: 99913 - DNA, 375 bp, Enterobacter aerogenes
atgagaattgtcacaaacctaatcgtattagctgttgtaattctttttatttatatttttgcgtctcttctcattcgcgatttcaaaaataagaaattgaaagaaggcattcagacggatggtgtaagtgttctgggaactattactggtgttcgtagccgctcaggtggtaactcagggtttattaacattacagttaagttcaattatgtcatcgagaatggtacaatattagagggagaggctgataccgttattgatgcaatgaaaataaatgattttcagcccggggaaaagataccgttgagttattcgaaaaaagaacctcataaatacatcctgactatccctaaacccaatctaagacgtaagtaa

SEQ ID NO: 99914 - DNA, 786 bp, Enterobacter aerogenes
atggcagacaatacaccggtcacgggtagctatatttctaaccaggaattccaggcgagggttgcaatcggaaagcatgtcctttatttctctctgattattatatgtttattgggttgcatttcgcttattgttgtactctcaggtagtgatactggtcaaaataaatttggttatgtcaaagatatacttacgattattttgcctcttattggaacgtgggtcggtaccgttctggcattttatttctctcgagaaaattacgcgatggcagcacaacaagcagccagtctggttagtcaattaaccccagaacagcgacttcagagcattccagtctttgatgtgatgatagatatgttttccagcacaactttgaaattggctttacccccgggtaataatcttagcctaataaacctcaagacgaatgtaatagacttgatggaacaaggcaatcgaaaccgattgccaataattgatgcttcagggaaggttctgtatatcatccatcaaagttacattgataaattcctggttaaacagcccgttgggacacaggcaattaatttgaccttaaatgatctgttgaatgataaagctttatcaaaaatcttccagacattcgcaattgttggtaaaaacgcacgattaattgttgtcaagaatctacttgatggaaatcctgattgttctgatgcttttgtcacagaagatggaacaagtggctcaaaagcagttggctggataacgaatgtcattgttcaggagaagtctacagcatag

SEQ ID NO: 99915 - DNA, 777 bp, Enterobacter aerogenes
atgcaacctaaccaatattcaaaagctatccagactgagttggattatcctggtcctctgactataggaagtaaaggagtcgaagtaaaacgagtccaggaatggctctgtcatcataatgttgggacaaaaatcgatagtgatttcggttcagccacagctagttgtgttgagcattttcaggcgttcaaacatttaccacaaaccgggaaagtagatcaggcaacgtgggaaaaactagtgtcccccctcatggctgctcttgtagatagtgtcgggccgacacttgttgaacgaatccacaatgttgctaagcagcatctgaacaatcatcccagagaatatggtggcgataataaaggtccgtgggttcgggtatataccggaggatacgatggggctggctggttgtggtgtgcaggttttgtaagttttattattaaacaggcctgcatagaaatgaaattgccatcacccatttcgggatcgctatcatgtaatgtccttgcatcccaagcgcaatcggtcggtcgtctggttagaggagaagatttgctatctggtaagacttcctgggaatcacttggtcaaacctacattttcctggttcggcgtgcagtgggtgactatagccatacggggtttggttttggcggaacatccggtgctttccagactatcgaaggtaatactaatgatgatggaagtaaaaatggctatgaagttaccggcagaatacgttccgcaaatagtaaggattttatcaggatactttag

SEQ ID NO: 99916 - DNA, 417 bp, Enterobacter aerogenes
gtgaagaaagacgaagataaggatggttggccggaattctatccttctgacctggtgcttcctcccaaggatgcgacagatgtaaatacagaagggatggtttaccgactggtcaaaacgattccaccaacggagatgtgctttctggctactcatcaagagcagccaaacaggtacaaaaaatgcactacgttggagcaaaaacaagctgtttacggtaccagcgtgtgggatagtaaagatttattgattgaggctatggcctctttgcctgaagcgttaaaacagcgcaagctcgcttgtggtaagttaaatgccggtatgggtaagatgcgtaaaacgcttgctgtaggacatttcacactttggcttaaaaagaataaccgcgttcacctgaattttagtgaggtgaaataa

SEQ ID NO: 99917 - DNA, 1308 bp, Enterobacter aerogenes
atggatatatttgccagttaccctccattaggtcaactcagaatagttaatgtctatcttgaatttgaggggccaaaaattttctatgctgaaaatgaaagtggttcaactttcttcgtttattgggttggggatgatgcagactacgaacattggtatgtcttaccgtgttctaaagccagactcattgcttatgagaaagcaaaaatcagcttgcgagatatgctcgaataccaagagcaggaatatttctgcgcgctctctcttccatttttagcggaaattaaattaattgcagagttcaaacataaaaataaaatagcggaaatttcgctcccagttccgggtatttttgttaagagagtcgtagcctatgctcctagtttactgaataacaatcttattcccacgcatgagattatcgtctcaaaagcaagtaagcaggcgaagaaaaacgtttctcttgaacacatgagccaagtatgtgaccgctttagtgagttggttttaggattcaacaaagcaagaggtgtaacagggggcatgcaggctctaaatgcacgctatggctcttttgctatttcactgcatgccgaagaactcacaaaattcgaaacgttcctaggtcaagtatccacgctcatggtgaataaaaaggatattcttccaatattagagcaaaacgacattgatattaaagtttttctcaatctattgaaaataatagatttatcaaaaatagattttgagttccgctcgtccgccttaccggatcaaattattaagatctatagacttgatgcattgttatatttgtctaaacttaaaagacgtgcattaacttatgtttcatctataaaagtgcctcaaggaaatgatattgaaaaggtatttcagtatgtagaactgaaatggaaacatgaaccgatcactgctgagaatctgaaggtgcaatctcgtttagtggagtattatcgttatgctgcgcttattttgggtttcttggaatacaatggcgaattgacgcctcaaggtgagcgtttagcgctatctgatgaagcaactcgttatcggattactgcatatgcctttgaggctagcgagtgcgcttgggcatggatgaattattgtgatattacaagtcttgcagatattgacgttagtacagcaatagactttttaactcaatgttgtccatctctttctggagatacgatttctcggcgagccaatacactaaaatcttggtgtaaacagcttaagccccattatattaatttggggctaagtgtgcagggaaaaagttga

SEQ ID NO: 99918 - DNA, 522 bp, Enterobacter aerogenes
gtgagcaatgaactgaaagaaacgagtataaacggatggcgactttttctctctttgcttctctttatctggatcatggcttgtactttaatcaccatcaggtatcttttgcttgcatggtcgggaaattacacttttctgcgcttcttacttcaaccgacgggcgagtttgtagtcagtgatgaaatcaggttggcaacattcaccgttgcaggagctttgcttgggggagcaacgctaagtataacctctctgcacagatactcagcggtgaccaaaacattggatgtagatcatttgtggggctatctcatggcgcctgtactatcagtcgttattggcttacttatcttctgtttgctttacagcggattgatggtcttgaacggcggaactagtattagttccgaattatctagtgtcaggattgggtacctttctctaggagcaatctgttcttataactgggatgtattcgtgcttaaactgcaaaagttgtcaaagcatgtcactaatgagtaa

SEQ ID NO: 99919 - DNA, 546 bp, Enterobacter aerogenes
atggcggcgcgttgcgccttatccgggctacccaacgctcagaaccgtagctctgctaagcgcagcgcgagcagggaatacccccggatggcggcgcgttgcgccttatccgggctacccaacgctcagaaccgtagctctgctaagcgcagcgcgagcagggaatacccccggatggcggcgcgttgcgccttatccgggctacccaacgctcagaaccgtagccctgctaagcgcagcgcgagcagggaatatccccgaatggcggcgcgttgcgccttatccgggctacccaacgcccggaaccgtagccctgctaagcgcagcgcgagcagggaatatccccgaatggcggcgcgttgcgccttatccgggctacccaacgctcagaaccgtagccctgctaagcgcagcgcgagcagggaatacccccggatagcggcgcgttgcgccttatccgggctacccaacgatctggaaccgtgctgcgcaagcagggaatatcgcttcaacattactttttacgcaataaccgcagagcgttag

SEQ ID NO: 99920 - DNA, 390 bp, Enterobacter aerogenes
atgaaaaatatatcgcggtacggtcttattatcggtttattattaggcggttgttcgagccaggctgtgtaccatgaccgtgcagcgtcaaccaccgatgtcgccacccgctggggcagcgacgttcactcaacggttaaaggcgtgtccgcagaacgccaggattcccatcctgacgaaattgtattgattaattattccggtcaagatcataccggtttcgaccagctgtatagcattcgaattagcgatctggaatatgcggtacgtgatgctaattttaactctctccctattactcgcagctataataattccaccggaaaatggcaatacgctatggtacaaaccggaaacataggtaacactttagaccggacacatgggtaa

SEQ ID NO: 99921 - DNA, 672 bp, Enterobacter aerogenes
atggtaatcgatactataacgaaagaacaagggcgttattacagtttccattcacaattacggccgggtgaatatttcgagtttcgaccccgtaatacaccgctaaattctaagcctatcgtcgatgacgaaattggtatgtgtattggctattccgtgatgcaagctacgggtttatggcaaatatatgatacgcaaggtatatttattcgtcttgaagaggcgccattagagaaaccattaatagatccaacagacctaattttgctggggcttggtgtttttcgtcttttacgcacaggtcagtcattgctacaaagcggtgtaaggactgcggtgcgagtcaagctgagtgaagctactgttagccttttgcgcggtagattgaaagttggtttatctccgcgcgctttaaagatgacagaaacgtcagcgcggcatatgttaaatccgggccgttatgtgcctttacaaattcaggagaaggtcattcgttatggtagacggatgcctgatccccgtaatgttagaggcctatatcgctatgaatcagagatatataaattagttgaaaataaagctgtaaaaggtactttcttatataagaaatatactattgagatagtcgttagagaacaggattggactataactcattttttgtacaaataa

SEQ ID NO: 99922 - DNA, 723 bp, Enterobacter aerogenes
atgaactggatgttcataacagagttatataacaaaataagcggtacttttactatcaggacggtccaacttatccgtcgatttattttcgccgcttgcatgttgcttaccgcctgcgtgacattaatcttttacgccgacatgctcattatcaaaacaacacaacatcttatctggaacgatatcaacacgcttccctacaataatgttggattagttctcggcgccaagcctggcaataaattctttgttcgccgtattaataccgcagccgcgctgtaccatgccggaaaagtaaagtggctactggtcagcggcgacaatagcaaaaaaaattatgacgaaccctcggcgatgcagcaggcgctcatccatcaaggggtgcctgaagaagcgattttctgcgattacgcaggtttctcgacgctagactcggtagtgcgcgcgcaaaaagtttttggcataaccgatatgactattatttcccagggcttccataacccgcgggcgctgtggctggccagggaatatggtattcgcgctattgccgttaatgctcccgatatcccccaaaaagcgcgaatattcacgcattttagagaaaaactagcccgagttagcgcagttatcgatgcaaagatattacatcgacaacctaaatatctgggttcagtagttagcataggtcaagaggttcagcgaggatgccccaccaagaactag

SEQ ID NO: 99923 - DNA, 1095 bp, Enterobacter aerogenes
atgaacagcaagcaagaaatattatcaatacattatcttcgcggcatagcagcattattagtcgtactacttcacatttcctggtatatgggtgatgaatgggggcatttattcgatgccggaaggattggtgtggatatattttttataattagtgggtttattattgcctatgctacaagacatggtaatgaaaatacggttttattcctggggaaaagacttgttcgaatttacccttgcctttttattgtttgggtattctattgcgttaccgtttttcgcgacgctaacctatcgaccatgattaaatcattacttctgtttcataaaaattactccgcccctgctcctgcgtatgactttaacctgatggggactccatggacgttaacctatgaaatttatttttatattgtattttcagtagctatgaaagtatcgcataaatacagatccgtgctatgctccctgttcttaatagcattaacagtcatatctcaaatcacatataatggcacttttgagttcaaccgatatgtgtctgcaaatatattagtacaacattggtatcaggttccgctcaaaattattagtaccacaatcacatgggaattcattgctgggatggctcttttcgaactgagaggatggcttgtaaaatatagaagcaaactcgtggaacaagccttaattatattatcaataatatatttgacgatgttatatgtcaatggtggtcatggcttaatattcaagactggtattttttacggggcatttttaatattcttcacagcattatactttgaagccgggaatgcaatattcaaaaataagttcctgcatttcctgggcaatatttcatattcgatgtatctgattcattatgcaattaaccagtacatcagaattcataccaactggatttggagtgatatcccaggggttataaaagtcgcggctatactcagcctgactttcgtcttctcttatttatcatatcgactcatagaattacccgcgatgaaagtgtttaaatactatataaaaagacattctgttaaagcgcatgagacaaaattggccgtataa

SEQ ID NO: 99924 - DNA, 183 bp, Enterobacter aerogenes
atgtacctactcggcaacttaatagtaattatatggtttttctatagtttagtaggcggtagctttgccgctgtatttatttggcttttctacaaaagaatcaatacattcagccgttttatagcactgtggtttagttgtatagccctcattttcattataatgatttttcgtatattataa

SEQ ID NO: 99925 - DNA, 573 bp, Enterobacter aerogenes
atgccaagagcgaatgaaattaaaaaaggtatggtgctgaattacaacggcaaactgctgattgttaaaaatattgatattcagtcgccaagcgcccgtggcgcagcaacgctgtacaaaatgcgtttttccgacgtgcgtaccagcctgaaagtagaagagcgttttaagggcgacgacatcgtcgataccgtgaccctgacccgtcgtttcgttgacttctcctacgtcgatggcaacgaatacgtgttcatggataaagaagactataccccgtataccttcaccaaagagcagatcgaagaagagctgcagtttatccctgaaggcggcatgccggatatgcaggttctgacctgggatggccagctgttggcgctggaactgccgcagaccgttgacctggaaatcgtagaaaccgcgccgggcattaaaggcgcctccgccagctcgcgcaccaaaccggccaccatgagcaccgggctggtgattcaggttccggaatacctgaccagcggcgagaaaatccgcattcatatcgaagagtgccgctatatgggccgcgcggactaa

SEQ ID NO: 99926 - DNA, 1686 bp, Enterobacter aerogenes
atgaaaattaaaggattagcagggttaatggcgctggtcgcggcgctgtacgtagcgcaggcgggggcggcgacgaaagttgtccagggggcgaagtccaacggttttgtctacattgaagaccagatcgatggcggtttttttgtgtctcctgatggaacgggagaggcagtaatcggcggcaccaaccactatatcaataccctgaattacgataacggcggcgatgtatctctccaggattcattgggctatatcagtaccaataataaattggatccagcgctgtcagttttaagcgatatgtggctggataactcgccggtagcctatccactgcagggtttcatttgctcgttctggtttaatggttgtgaaagcatttccgtgctccaggggcaggtaacggatgctcgggggttttatggcgcagaggggagaaagggaagttggaattatgcctttgatggcgccatgtcggatgcgttttattctcacctgcagcagatgggagtaaacagcagctttaccgtgacaatcaatgagtgtgcttcatcgtatcatgaatatgatgccagtaagggcgaacgctgcacggatcagagcgacgccacctggtacgcaacggatgtgacctacactaaaagcgggcacctgcggttaattaataccaacgccatggatgaagtcttcatcaacagcgatggcgttcccacccccggcgaaggtaataccaactgctgggtgcaaaccgtcaacggtaaaaacggtcttgcctgtaagatggtgaactacagcctgcagagtaccggttcaggggataaaattcgtatcgctccggtgattaataatctggcattgcaaacatcaacggcggtaggcgatatgcaattcagccttgatggcaatagctggaaagccgtagataccacccgcccgacgaaagggatctatttttcaaactcggcttacttttacaccctcaatgaaatggcctcttccggcacaatctacgtattcttttcgcagacgtttttcaagcagatggttgcctctggtatcagcgatattaatagccacgatatgctctattttcgcattatgagtatccaaaattcctacatggaagcgggaaaagccttcgacttcaactcctccaattcactggagataaaaccccgcgaattcagcatcaatatctcctctgaagactacagcgacgccccgtcgcgcgaaggctacgttggccgtgatgaaccctcgctcgactttaactatatcgtcaccaccagcggtaagaccgccgccgatgaggtgctgattaaagctaccggcccgacgcagcaaattaacggccgcgcctactgtatcttcagcaccgacgacagcaccatcaaggttcccttcccggccacgctttccttcaccaaacaggatggcagcatcaagacctatgacgcgggctgcgacggcagctggcgcgatatgaccgatgcgctgtggctcacttcggcatggaccgatatctccggcgaacccggcgtcatggaaaaagccacggtgaagttttcgattcccatgaatgatgatatttcgcagaaaacgctggataacaacgagtggtacggcgacgtcagcgcctccggagaaattcacgttcaggccacctggcgcgatattaattaa

SEQ ID NO: 99927 - DNA, 2538 bp, Enterobacter aerogenes
atgtcctcattatggaatcgtcatggacgtcgtgtattaatcacgtccggaattgtcgtgttttcgtctccctgtttcgttatggctgacgcagaaaaaatatcgcagattggcggcgttattattccccaaacgtttcgcgtggcgctgcaagacggcatgagcctgccgctgtttattcacttcgaaggcaatagtggaacgcaggacgaccagcgcatcggtagcgcttttatctggctggataacggtaaggtgcgcctacgacaaatccgtctggaagataaagagcaaaacgccaccgtcagcgatcagatcaggcaaacgctgacgcaaatggcggatgaaccctttaacaaatcgctgagcatcccgctgtccgccgacgctaagcttcagttcgacctgcgcaggctactgctgcagttggtggttaaaaaaggggcgcttggcaccgtgctgcgctcgcgtagcgaagatatcggccagtccagcgtggaaggcctgagcagtagcctcacctacaacctcggggtctacaacaaccagatgagcagcggcggcgacagcacctccagctatctgtcattgaacaacgttatcgcattgcgcgaacaccatctggtactggacggttcgatatacggcgccgggaccagcaatcagaatcagcagttgtataaagcaatgtacgagcgagatttcgctggccaccgttttgccggcggtatgctcgacacctggaatttacagtcgctcggcccaatgaccgccatttccgcgggtaaaatatatggcgcctcctgggggaaccaggccagctctacggtatttgataacagccagtcggtcaccccgattgtcgcctttttatccgccgccggtgaagtacacctgaagcgcgatggacgactgctcagcgtgcagaacttcgcgatgggtaaccacgaagtcgatacccgcgggctgccctacgggatctacgatattgaagttgaagtcatcattaacggccgctcggtcagcaaacgcacgcagcgagtcaacaaattgttctcccgcgggcgcggcgcgggcgcgccgctggcctggcaggtatggggcggcagcttccatatggaccgctggtcgcaaagcggcagaaaaacacaagaggcgaaagatacctggctggctggcgtgtcttcctccggcgctatcagcaccctcagctggtccgcgaccggttatggctacgacaccagcgcggtggccgaagcgcgctttaccctgccgctaaccaacgccattaacgtcaatttgcaaaatatggcggccagcgacggctcatggagcaccatcagcagcgtaagcgctacgctgccgggcggtttcagctccgtatgggttaaccaggagaaaacctcgattggcgacacgctgcgccgtagcgatgccgataaccgggccattggcggctcgttaaaccttggttcgctgtggtcaaaactgggtactttcagcatcagctacaacgacgaccgagaaaacaacagccactactataccgcggattactatcagactatctatagcgggtcattcggctctctgggtttgcgcgccgggatccagcgttttaacaactcgggaagcagcagcaatagcggcagcgataccgggaaatatatcgcccttgacctgtcgctgccgctcggcaactggctcagcgccggtatgtcgcaccagaacggctattcaacggctaacctctccgcgcgtaagcgctttaaagaaggcccaattcgtaccatcggcgccaatatgtcgcgggcggtttccggcaataccggcgatgacaaaaccctcagcggcggcgcctatgcgcagttcgaaacccgctatgccaacggcacgctgaacgtcaacagcggcgccgatggctatgtgaataccaacctgagcgccagcggcagcgtcggctggcagggaaaacatatcgccgccagcggccgcaccgacggcaacgccggggtgattttccataccggtctggaggatgacggtcagctgagcgccaaggttaatggccgcatcgtgcagctctccggcaatcgcaactatctgccgctgtcgccgtacaaccgttatgaagtggaactgcagaacagcaaaaactcgctggacagctacgacatcgtcagcggacgtaaaagccgcctcacgctctatccgggcaacgtggcggtgctggagccggaagtgaagcagatggtcacggtgtccgggcgcatccgcgccgaggacggcagcctgctggcgaatgcccacatcagcaaccatatcgggcgtacccgcaccgacgataacggcgagtttgtgatggatgttgataaaaaattcccggtcatcgacttcaactacggcaaaggacagagctgcgaagtggcgctggatctgaaccaggcgcgcggcgcggtatgggttggcgacgtggtgtgcagcggcctgcagagctatgcgggcgtgcaggggaaggaagatggtcatgaaagctaa

SEQ ID NO: 99928 - DNA, 234 bp, Enterobacter aerogenes
atgccgtgtcaatttataagcactgggggaaaaaccgacggggagatgctggcggaggcgacgattatcacctgctatgctggcatgactgtggaaagtttgcccgttccttccagcaactctataccaatgacaatcttgccgcggctgtcgaaggcgctgtttccgcgcattaatattccgttgtgctgggatgacgatgaaggtaatgaacggttcaatcagctgtcgtga

SEQ ID NO: 99929 - DNA, 483 bp, Enterobacter aerogenes
atggctattcccggtaatatgtggctctatgacgatggcggagcactaatcaaaggtggctgtgatgttgcagacagggagttcagtatagagtttaaagggtttcaccataatctctccattcccactgataattccactggcaaacctactggcactcgtcagcattctccaatgatcatcgttaaagaattcgactattccagcccatacctatacaaagcagttgctactggtcaaaacctgaaatctgccgaaattaaatggtacaaaatcaacgattctggtcaggaagtggaatacttcaatatgctacttgaaggagttcgaatcgtatcaatctcccctacgatggcttccccagaggacaagaacaacaaccatcttgaatctgtggagctaagatacgagaaaatcacctggaaacattgtgatggaaacataattttcacagatgcctggaatgaacgacaaacagcctaa

SEQ ID NO: 99930 - DNA, 171 bp, Enterobacter aerogenes
atgagcacaatcgacaatttagacgcccataccccgatgatgcagcagtaccatttttcagtgattaaattgttgaaactgagaaataaaaaaaccacacattggttatttactcaccttcactcaatagataaactatttacagggatttataaaaacataaggaaataa

SEQ ID NO: 99931 - DNA, 825 bp, Enterobacter aerogenes
atgaataatggattatatattgtaatgtcgccagttcagttggcggcagtaatgtctgataaaacagtaacagaagcggagacactacaaaacagattgctaggtgggctcgatgtagcaatgagtactgttgaattagccggagctacgattttatgcgcggctcctgacccaactatgttgaccaaagcggcctgtgtcgtcgttggcgcccatggactcgatagccttcatgcatcaattgaccaaatcatcacaggccgtgatacccgtacagcggcttaccagttagctgttgaaactgcgcgtcagttcggcgccgacgaaaagacagcaatgagcattggcctgaccgtagatattgctgccccggctgcatttggcctcgctttaggcgctgctcgtgttgcttatgtccgcgcaggaaattttagaatcatagagcatgaagccgtacgcccagtaaaaattggcggtcacacgctatccaaacacgtatcgatttcagaaaaagagttactggaacgtctggcgcgaagccctcagatgaggtctgtatcatcattttattctgtacaacatgcggaaaaggctatcagtagcgcattaaaagccaataaactcaaagtagtatattgggcaaattcaggcgcaggttctcgtccacttgaattgacctataaaaccggtagtgcaattggatacgggttccggcaaggactaaatgtcaaagaaaccagttatactgtccgtgtagtgttactgaaacaagtttatcaggggaaaccgtactatgttctcacgtcttacccgtatatgggataa

SEQ ID NO: 99932 - DNA, 1002 bp, Enterobacter aerogenes
atggatattcgcacacgaaagacaaatttcttagagtcgttagattcaactgaaaccatatgcaaagcagtaagtctcgctatagattgcatgattgataatcttaataataatgaggatacccccttagttgttaccagctatgatgacctctgtaggtgccaggtactagattatgtacaggaattttgcgaagctgcattccccgacattgagaaagactactttaatcctagcatacttaacattaatgggaggactagtgaagaagcctgtattaacttaattaaactcttaagaagtacaaaatgcatactattctggtcagatactccatcgtggttcgctagcctccccgacggattattccatgttgttaacattgatcaaaaaaccgttactcgcggccttaataagaaaaattctaagccgacaataatcaataaagagtacagcgtagatacactactatcagagctatttttgaatggcgccaatatggagaaaaccaacgtagacaacatttctgaggcagacatgaagttctatgatgaatgccaagctagattaatcagaccaatacccgctccagtaggcgcgtcatatgatgaagagatcacaattaaatctccagattggcagaaactcgcgtgtgtagctttacgccgctatcagtcaaaggaatgccatgacggaatgtcatgggatacaacctatcacggttggattaatgtaatcgcgtatccattcatcgacgaaataccatcaattgataatagcggtaatcgacaatgtttagttggcctagtcacaataaacaattcaaatgcaaattcgccgtacctatctaccgtttggatacatccattttatcgcaggggagggttattaagaaaattatggccaaaattacaagagcgatatggaagtaacttcgaaattgagcaacctaatgaaaatatgaaagcatttttgaaaagtgtgaaacacgcagattactaa

SEQ ID NO: 99933 - DNA, 2919 bp, Enterobacter aerogenes
atgcagtggaattttaaagtaccggttctgatgctcaggctggcaaaaaatcaaaataaatggatcgatatggaaatgacagacagcgtactgactggaaagagcgatggaaaaatcatcatcaacttgtttgcgcccaatcttccgggcagtaccaaagaaaatgatctcattcagaaatctctgcgtgatcagctggtcgagagtatccgaaactcggttacccctactgacacagataagttagctgggctaacacggtttattgatgagtccggacgtaatatattttttgtggatggtactcgcggtgcgggtaaaaccacttttatcaatagtgtggtcaagtctctgaacagtgacaaaggtgatgtcaaagtcagcatcaagtgtttgccgaccatcgacccgaccaagttgccgcgtcatgaacccattttggtcactgtgactgcccgtctgaataaaatggtgtccgacaagttaaaaggatgttggtcgtcgaatgaccataaaaaacaaaaagaacaatggcagaatcaccttgcgcagctccagcgtggtttacatctgctcacagacaaggaatataagccggaatatttcagtgatgctttgaagctggatgcccagcttgattactccattggtggccaggatttgtcagaaatctttgagaagctggttgaacgtgcttgtgaaattctcggctgcaaggccattttgatctcgtttgatgatattgatactcagtttgaagcggggtgggatgtacttgaatctattcgtaaattctttaatagccagaaattgttggtggtggcgacaggtgacttgcgcctatattcgcaattgattcgcggtaagcaatacgaaaattacagcaaaactttgctcgatcaggaaaaagagagcgcccgcttagcagagcggggctatatggttgaacaccttgagcagcaatatttattaaaactttttccggtacaaaagcgtattcagctgaaaaccatgttgcaactggtcggcgaaaagggaaaagtcggtaaagagaagatcaaggtgaaaaccgagtttgacatgcaggatattgatgccatagatgtccggcaagctgttggcgatgctgttagggaaggccttaatttgagagagggctctgatgcagacatgtatgtgaatgaactactgaagcagccagtgcggttgttaatgcaggtgcttcaggatttctataccaaaaaatatcatgctaaatcggtaaaacatgatggtaaacaaggcagccatgaaaggcctgatgagttatcagttccgaatttacttagaaatgccttatatggttcgatgctaagcagcatttatcgcgctgggttaaattatgaacaacatcggtttggtatggattcgctctgtaaggatatatttacctatgtaaagcaggatcgtgattttaataccggattttatttgcggcctcagtctgaaagtgaagcattaagaaattgctctatttatttagcgtctcaggtaagtgaaaactgtcaaggcagtctgtcaaagttcctacagatgcttttggttggttgtggttccgtcagcatatttaaccaatttgtgaccgagttagcacaggctgacaatgatagagaaaaattcgaacagcttgttagtgaatatgtagcttatatgtctgttggcagaaatgaaagcgcctcacattgggctaatcgatgttgtgcggtggttgcaaacaaccctaatgatgaaaaggttggcgtttttcttggcatggtgcagttaaatcgtaaatcacgccaaaacatgcccgagggttacaaaaaatttaacattgatactgagaatggtttggcaaaagccgcaatggcggcttccttgagtacggtagcttcaaataaccttatggatttcagtagtgtttttaatctgattggtgctattgcagatatctctacatgccgtcgtgaaaagcctgccattactaatgcttttaataaagttatagctcagacaacatgtatcgttcccccatggagcgaggctgctgctcgtgcagaaatgaaaggctcaagtataagtgcggataacgatgctgctattttggatgttgatcttgatcccaaggatgatggcataactgatgacagtcagcaggatgacacaacggaattttctgatgccattactaaagttgagcaatggcttaaaaaagtaaacgaaattgagattgaaattcgtccgtcggcacttttgattggtaaagtatggactcggttctatttcaaccttaataatgtggctgatcaacataaaaccaggctctataatgatgcagagcatggactaatggccagtcaatcaaatgctgcgaaaattatgcgttttaatgttttggcttttcttcatgcggtattggttgaagagagtttatatcattctgttagtgatagggaatatatcggtgaagggttaagactaaatccagttacttcggttgatgagtttgagaaaaagataaatgtaatgaacgaaggattgaaaacggataagaaaacatggaaagatacccatccattgtttttcttattaattagctgtccaattctacatccgttcatttttcctgtaggagggattaattgttcagcaaaagcactgagcaaggaagcaaatttccttaaactgattggtgagattgttggcgacaaattactttctgaagaagaatgggagtatttatctgaaaatgataatagcaaaagaaacattaaacaacagacatttcaaaacactataacatcactgaattccgccacaatcgtcggagcatcatacaataaggctacgccaactaggaaaagcaggttgctttcattaagtgacgacgtagaaaaataa

SEQ ID NO: 99934 - DNA, 2400 bp, Enterobacter aerogenes
atggaaaggtttcttcttaactcaacagtactgttgcataggttgagtaccatctctttggatgaggtattacttgatgagcgggtggagtcatctgtgttccttgctcaatacgaacgggggcgtagtttgcctgatcatgtcgccaaatcggcttggtcatctttagtgcaacaaatcaaacagcggaatatgaaactcggcccagtagcaaccttgcgccagatagctgaaaagtttattaaaaacgagaaaggtggccccaaaatcgacctacctttgttctcggaatggcaaacgctgatgagccgagtgtcgtgcctgccaattatggcgtgtcatcaggtatttaactcttggcctgccagtcaggaatatagctttcgatgtcctttgtatccatatcacccgacggttgaggactacattacccgtgaacacctacacgaaactcaccaacatctgaatggcagtaccagtgcggaagagtgttggctggatgcactcaagcacccagaagtgagcgtcagagatttcgagaagggctgggcatctcaagagatgaaacaactttgcgctcagattgacccctctctgacgcctgaaatcttcaaggatcgtttgcagatcgccagcaatattcgcgaaattctttgtcgggtctctcagggtgtggagttgccagagtggatcgtatcagtgcagaacccgcagcagttggcggatagtaccattctccataatggccaggagtatgggtttgcgacggtttggccaactgacgacaaatacagtcaggagtctgaattttgctggctaatcggcttgttcgaaaaatggcggaatgatacgcctgaaggattggaacgactgctttggatttaccttctgattcaaaatcagtacctgaccttactggttcagcgagacgattttttcggttttgatcagttccagaattacaccatgacagagctgagggaggaaaccgagaaatcttatttgtctcgttttaaacatgcccatggtactggtgcgtattctcaggtgcgttatctggaaggacgttttgctccgaagagcgatcccagcaaaatgcaaaaactgctcttcagtatgttaagagggtattgggaatacctgagtgctcatatgtctctggaatgggtgcatgataagccgctgactatgtcgcaagtgctcgataatctcgaactggttgaacctcatggcaagtgtgcagaactggcgctagtgccccactttatcaaaagaaagccaaaaaatggagaggtctatccttacgcattactattcaaggacctgaagaatcaggcagctattctgatggacatgctgaagtatgagccgcgcctgacaggctggattcgaggagtggatgccgcagctaatgagatgcacgcgccaccggagttgtttggccccttgttccgggtgctagccaaatcaggtattgctcattttacctatcatgttggcgaggactttccgcatctgatcagtggtattcgatccattgatgatgccttgaggtttttgccattgcgtaatggcgaccgtcttggtcactgcacggcgattggcatcacacctgacatctggaaacgctctttgccattgtctttgtccatgaccaaagagacgcgattgctcgatttggtgtttatctggcgggaacttcgaagtcatccggaacttctgcgttacgccagtgatgcagcgattgaagctgttcgtttggcccataaggtgttttcactggaagaagaagtctcgattaccacccttgatcaggtatttgaaatgcggggaatgttggcggaatcggaaggcctgctgggtgagctaaatgggtcattaaaacccaaatccctctggttggaagagtacgagcgcgccagagagttggctaaaacggcgggcatgaaaaggccgctgaagttgtataagcaatggcttacatctgacaatgtgagaaagcagcgtgctgaatatgttgaagttgccctggaatatttgccggatgaagcggttgttgcattacaacaagctgtaatggcaaaaatggcagaccgaaacattgcgatagaatgccctccgaccagcaatacccgtatcagtcagtatcgagatgtcagcgagcatcatatctttcgctggatgggcttgcggggggaggcgattgaaggtgatgttcctatgtctatttgtttgggatctgatgatccggggatcttcgctgcggatttgaaatccgagttctatcatctgttcgttgtgttaacccgaaagttcggtttgtcgcctgcggaggctttgagaaaggtggcagaggtgaacgagaatgggcggatttatcgctttcatgatgtcagctag

SEQ ID NO: 99935 - DNA, 1146 bp, Enterobacter aerogenes
atgtatcccgcaagggatggggatgctttgctcattatctgtcatcagggaaaatgcggatttttcatcgacggcggttatgcagaaacctacaggcaatacatccagcctgatctcagagcattgagtcttaaggggtaccggttacgccttgtcatggcaacgcatattgacgctgatcacatcggcggtctcattgacttttttatcgacaatggccaagcatcacatccgtctgttattccggttgatgcggtatggcacaatagtctcagggcgatgactacgtctcatgaaaatgcatcagacgcagaaaacggcaaaatcgcggattttttaaaacggcaataccacctcgctgaaaagtcaggcagacccactgaaattagcgctcgtcagggaagttcgctcgcagccacattgctggccggcggctatcactggaatgaaggaactggatttcaaaagatctgctcctcaaggacaactgtccccccgttaaacgtaaacagttttcagatcctgagcccctcagaggaacggctctctgcactctgtttgtggtggcgccgtaaactggtatcactgggtttttctggccagtattccgcaaacggggcatttgatgatgcatttgagttcctttgcaaagaggatgcttcgcggccacctcctcctcatgtgataagcgctaaacttcctctgcttcagagggattatttacctgacacttcgccaaccaatggcagttccattgcctttagcctgacactcagcaacaagcgaatgctgatgctgggagacgcatgggctgaagaggtggtgacctcactcaacgccagcggtggtcctcaacatttcgacatcattaagatctcgcatcatggtagtataagaaacaccagcccggagctgttgagcctcatcgatgcaccaatgtatctgatctcaactgacggaaaaaaacattctaggcatcctgacctggcggtgctgaaggcagttgtggatagacctgcgacgtttacacgaacattattttttaactatgccacccgcgcatctgctttcatgaaaacatatgtttcagcaaacggcgcaccattcagggtgattgaaggagcaacggattggataacgctgtga

SEQ ID NO: 99936 - DNA, 5817 bp, Enterobacter aerogenes
ttggataacgctgtgaaatatgccgccaccgaaaacgaaatcagattcgcaacggtgcagattgaatgcgaaggttccacaggctcagggacgttgattgcagcgaataaagtgctgactgctgcgcattgtgttgtgtcagataagcctagtgcccctgtaaccgtgacatttaccggtactgaaccagttatcagcatcagagcaacaatatctgacacagattattcgtgcgatgtatgcctgctaacactctctgagcctgtcaatattgcgccggttgcattaagcatcgtgcaggagcgggaaggcagtctttggaagagttttggctacccggcatcacgccttggcgctccacattatctgtacggtgcaatcagtcagtattttcccggcattatacacggcatagatatggatttatcggtcaatgccgactgtcgtctggaacaatacgaaggcgtatcaggggcagccgttttatccgggaataaaatgattgccatggtacgtatccggatggacggcgggctcggtgcagtgagtctagatacgttaagcgggatcctgctcagaaacggcctgatacccgaaaacattgttgagggttccgcactcataaagtcccgggaaacgatgcttgatcgcaccgaatttcttgacaactttgaaacctttattctcggaagcaccggacgcgctgttcttctggaaggcagcccaggtgttgggaaaacaacgttttgccgacactaccagcccctaaatgaaaagctcgccagtgtgggagtgtatgaatttacacctgaggatggtgccggcgcggcatttaaagttttacccgaagtctttgcggactggctcgccgatcgggtcgcgatcatcatttccggcaggcctgctcgccgggaagaaacagaaaaagtcaaccttacgcataaagtctctgagcttctcgctactctgtcagactactggaaacagaggggcaaatacggtgtcatttttattgatgctatcaatgaagcaagtgggctggggcaggcaatggttgcgccatttactgcgctactgcctgttacgcttcctgaacacattaaactggtttttacggcgccctcattatcagcagccggtaccgcatttcgccactggctcactcctcaggactgtatcagtctgacgctgctaagccaccaggaagtgttgcaactttcagccctcgcgctgaaagacatgtccccctctatgtcgctactgttgcgggtgtgtgacagggctcagggccatcccctctatctccgttatattcttgagtaccttaaagcaaatcctgacgagacctccctgaacactttccctgttttcagtggcagtatcgaaacttactacgaaagactctggcaggaactgattaaagacgactctgccgtgaacctgctggggctactttctcgtctgcgctggggtgttgagatggtatccctgcttcctgctctgtcagagacagaacaaaccgcgtttctgccaacccttgatcgtataaggcatctgctgcccgatccggcatcttcagcattatgccatcaatcctttgctgaatttattaacattaaaaccggcgcaattgacacattgctacacggacgcttggccgattattgtcttaacagtgttcagccctatggactgattaatcgtatctatcatctgcttttaagttcacaggataggcactctgaagcagcaatgacctgcactcaggattgggcggatgcctgcgtcaataacggagcaaggcctgaccttcttatacatgacatccgacatacgctcatcaacgcgctccatcgtgcagatgccgttgaatcaattcgcctgttgctgttattgcaaagaatcaccttcagacaccattttctttttctgcagtctgctttttattcggggctagcactagctgcattagggaagcccgatgaagctttagaacagtttatgccctcaggtcatctcgtcttggatctggcagatgcaatcgacagcgcgcatattcttacggatcatggctatcatcaacatgctctgaagctacttgaaaaagtgaaatcattggtcgatctcacatttgaaaatcatgaccttaacttgtctcaatttacacaccttaatctggcctgggtgcgtgctgaacttatagcaggagtcatcgacggtaaagggcgtacacgctctgtagtagaatacctttaccaagcagtacagacccttagtgaaaatattgataaagcggcacaacataatcccgtttatgaacgtgcgttcgtgccgctacaggcagaaatggaagcggtaaacatcgcctttaatgatcggtcggtgtcactgaagagcgttaaggatcgatttggcgaagtcccgaaaaatattcttgacctgatgctcagcgcattaatgcgtgcacatgacatgattattcggtacagactgcccatgccccagcaagctccgctgtcagtctgggaagatctcaaagagctccttcatgctgatgtttcgtttacagacagaatacgtttcaatgcgataacgagcctcattttcttcaatgcaccttcaggcctagttataaaaattgcggaagtcttctcactggatacgcttccggaaatcgtgctaatcgaaaaaaatgaagcgcagactgacagcacttcaatagtcgagcaggggcaatatttgctaaccgttgcctacctcaaccccgcactaccatgcccggacattacccctgcgcagcaggattgccatagctggctgaaaagtttaaccgaagcagtattctggtgcagcgggcaagcacaacgcgcggttgtggacaacgatcatgaaagaacaaaacaacttttagcgtttgtgcagaccaccctccttcctgcgctatcctcttcgcttgaggatcgtaccggctggcatgacgcctgggctctgccggagcacacgcttcccgtaatttatgaggagttgattagcatgttcggcgcatgctggcctgaaagcgtaaacttgttaacggatttcataattaacagagcacctgagcaatgtgggatttattcagagggtttcaggcgggtgatgaaaacgatcattcatgctcttcttaatgaaaatcggtttcccgatcaggctgacactgcgttcgaacttctggaaatcttgcatgcctttgtttcagcctatactgaaaacagacaagagctggttcctgaattattagaaatcatcccggcttatgttaggctggatgcaccacaactggcccatcagacttacactgagatgctgagtgtttcaatgggacccgcttggtataaagaagatcagtttaccctgctgacgaatatattgcaggtattgccgcatagcactgagacagacacaacgttgtctcaggttgcaggctacctcgaaaaggcttcgggtgaaatgaccttcagacgctatgtgagacacgataaatcccggtttatcggggagcttatccgtaggggccgatacgcacagtgctttgcctattaccgtcaacagtcctatggtacccatagcgaaatgctacatcaactcagtcagcccgcggcagatagtccccttccattaaaaagcatgcgattcccaggcggtgcactcgatgaaacctatgctgttgagctcattgtaagtaagttgcgaaacagggtcgactggcgcctaaggtgggcacttcttgaaatatttagctttggctgcacaggcaatcttgctgagcctttcgcagaaatgatcaatgaattcacgccagatgataaagatctcagcgaggccgttagaagactgtttatcgtttttaacggcgacgtttctttctctgagcaacatgattttatccgtagttttttaggccagctttcagaagaacacaagccgttgtttacggcacttattgagatattgtcagaggatgccaactctgaaagcttccactcccccgcaactgacgatgagaatgggcaaagcgcttctgctgagctccgggaggatgttgctcttcaacccggactcttcggcaagcaggctgctatcagagcagctgatgcccgtatcaaagaggctaataaagcagccgcacgcaaaaatacgttgcgggcaagtcagatagcggtggagagtctgcgcctcattcaggaaggtgactggtcagtgtggggcagaaatcaccatttgtcggacgtgacgaatgcacatattcttgccagtgcatctagtgcaggagaggtcttaagggcctatgctcccctcgtagagcatgagcgctacgctccatcctggaaaattgccagccaccttcttgaagcagcagccagtcatttttcaccacaggaagcacgagccgtcgctcaacgtgtacttgagcataatcgctatctgttggggtctaatggcaatgcggccgggcaatttgcctttcttgatgaaccggacatttcagatgccgctgaagaaacactgaacttcctgatgtggatgctggagcatccattaaaattccggcgagagcgtgcgctggaggccatgcaatggctggcttcaggtgatgatctgatattgcaacagtgtgtggcagaggcactgacatcagactcagccgtccgggttgaggcacttatggcgctgactgaccggatgtctgctaaatatccgacgcgtgtctgggattgtatagcctcacaacgtagcctatttgaatggttggcagacaccagcacgctcagccagatttgcctttttgagcgtattgccagcagagccggcgtggatgttaaaaatgaaatcgccgcctattctcgaacccgttcacgctcgcttgtttctcgcacaggagaacaacctagccctctttctacctgggcacgaccggtggcgcatgtgcttgccgttatggaagaacaaaaaatagacgtcaggggtttaatcggactccttgaagagcgcattttacagcagagcggaatgactgatatcaacgtagcatttgagctggagcaacttcttgcaagagggttttccgtgcgtaacaccccttccccacaccgttgggaggcgatggtgcgcttttcgttaaatcagattttgcatgaggcagctagttgccctgacctcaaaggtgttgaacctttactgcgcgtctggaacccagcttcacaggagcgtgttctctcacatgagatttgtaatcaaaccgcacggattatccgatccatcatggagcaaaatttcaagcaagtttcaggaactgatgaaggattttttctgcattatctggatgagattgagctgcccggcggagggccggcacatctggtcgaaatttcagctgtactgacaacggcctatgacggacatgagcatcgcagagccggagaagaaagcaggtttaatgcgaccctggtacccgatgcagatcgcgtgctggatgcacacctcacttgtcagcgagtttccctccagccgctattgttaggaggggcaaccccagcagtggtctcgaagaagtttatgcaaatgacgcataccgttccctcggattttatcagaaggcaatggcgcagcgggcgctcgctcagcaaaagccgatggggagagcctatcagcagaggtagcttgttaatcatgaaaagagatgtaactttgccgccggggctgggtctggcttggtctgtgacaatagacggggaactacaaagtatgttttcgtacgctcagaggagaccttcatga

SEQ ID NO: 99937 - DNA, 318 bp, Enterobacter aerogenes; identical to SEQ ID NO: 83339

SEQ ID NO: 99938 - DNA, 354 bp, Enterobacter aerogenes
atgtcatggctgaacgctaacagccgctgcccgaccttcctcggcggcgtgctgaaactgcttatcccgaacaatctgaggagcggggtgaagaaagtagatcgtcacgaatccgtcatcaacgaaagttatctgcagacgctcagcccctttttcctgctgtttatcccaggttttcagcgactggcaacactgtaccgcttcctgtctacgcaggcccatcacccgcgccagttgcagactggccgcgagacctgcatcggtttactggatccgattcagtacctgctggtaaagcaaatccggaatggcccggtgtgccccgtcgcggctggcaccactgatgccgagtga

SEQ ID NO: 99939 - DNA, 309 bp, Enterobacter aerogenes
atgtcgcaactggcacaggatatgaaaaagctggcgcagaatattcaggtaacccgtaccagccagctcaaagccagacacatcgcggtatacattcatgaacagctggcgcagggtatttctctgcgaacactacagaatgagatggcgatggtgcgttccattctggctgaagccggacgcatgcagttcagccagtccgaattaatcagcaatcaatcactcggcatcagtggtgccagccgcgacggggcacaccgggccattccggatttgctttaccagcaggtactgaatcggatccagtaa

SEQ ID NO: 99940 - DNA, 1509 bp, Enterobacter aerogenes
atgaatatggtttatctctcagccactgcattaactgtcgcagttttgtctgttgtcatcgtttttgtccttttgacaaaattacgcgctgtgaaggcctctgatgccagtaaaacagcacaacttgagcgttatgccgtcatttctgatgcagaaacggaagcaactcgaatagcgcaagaggcggaacaacaagctcgagaaatcatcggctgtgcaaaaggtaccgccacatctctcgaggaggaagcaaccgcattgctaagtaatgcacagtcaacgaccctatcattacaggatcaaattacgtcattacgtgcttcttatgccgagaaaaaaagcatctatgacgaacttgaaaaagcgatagctctttatcgcgaggatgtagattttgcagagatgggtatgttcgagccacatttcgatttcgatacctctgaagagtttaaggaggcgatcaaagataacagaaatgagcaaaaagccttgttacgcctcaagaaccaagccggagctatctggtgtggaactgactggacggtccataattcccgcgccgaagggaaaaaaatgactacccgagctatcaacctaacagcgagagcattcaatggtgagtgtgatgccgcaattgccaactgtacattcaagaactggtctgtcatgcatgacaggatccaggctgctttcaataaaatcaacgctctcaacgaagtgaatgatgtgcatatcagtaaagaatatctcagattgaaactgaaagagctcgacctcgtacatgcctacaaaatgaaaaaacagtcggagaaagaagaacagcgagaaatccgtgctcaaatggcagaagaacgcaaagcacagcaggagattgagcgggcgattagagaagctgaagcggaagaggttcgcgcacaaaaagcactggataaggcccgtaaggaaatggagtcaaaattggcgcaactgactacagaacaggctgaaaagtatcagtcgaaaattgacgagttgcgtgatgccttaaccgaagcagaacttaagggtcaaaaagctttgagcatggcacagcaaaccaaacgtgggcatgtctatgtcatctccaatgtagggtctttcggcgaagatgttttcaaaattggtatgacgcgccgtctcgaccctcaggaccgagtggatgaactgggaagtgcctcagtaccttttctcttcgatgtccacgcaatgatccatagcgaagatgctccagctctggaaaatgctctccatcaacactttgatgctaaacggacgaatctagttaacagacgtaaagagttttttaacgtcagcctgaaagagatcaagagtgctgtttatgaactagctggcaatgacgtcgattttatcgaaacggttgtggcacaacattattacgagacattggcattacgtaacaaacaaagtggagtagcagaagtacaagcgcggaatactaccgtcctgccacgttttgctgaatcaatttga

SEQ ID NO: 99941 - DNA, 1323 bp, Enterobacter aerogenes
atggcactcttcaattttcctcgctggcagttgacctcccccgccacggatgccggcgttgtcgccccggatgaacgtctatccgccgggcaaacgctgatcatgggcgttcagcacgccgtggcaatgtttggcgcaaccgtattaatgcctttattgatggggcttgatccgaacctggctatcctgatgtcgggagtgggcactctgctgttctttgtcgtcaccggcggccgggtaccgagctatcttggctccagcgccgccttcgtcggcgtggtcatcaccgtgaccggctttaccggtcaggggttgaatcctcatctcagcatcgccctcggcggtattatcgcctgcgggttgctctataccctgatcggtctggtggtgatgaaaatcggcaccggctggatagagcgtctgatgccgccggcggtaaccggcgcggtggtgatggcgatcggtcttaacctggcgccgattgccgtgcacagcgtttccgccaatgccttcgacagctggatggcgatgctgacggtgctgtgtatcggcgccgtcgcggtgtttagccgaggactgctgcagcgtctgctgatcctgatggggcttattatcgcctgtgcgctctatgcgctgctggccaacggattcggtcttggcaaaccgctggattttgcccctgtcgctcaggcggcatggtttggggtcccgcaatttacttcgcccacctttgacacccaggcgatgctgctgattgcgccggtggcgattattctggtggcggaaaacctggggcatttgaaggccgtagcgggaatgaccgggcgtaatctggatccctggatggggcgcgcgtttgtcggcgacgggctggcgaccctgctttccggcgcctgcggcggtagtggcgtcaccacctatgcggagaatatcggcgtcatggcggtaaccaaagtctattcaacgctggtgtttgtcgccgcggcgctgatcgccatcctgctcggcttttcgcccaagttcggcgccctgattcatacgatcccaggcccggtaataggcggcgcgtcaatcgtggtttttggtttgattgcggtcaccggggcgcggatatgggtgcagaatcgggtcgatctcagccagaatgcgaatttaatcatggtggcggtgacgctggttctgggcgcaggcgattttaccttgtcgttggggggctttcgcctgggcgggattggcacggcgactttcggcgctattctactgcatgcgttgcttaaccgccgccagcatcaggaaaaggtggcgaaagccactacggtataa

SEQ ID NO: 99942 - DNA, 678 bp, Enterobacter aerogenes
atgaatgattcatgggtgatatattcaagcgctaattataagcttactaaaactgaggctcgtacaattaaagcttacttgctgaaaaactatttaagatattttctgaagtgtaatatacaaaacacaaaaaccacaaaatggttcaaggttgccgacaagggtaagtttgcacgccgatttaatgttgtgatgaccatctcaattttcacctcatttattatttcttttaagcttcttggttactccgttgaatctgtactcgcatttttaattgtatttccgatggttattgttgtctttaaaaaatacaaacgccgattgctggactattgttataaaacctatttggcaaggtgtgttaaatacaggaagtttacgcttagatgtcttactgcaataagggctaatatgttaataaagctcagtatgcgctcattgcgcaggaccaggagcgtagagttgaactgtattgacggcctgggaaagatagtcaccagtacggggaaaatgcagtactttgaatatagcactttacgagttgttgcaaatctcggcgatgttattttttatgggatgattgacaaggataatggcaatttttatatactgccgatcccggaaaggtgtctttcacggtctgcgcgcctcataaccggcaaccataatacgctttaa

SEQ ID NO: 99943 - DNA, 708 bp, Enterobacter aerogenes
atgccaacacttcaactgcgcgttgtatccagttttaacaacccaagtcttccagttagcactatcggatcgaaattatatcgtagttcggcattgggtatctgggaaatgcttgatggttatgacaggagcggtaaaggtaactcacttattcagatgggccttggctttgattcaacaggtctttactgcgatggtgtcgcaaatcactatgtcgatacgggggttgttgaaccagatgcctataccataattacggcggttcaggcagatattccagctcagacatcgcaaatttggtcatgcttacctgaaggagcagcaccatatacaggggcaagggcggcagtaaccagtactggtgcttatcttgctacaatatcaagcagtgcgactggaggtatcactaacctgacaaccggtgtcgttgctccggtttgggacattttcgcctatacagtcagaaacgagcagttaagaatgactcgcggtagcagcatgggaactctaacggcagatatcactggtcgaaaaaaatcatcaaaaaccatcagaattggtggtggttatttatcgcctcacaatatcggaattaaaggccatatagggacctttgctctgtacaatggagtattatctgatagcgatatcagtacgttaatcaccacgaccaggcaaataatggcagggcgtggtatctcagcttag

SEQ ID NO: 99944 - DNA, 2064 bp, Enterobacter aerogenes
atggcacaattaccaaccccgacgcaaaagccggtaccgagtgatgatattcgtgaccacgtttatgctggtggaatgctggataaggttgtaacaagcacagaattaaaatacaccgatcgactcggtggagagcattacactgttgatgggatcaaagctgaaggtgataaggttgtcgaatacacaagacagaacttaatacccttaagtcggcagtatatgaccttgtcagatgcacaggcggatatttccaatattcccgaaggtagtacaacgtattaccgcagtcctgatgatagtgcgctggctattgaagtcatcaataatggtgggacgctggaggagaccgggcgaaagatgccgtctcagtttttaatagaacttatagagcgtcaagtattagatgttttttatcgagtatccggtattttccaaggtgtggattttccatttgaggtcacgtctgatgatgggcaacaggcaattgcagttgatcaatatgccagacttttagctaataacggggtaaatattcctcagggtggagtaactattggtggtttcactgtaattaacctgccagaagatagtgagtatgcatgcgcccttggtgatggagctggacgtgttgctattggtattggtaaagacgcgtttgttgaaattcttggtatgcgtttttacttaactgaaggtgataacctaattgagataactgacaatcagttacgtgtgtcatctggtattgataaaaatgggcggacgttctcaaatgatccccttggtggaggaggaacgcctggagattcatatattgagttcgctgaacgattgcatgttttgatttacggccaatcgctttcattggggcaatacggtacaccagctctcggcacgccagcatctgatggactcatgtatgataccggtgtgcgtagttttaatgttacgccatcctcgatagtaagtctgagtgagacggtaaatgggacttatggtgaaactattgcatcatcgctggttcatggttttgcatctaactctggtggaatgtatgacagaaaaataattctcaattctgctggcattggtggggtcgctattgaaacgctatcaaagggtcagccagcatatatccaactggtaaataatgtttcatggaccgctgaaaaaatggaaagcgaagggcgcgagtatagtgccgattttatttgctggatgcagggagaagccaacatggcaaacggcacttcctatgcttcctatcagacatcactcgcacaattgcagtctgatttgaacgtcgatactgcaagtcagcgttcctctggggcaaatcttatcatgctgacttaccagacctcctcgcatggattttatgttgggaccgagactaatccccctgaaatgattgctcaggctcaactcgatttagccctcaacaacgagtttatagatatgtggggtccaacctacatgggaatgccagcagatcacattattggacagggtaacgttcaccataataatcatggctatcgtctacagggtctttatgcacaaaaagcattgaggcatagactacgaacccgaacagcggaaaagccagatggggagaaatatttaccagttcatgcgaagtccgcaaggaaaattaactcacgtactgttcttgttgatatgcatacctatcatcccccgctggttatagacgcttcatatgtttctgaacttaatgacgggcagcatggggttgaactacatgattccacaggaagattaagtattgctaatgtggaaatagtaggtgggacgaagataaggattacgtcagagaccgatattgcatcagattcttgggttgcatttgcctggacgccggaaaacagaggggaaattacaaataaccgatatcagcaatggttttttggtcgcgaaactggagtgagaacgactatccatgactctgatccagaggttactgatttaactgatgagactggcgctccatatccgctttataactatccagctattcaaaaaatagctatttctcagtaa

SEQ ID NO: 99945 - DNA, 174 bp, Enterobacter aerogenes
atgacgtacaaatcagttaagcactgcatgccgcgttcattcacccgcgtctgggtgatgaccgacacggggcgggaaactaccggctacgtaaaatcggacggcgagtggttcatcaactgcccgcgcatccgggcgactggcgcgaaggtgatgagatggagggagggctga

SEQ ID NO: 99946 - DNA, 294 bp, Enterobacter aerogenes
atggctaaatacgaagttgtgcgcccatggttcggcgtgaaggtagggcaggtggtggagttgaaagaactgcactcggcgctgaagtctaacgtccgtctcatgaatggcgaggcaggcggagagcttaccccgtcgactcctgatgccggtaccggtgagaaatctcgcaaagagattattcagggccgacttactgagttgggtattgagttcaaaggcaatttgggcgctgaaaagctcagtgagctgttgcctgatggagagctcgaaaagctgttccctgctgaataa

SEQ ID NO: 99947 - DNA, 201 bp, Enterobacter aerogenes
atggcgagaaataaagaggttgaacttcaaaggctggtgctactaggagctttgtcaactctggacgaggctgttcgaaacgaaatattcgaactcaaagatcagattttaaaattggtcagtaacgccagcgagaaagaatatgcgctgaccgccttatcccttgcatcgatagaaaagcatatagaaattcaggagtga

SEQ ID NO: 99948 - DNA, 189 bp, Enterobacter aerogenes
atgccgatatgcacgctttcagtagaagtaaaaagccgctggtggctgccgctctatctcaaaacgctgacgttattctgccagatggttcagcgagagcctgatgacgtaaaagtgtcagcattcatcgcgaagtatggcgttagccagaaaatgaagattgaaccactggaaaaaagtacggagtaa

SEQ ID NO: 99949 - DNA, 252 bp, Enterobacter aerogenes
atgttcagcaaaatcaaaaaggttattttcacagaggttcccgaagccttccgggaagacacatatgaatctgtgattaaaaatattgagttacttgcaaaagactcaccagaacttaaagtggttgctaaagagtttaggagtggaaagcttaaccaagagcaatacattgctacgagtatgtccctaatcgcacaggagcttcttgagttccggtttgaaagagacaaggcggaagctcaagcttggtag

SEQ ID NO: 99950 - DNA, 240 bp, Enterobacter aerogenes
atgaataaccaaaaatacattaggattgcagcttcagttattgtggcatgtatgtttgtcattgttccatcagataagatggttaacggccattcttttgattttacatataaattcatatggaatttaggagtcgctgacggcgatgcattcccttacgtccccaacgtagattttttaattgctcaaatagcaggcatccttgccattgtttggttattgaccaaaattaaagagtaa

SEQ ID NO: 99951 - DNA, 156 bp, Enterobacter aerogenes
atgactgagcgtcagaaatttatggcagcgattgaaagcttgtgcggcggacgtaatgccagatttgttcttcacgactgggaattatatttccgccttggctatcgggcacacaatgcaggtgaggcgtttagggaggcaattcaatgcgagtaa

SEQ ID NO: 99952 - DNA, 297 bp, Enterobacter aerogenes
atgaccaataaccagttagcagaaaacagcgtaaatcagcttttgaacagcgtcagactggcgcgtgataacgcagaacgcgaggacaatcgcgtagaccactcgttttactacgcgctggcgattgctctggaagagcttcaggaacgccgcaaggtaaacgcagatttaacaatgtgggttaagcgattgggttattcactcaaaagagcgaaaccagacagcaagttacctggaaatgcaatggcgtatttaaacgctaagggacttatcagcgtagaggatattttgcgatga

SEQ ID NO: 99953 - DNA, 282 bp, Enterobacter aerogenes
atggcatgtaagtgtttcacagaagttaaggaaaggatggtagagcgcgtcaaagaggcgcttggtgacgccgttcattcgatggatgagtgtgattttggtaaccgcgtttgggttctcgaaaaaggcgactattgccaggtaatgctcccgttcaacgtgcgatatcgcaagcgcaagaaaaacggagacccagagcagcgcctaacaaacgctgacaccaagctcgcaatcaattactgcccgttctgcggaacgaagttcgaaggtaaggccgcctaa

SEQ ID NO: 99954 - DNA, 972 bp, Enterobacter aerogenes
atgagcgaagtaacggacttaactgtcatcgaaatcaagcctgagcaggcgcccacgttatacagcgctggcggcctaaataactatctcgagcaaatccgcgaattggcgaaagaggtcccagacgttagcactaaaaaaggacgtgaccgtattggtagccttgcgcgcatggttggatccagcaaaacagctattgagaagccaggtcgcgaatacctcaagcgattgaaggaggcggttaaacctgccgaagaggaattgcgagtattcaccagagagtgcgatgccattcgtgacgcaatccttaaacctcgcgatgagtgggaagccgagcaggagcgcattaaggccgaagaagccatgaacgtgctgcataccgaagcgctggtgatgaacgagaacatcgatctgcagcgcgcgattcagtacgaagctgaccatgaaatggccctgctgatgaatgacaagtttgaccgtgaccgtgaagagcagctccgcctggctgaacaggcccgacgagagcacgaagaacgaattaaacgcgaagcagctgaactggccaagcgtgacgccgaagcgaagcacaaagcggagattgaagccgcagcgcgtcgcgaagctgaagagaaagcacgtgcagagctggctgagcgtcagcgcatcgaagcggaacagcgtgcggcacgtgagaagttggaagccgaagcgctagctgagcgtgaaaaagccgcagccgtcgaagccgaacgccttaaggcaaaacaggcagaagaagctcgactggctgaagaaaagcgcagagctgatgagcaggcgaagagagaggctgacgtaaaacaccgtaagactgtcggcaccaacattgtcaacgcgctaaccagccataccagcatcacccgcgagcaggctattgaagtgcttacggcattgaaagacaacctgattccatgcgcgacaattcattactga

SEQ ID NO: 99955 - DNA, 465 bp, Enterobacter aerogenes
atgggcgctagccactggcaaccatgggagaatctgtttcttcacgaagtaagcaagaccatgcctcttcctgttatcgcagaaaagcttgagcgatctgaatcagccatcatcgataaagcccggcgccttgaaataaaactcccctgccggatgaatggccgaccctggacgaaagctgagttattcctgcttggtcgatttaccaatgaagaaatagctactgccaccggtcgctctatctactcggtgagaagtaagcgtgctgcgatgctacagcaatctggcgggaatcttccgcttgaatggtctgtagaagagttggcacttctccgccggcacaccaacgccgaaatagctgaaataaccgggcgaagtcttgaagagattggcgataggcggttgcaggacaacatcgaacgaaacggctggaatgttttcgatccggaacgggaggaatcatga

SEQ ID NO: 99956 - DNA, 516 bp, Enterobacter aerogenes
gtgagttattcaacagttataaaagtttggccgggcgaaaagtctgaagaagatgaagagctccgcaatggctggggaagtggccctgtcatctggaacgacatggcaatgaaatatcttggtcttccggcccatcagtacatgatgaaaatagatagtctttggcctttggctaaccgccttgatattccatatcaccatcgcgctgttctcgctatgacatacgaccgcatgtatgtgaagcaggaacattacgcgctggcagcagattgcatccgcaaatacctaactgatttcccggctgatgataaatatgtaaaccactggccccgcattgctgaaatttttgaaagctccccggagtgcccagctattggtttgtggctcacttcggtatgtgaaaacccatttcttggcgagtgggatgaagaactcgaagattacaaacagcctgattggtctcgttactggagcctttttgatgaccttgacgcaagcgaaagtggtgtcgcatga

SEQ ID NO: 99957 - DNA, 216 bp, Enterobacter aerogenes
atggacatcatcgataccgcagcagagattgaagagcttcagcgtaacgctgccctttccgctcgccgcataaatcacaacgccgtatcagctgagcattgtagtgaatgcggagagagtattccggcgccgcggcgcgttgcagttcccggctgccaaacatgcgcggaatgccaatctgttatcgagctgaagaataagcagaggagtctctga

SEQ ID NO: 99958 - DNA, 693 bp, Enterobacter aerogenes
atgtctatatcttcgatggtcaaatttagaatggaaaccgacaggaatgctgctatagcactcgaccgtgctgtaagaggtgttcaacagaatagtattagtgtcctggaagatgttcgatctggtttagagagggctacatggtacagtacatgtcttttggatgagtataaggccatatgctcggaattatcagaagaggatatccgtttcataaaatgtatttacgagatatataaaagaaaaaatatcattgcagatatgatgagaatgtatattgaggaagaacttaaatatttaaaagtgagtgagataaaatatcttgatatcagtcttgcaaaaggtctatcaagttatcgaagtggattgctaacaaggggcgcaattgcaaatgctttatctatcatcattgttaactcatttaatttcaaaaatgatgtcatgatgcaacttaaccgatccagttttgtggtagtgacagccgcatctctttatggaaaggttcagacggcagcgatttctgcaagaaaactcagagatatatcgcctcagttatatttggcactctacaacaataatatggaaatgctttattttcttgtcagcgataaaattgatagagcattgataaatgcaatagggcttcgcggagaagagcgcattctttccgtaatgaaaagcttagcgtattaa

SEQ ID NO: 99959 - DNA, 1347 bp, Enterobacter aerogenes
atgatgatatcccggagatcgcttatcggcagcgccattgccagcagcgcgctaatggccgtagcgagtggacgtgcgtttgcgcaaaatgcgccagcgcaggcggccgacaataagccgaagctgcctgcgtcagcgtcgccgattttgctaaagaacatcgttattggaacggcaagcgcgccaacggatgtcctgattgccgaaggcaaaatagcccgtacgggccacgccttatccgccgcgaatgcgcaatcgatagattgcacgggttgtctgctgttaccctctttcattgatacccacgtccacctcgacaaaacgcgcttcggcgcgccggagcgtctacaccatatcgccaccgccagcgtagcggaacgagcggccaacgaacgcaaactgcgcgtagagcttaaacatgacccctacctttatggctccaaccttgtacggcagatggcggcaatgggaacgacgcatctgcgaagccatatcgacatcgacccgcttactaagctgtccgacgttgaagccctgatgcgcattcgtgaggattttaagggctacatgagcatggagttcgtcgcttttccgcaatcagggattattaaatcgccaggcgttgcggattacatggctcaggcgctggatatgggcgtggaatacatcggcggcctcgacccgcagggttttgataacgaccgcaaaggccaccttgatgtcctctttaccctggcggaaaagaccggtaagccgatcgatattcatttgcacgagccgggtcagatggggctggcttccatcaaagagattattgttcgcggcaaggcgctggggatgaaggataaaatcactctctcgcacgcgttttcactcggacaaatatccgaaagcgaactgaacgccgttctggccgacatggctgacttaggcgtccgcgttatcggcacggctccgggcaatgtcgcattcccgcctatcgaaccactattggatgccggaattctctacgctgcggcgaacgacaatattcaggatatgtggtccccctggggagatggcgatcagctacaacgtgcgaaaacgttcgcctacagcgccaattaccgtgcagatgcgccgctgatgcgccccttcgagatgataacgcgtattccggcccagcatattaatctgccgaaccacgggctggaacatctgaaggaaggtaacgccgccaacctggtggtgctggaagccagcgacgtaccggcagcggtgttatacacgccgccgcgcaagctggtattgaaagacggaattattattggtcgtgacggtaagagcgcgataccgcagaaaatctga

SEQ ID NO: 99960 - DNA, 399 bp, Enterobacter aerogenes
atgttgtttttaaaagtaaaaataaaactattgcttgccgctattcccctaatactgtgtttgccgcaaaacacaatagccagagacctcgccggatgcagcatcaagaaacagaaaattcaaacacaaatccgttatgcaaaagcgcatcataatgattaccgggttgctggtttagagagagcgctgagaagagtcgagacgaactgtagcgatgaatctctgcgctgggagcgtgaacaaaaaatcagagaaaaacagcaaaaagtcagtgagcgagaatttaaacttaaagaagccgaacgtagcggatatccgaaagacgtgtccaaaaagctaaaaaagcttaaccaggctcgagaagagctcagcaagtctcagcagacgttgtacccataa

SEQ ID NO: 99961 - DNA, 537 bp, Enterobacter aerogenes
atgttcaaaaaaagaattatttatgcgttaattgcctcttcaaccttatacatttcgcttaactcagcatatgccctgccggtaacggatggcactattaattttacgggtaaagtggtcgatgctagttgcaccgtcgcagcgggcagtgtcagccagactattcctcttgacccagtcagtacaacattactgaaagtagcgggggataccgccaatcctacgaatgtgcctatcgtacttgaggagtgcaatactaatacatcaaatacggtacaggtcattttttcaggcaacagcgtccctggtgattcaaccgtattatctttagtagatggtggaaactcagcaactcaggtgggaattaaattgtatgatagcgagaataatgaaattaaactagatgaaccgaccgcgccaattagtttaactaccggtcaaactacgcttaatttcatggctaaatattatgcattaggccaggccggcgctggtgatgtgaatgctaccgcaactttcaccatgatttatccataa

SEQ ID NO: 99962 - DNA, 684 bp, Enterobacter aerogenes
ttgaaaagttttttttcactgttaattctatctacttccataatactattttctatcgactactcgtttgctggcggcgtcgggctcggggtaacccgtttgatctatccatctgatgccaggcaactatcgctctcggtcagaaacacagacgaaaatatggcatttctgattcaaccctggacggaagatcatcaggggaaccggacgagcgattttatgatcacaccaccactctccgtgctaaagccgaagagtgaaaaacttttgcgtgtaatatacgcggggcctgagttaccggcggataaggaaagtattttctggttaacggtaaaagcagtgcctcctttaaacgaagagaaacacggtaatacattgcagttggcatctgcgaatcgcattaaactattttatcgtccgcaggccttaacggtaagaccacaggatgcacctgaaatgttaagcgccaaaaaatatggtaacgaaatcgagttaaccaactcttcgccctattttttgacgttggtaaatctaaccatcaatggacggcatttaaacccactaatggttccgccccgggaaagcattagaattaaaaatggcgtaacgacagatggagtaataaagtttcagacaattaatgactatggtgctcaaaccaaacctataactttgcatttctaa

SEQ ID NO: 99963 - DNA, 2598 bp, Enterobacter aerogenes
atggatgctgaacattctcttatacaccctacccccctatttttagcaactggttttattataattgtcttcaccctaacacatgaaagtcaggctgctggctataaattcaatcctgcattcatcagtgataaaaacaatgcagttgctgacctatcatcgtttgagaaaggccttgagttacaacccgggcattacaaggtagatgtttttgtaaataacaaatttctcaaaactgacaccttattgtttgaagttaaaaccagaaataatacagccattttatcgccctgtgtttcccctactacactcgagaacctgggtttgaatccagttgtcttgagtaaattaaaatcttcgcacactatagaatgtgtagactttagcctgttacctgatatatcagtaatgtttgatcaacaacagatgaaagtcttcttttccattcctcagattttattaaaaaataaagccagaggagcaatcgcccctgaagaatgggaaaacgggatcacagcggcaatgcttaactatacgtttagtggcaacgagtaccgttaccgctcgggcactaactctacacagagtaactattttctgggccttaatggaggagttaactggggaccatggcgattacgaaaccagcaaaactgggtttataacacccacaatggcggtgagtggagccatattaatagttatttacaacgtgatattcgtgttctcaggagtcaaatcactctgggtgaaacgaataccgcctataacatattcgacaccgttggactacgcggaattcaacttgaatcgaaggattccatgctgccagacagtctacaggggttcgccccgacggtacgcgggattgcaaaaagtaatgcccgggtgactatccggcaaaataataatgttatttatcagacgttcgttgcgcctggtgcttttgctattgacgatttatacccaacatcagccagcggagatttgaacgttgaggtgatggaagaaaatgggcagtcaacaaactatgttgtgccttactcgagcgtccctaatcttgtcagagaaggacacctgaaatatgcacttagtgccggtcattatcgttctggtttaaaaagcgaacaaaacacgcctttttatacacaaacgtctttgttttggggctccccttggggtttgacgctttacggaggaatgcaattatcacaaagatataaggcaaccgcactgggcatcgccagaaacatgggggcatggggagctatttccctggatattacccatgcggagagccagctatcaaacgatgaaaaacatcgtggtaattcactgctacttcgttatgccaggtcacttaccgattttggtaccaactttaattttgccgcatatcgctactctaccgatggcttctattcatttagtgataccacttataaaaagatgaaaggtgaaaccctcgagtataatactgatgaaaatggcaaaccggtgattaacacaactaatagctataacctgcgttatgctaaaaaggcgatgtctcaaatcctgatttcgcaaagcttacacgggcttggctccgcttatgtatcgttcaaccatcaggactattggcgttcagagaaaaaaaataccaacttgcaatttggctattccggcagcgtgggcaatctttcttacaccctaagctatgcgcagaaccgtaatccgtggaacgcagaaaaagataaaatcgtgaacctggcgttttctttgcctatttcgagctttttaaccaacggttctaaaactacagcaagaatcaatacttcaatgatgagaactgataaaggtgattataatgagattatcggccttagcggtaatgcacttgattataataagctcagctacaacctctatcaatatcaccaacgccattcacctgccggcggtaatatagccttaaattataaaggacgctatggcattaccgatcttggttatagctattcccgggataatcagtctttgaaatatggatttaccggagcaatggtcctccatgaggacggattaactctgggtcagcagttgggaaacacaaatattctggtgaaagccgcaggggcatctgatgcagaactggtgaatggtaccggtatccagactgacggacatggatatacgattattccttatgcaaccgcctatcgtgaaaatcgagttcaactacgcgaggagacattaaatcaggacgttgaactggatgaagcagttaaaacggtcatcccttcagaaggcgcgctggtgcgcgcgacattcaaagcgcgggtcggtaagaaagtcatgttcagacttgttaaagacgatcgactgcctttgccttttggcactatcgtcaacgctgaaacggacgatggctccattaacaacggcattgttgatgattctggttttgtttatatcaatggactagcagatgttggccgattaaccgccagatggggaaagtctaatactcaagtttgtactgcaaaatacgatatcagggcattaaaaagtaatacagtgacaggtatttattcgacgtcagtaaggtgtaaataa

SEQ ID NO: 99964 - DNA, 513 bp, Enterobacter aerogenes
atgaaaattgtcatgccgttattggttttatttatgccgtttttgatacgcaacgctttcggatatgacgttttacttaatgttaccggacaaattaccgctagcggttgcgtcgttgaaaacgactccagaatgattgatgtagatatgaaagagatcaatataacacagctgacgcagaccaatagcagcgcacaaatggtacctttcaccatccgattaatggattgtgcggcctcggtcagcggtgcggtagtgacattttccggtgttcccgatcgaacaaatagcgattttttagcattgaccgaaggtggcgccagcggcgtcgcgattaaaatcttgaatgaagataaaacgatcgttcctctgggtagcgcatcaaaaaattacttgctgaacgagggtaataccatggcattgcagttttatgctcagtacattgccaccggcgcctcacttagcgcaggagaagcaaatagtacggcgacctataccgttactttcccgtga

SEQ ID NO: 99965 - DNA, 1017 bp, Enterobacter aerogenes
atgaaaattatattaaaaatattaattacaattttatctatttcatatagttacttagcgatggccattaccgccacgacacctcagattgtgcttacccctgcgccaatcagcgtcacccaaaatgctgacgcctccacctttggtcagcagataggcgctaccactacagtcagcgtagataatgtttttacctgtcctaactggctttatccctgtaaatcagcaaccgtcaaactaggtagcggcttacaaccttctggcgtcacattaacggtaaatggtctggtttatggtgtttatgaaacaggtgtgcctggtattggttttaccattggcgtcaaggataccaaagccactagctatattccgctaaccgatcaagagagcacaacctggagcggagcagttggtcagattggttttgatgcgcaaatccatttcgtcaaaattagtggacgactggaaaccggcataataacgacaccagaaattaccgccgcggtcatgacaggccatgagtctctttccggggcatcgactacttccaaaatagtgattagtcctaccactatctcaacgactgccaatggctgtgatgtggaccaatctttaatcaactttcccatgggagaggtcagcgagagcgtattcaaaggcgtggggagtcgctccgacggcatttcatccacaattacattgaactgtgatgccaatatagcattggcaatggttattaccgatcaatctgatgtatctaacaccagtaaaaccgtaggattgactccggactctgatgcaaaagggatcggcgtacagttttttgttgatagcgaagaacccatttcgttagggcccgatagttcattaaaaggcaccaccggccagattcagctggtcacaactaaagaacagggaaatgtcgctattcccgttacggtaagatatgtgcaaactggggagattacggctggtagcgcgaatgcaattgccagtattactttctcctatcaatag

SEQ ID NO: 99966 - DNA, 582 bp, Enterobacter aerogenes
ttgattcttagtcgatccgattatccttgccaattaagtaatgtcacgtttacatcaattattgatgatatgaacaaaaccttgagcggtttataccataacagcaattgctatgtcttttttatagatggagactcgcctaacgttagtctgcatgctaaaaagatttatctcgaaaggaagcgcggtaagaacatttttatggtaacgctgaccgcgaggaagaaaaattactcgacgataattaatcatttgtccgacctggtgatatgcaagaaagcatcatattcatttttaaaagaagcgatagagtggatgctaaaagcaccgccaaaggatactgaggactattttctgggcgatatttgggggaatgtccttaaaggaacacagaaagagtatgaagtcctcgacctactttttaagggttacactcaaaatcaaatagcaaaaatattaaatctatctgtgacaacggtcagcggatataaaatgaaagcagtcagacgccatgggctgagaacttttaatgagctatacattcaaaaatttaaaaacaatattaatatcttcgatacttga

SEQ ID NO: 99967 - DNA, 246 bp, Enterobacter aerogenes
atgctgcaggtgcgttggctgcactcgttcaccccagtcacttacttatgtaagctcctggggattaatgagggacatccttgtccctcactcgaggccagccttgggctgggcaaattcgttcctgacgaatttgtcgctcatttgccgcgttactcggccagtggcctcgcccctacggggccagcgcaagcgctgttcaaaacgagtaatcgttttgtcctgcaacatgaattatttgggtaa

SEQ ID NO: 99968 - DNA, 615 bp, Enterobacter aerogenes
atgaaaaatagagggtcaagtataatccattcacttcatctatggattcaaattgctgcgcaaattgtaaccattgttgctgctattgtcgttgggctctgggggtattattcagctatttatgtaaacaaggaaaaggaagtaacagattacaccctggaagaattaaagcagaaaacgactcaaacgccacatattcaggctaaggtggagccgatagtcgtcaaggaggatagtggattaattttattacaggtaaaggtaagcttgtcgaaccttggtaccaaagaaagcagagttacacttgacgataattcattggctttgatccctgttgagttttccgaaggtaagccaatttttcaaaatccaataaatattctttcaagtcgctatgcaggtaatcttcatcgaatcccccttcaatttgtcgatataggtgctggagaaagttatgaacttacctttgtgcatggcataaacacgacaggcacttacctgattcattttttggctcttaacggtataacaccctcaaaagatgagctctctaccacttacggaattccgtataaatattccgtcggagcagatgagtacattgtcgtaaaataa

SEQ ID NO: 99969 - DNA, 2676 bp, Enterobacter aerogenes
atggctgaatttatcacttggctggatattgaacgacaagtcaaaagagaatttaagtttaaaaatgcattgaaaaatattaaagctatctattgttattcatcagggatggaagtcgagtatatcaatgataaagaattagctatttctgatttaaagaaaatttttaatgactcgctcacccataaagatgatgttctatttttatctctggaaataggtggtccggaatatttcattgagttaattcctactgttgggttgaagaaagataataatgttgtatacccattgtggcgtgagcatgtatatgttgatgaggtagtagaattcaaacaacctgaacaatgggtagacggacctaaattttgtgcatttcattcgtttaagggaggggtcgggcgtactacttctttaatgacttatgctagtgcagcattagaagataatcatataaagaaaatattattaattgatggagatcttgaagctccaggtctaactttatggcttgatgctgaaaatttggggagagtaacgtatacaaactttttagaggcgatccaatattccgatggaaaatttgatgcaacattagatttctttgcaaaagagttaagaaaaagctctattagtattgatggtaattctaaagagatttttgttctcccctctgcattatctttagaaagcataatggatatgcctgtaactccagatcatatttctaaaaatattgataatccatatatactaagcgatttattacggcatttaggtaataagctagaagtggatgttatactaattgacttacgtgctggtttaagtgagctttctagtcctttgatttttgatcctagagttgagcatttttttgtatcaactattgctaagcagtcggttgtcggtattggtgaagtattgaagaagattcacaattcagttaataatacttatcgtaacgtgagtgataaaccaacagtaataataagtatgctcacaaaactgctccgagaatctgcaagttacacagaggcaattcagattgtgaatgaggcgtatcctaccatcgaagatgaagatatgatctctcaatcaatcgaattattagagtttgattttgatgagaatttaatgagtgtttctaatataagagacgcacttaccttattgagaaaatcaagcatatatgaaaatgctaaggattggattgccgacgttaaattgaatgagtcttcggaaaacaatgaagtttctcaaggtgacgatagtggattgaaacgattatatgatacatgtcaatccttccagtttgctgagaataccagcgaagatgacatgttggtcatcgatccaattcgtaatcttgcaaaaaactatgccgactcattaccaaatgttgtttcaataggagcaaagggagctggtaaaacatttacatatttacaagtatgcaaatcaaaaacttggagtaatttcatatttaaagttaataataatgtcaagtctgatgttcatgcgaatatatttccatggatttcctctactaaccttaacgagaaagttagggagcaagtagcagatgagcgtgagaaatgcttgactgaaatttcagctcaatcaccacgtagcttatccttaaatgtaaaaaaaataactgatgcattatcagccgatacaactaattgggatgagttttggcaagatttattagtttctgaaatagtaggggataacaaaaacttaaaagatttgaatgatcatcttatcagtgtggataaatctattgttttattggttgatggtatagaagatatccttttcgcgccagaaaaagatgcaaatcataattctgcaattagatctctattgaatttgccaaataccatttcagatttgtcgaatagaagaatagggttggtatgctttgtgagggctgactatgttcaatctgcgattaaacaaaacgtcaaccagtatattgctaagtatcaacagttcagacttgagtggaccccagagtcttttttacgattagcttattggataagtgcgaaagctgaagttatagatgctaatgaactggatgcggaatcgagtagtcttaattttctgctaactaaccttgagcgtttatggggcaaaaaattaggtcgagataattccaaagaggccagttctgcgagatgggtttttgcagctctttgcgatttaaacggccgtcttcaagctcgagatcttgttagattcttgaagttttcagctgataatatgctaaaggcaccttcaaatggaataaaagtagagttttggttagatcgacttttagcgccggaggctattagacgctcattgaattcttgcagtcaagaaaaggtagatgaagctgagaaggaaattaagcctttagaacagtggataagcattttaaaaactgtatcgccagacttgaaaaaagttcctttcaacccgcaagaggtcggattggacttgtctcttttaacctctctaaaagaactaggtgtcatttatgaagatacagaccaaccaaatgaagagcgcttttatctacctgagatttaccgaactggcttgcaattttcatcggctgtaggtggcagaccgcgagttcaggcactactaaaacgtaatttaggtggtataccgttctaa

SEQ ID NO: 99970 - DNA, 438 bp, Enterobacter aerogenes
gtggcgaagattcccttcacaaacagagagttagttagggcttggcgcaattctctggatgtctccaaatctgaacaaagaacaaatcctcacaggttgttattattttatgcaattgaatgtggtttaaaagctgcgtatttgaagcaaattaataaaaccgttattgactctgatattgcacagcagttttcgcatgatattaacaaattatgtgaaaagttatcaataaatagttcgtttatgcttcctcagtctttacgtatgaaagattgtaaagtcgatagtaaagatgttgctcgcacatgtagccccggagaaattaatcagatatggcgatatggcggggctttagatggcgttgaaaatgacatctttctagaaggcaaattggaaaaattaaacgaaattattgaaaaggaactcacaaatggctga

SEQ ID NO: 99971 - DNA, 1011 bp, Enterobacter aerogenes
atgcctaatgaaataacctgggatgaactgcttgaagaatacttttttgctcaccggctgagacccgctaccgaatggagctacaacaaggttgtcagagggttcagacgttattctggtgataccctgcctgcgcaaattacgcaccgtcaggtgctggagtggcggcgctatttgcttcaggagaaacggcagtcgacgcagacgtggaacaacaaaattgcacatctgcgggcgctgtataattacgggatggaacatgaaatccttcccccggggaaaaatccgttcaataaaagcaatgttcagcgggataccaggaagaaaaaaacgctgacacgatcgcagctgattcgtgtttatctggtcatgcagcaatttgaagaagctgaacgggcagggcgcggtatcagaggagggcgtaatgcgctctggccggcgtggtactggctgacggttctggatgcgttcagatatacgggaatgcggctaaatcagctgctgcatatccggttgggtgacatcaatctcagtgaagggtatctggaactctgcttggaaggcagtaagacacaccgcgaatggcgggttcccattgtcagtgcgctgaagccgcggctgcatcacctgatagaaaaatcaacggaactgggggcgggaaatggagattatctgtttgatgtgaacagaatttaccttaaccgtcatgtggcatgggatgccgctaaggttcatcagaagatcagatcatttttccggcgtctgtcgaaagagtgtggttttaccgtgtcgccacatcgttttcgccatacgctggcgacggagctgatgaaatcaccggaacgaaatcttcagctggtaaaggacctgctggggcaccgcagcgtcagtacaaccatggaatatgtggagctgaagatggatatcgtcggaaaaacacttgaagctgagctgtcacttcacacagatgttacaggcgaaagaaatttacacctgttgacacaagcgtag

SEQ ID NO: 99972 - DNA, 1593 bp, Enterobacter aerogenes
atgttaaataaaatcaaaaccttattttcccttacgccagctgtcacagaaccatccggtaaactccctgtgtcggtgccgacggggtatttctctccgggtaaggctgaagaactggtcattaccgcattacgccaggatgccctgcagaaaatccgggaaaataatgcgctgtcggcagcggtataccagcgtctttatctggcaccggtgtaccacctgcttgaacggacccagaacgtgccggcggcacctgatggcgagtgggcgtatgccggaggttttggtgatttaagcctgcgttttaccgcttatgccgtcaggcttgcccgagggtatatgtttccgcctggcgcggcaccggaagaacaggcctctcagggtgttatctggcaggccgttattttctgggctgcgttgtgttatcacctgccgttactgggcagtattgaaggcgaaaccaccggcggcgttaactggcaaccgggtatatctatgccggatgcgccttatcgcttccggtttcgtccttctccccctgacgcgcatgatgcttctgctctggcggcgctggccgccggtcagttgatacccactgaagcgataaactggctttcaggtaccccggcagcattgtttagtcttgcctgtgcgttacgcaatggttctcctgatatgcccctcatcaggacgttgctcgaccaggcggcagagaaggttggctcaccgctgctccggaagactgcaggtgaattttctgtggtacttgcaccgccggattcggtcagtccgcaggatgccacattgccggtccggacggaccataatttaaactcagctgcggaggtgctggtcgcttcggcgcagatgacctctcccgatgataacgatggcggagacaatcagtcatcgctgaacagagtgagcgcagcggagtcgcaggaagaacctgataacgccgacctggaacaaggggacaccgatatgttgctcagtcttttcaccgcggtacctgctgcagaggatacagaggacacggatgatgtagctgcgaatacgccagccaatatggtacaggatgaagcagtggtggccatcggaaaagacgttcctgatgagtctgctaagacggaagaagtctcccggcgtaacgatatcgatgccgattgtttgttgcctggcacacaggaagagcagggccactcggttaatgtcggtgctgatgcccgacggtcgggtgaggcgtttctcgcctggctatctgacggcatggcatccggcaggatcaccgtcaaccagcatgattcacgggtacattctgttgccggttttatttaccttttggtgccggatattttctttctttttctgaaagataccggaagtgacagccacagggaggagattcagacctcgtttgagaaactccagctccaccgtgttcgcaggggggaacgttttatccgggcgaaactgtactgctcagaaaacaaacaggggcggttcagcagggttaatggttatcttatcaaggctgtccgcctgaaaggggtgagacctccggaggacagcaaactccttttctttccatag

SEQ ID NO: 99973 - DNA, 1485 bp, Enterobacter aerogenes
atgactaggaaaaccacaccagaacaaaacgccatcatcgaatggcggggcaatcatcttgtggtcaacgcatttgccggcgccggtaaaaccactacgctggtgcaattcgctcaggcgaacccggacagcaaaatgctgtaccttgcctacaacagagccatccgcgacgaagccgaacaaaagtttcccttcaacgttgaatgcaaaacctcccaccaactggcctggtcgcatttcggccgacatttcaggcaccggctgacggcaaatctgcgtattaccgatgtggcccggaaactgaatacccggcactggccgctggcgcgtctggcgctgacggggctgaatacatttctctgtagtgcagagccggaacccggcattatccatctgccagcagaggacgaacgtcatggcctctctgcagataaaattctggggaccgtacaggttctctggtatgaggtgagtcgtaccgaatctgatttcccgatcacgcatgatgtttatctgaagctttttcagctgtccggccccggtctcgccagtaagtgggacaccattctttttgacgaagcccaggatgccaatccggtcaccagtgcctttgtcctgagtcagccctgtcggattgtgctggttggcgatcgctaccagcagatttatcgctttcgtggcgcagataatgcgctcagttctccccggttagaacaggccgaccggctgtggctgacaaccagtttccggtttggccctgcggtcgcagaaatggcgaacgtgctgctggccatgtccggagaggagatgatagtcaccggcagtggtgaagacgatgaagtggttatgcatctacctgctgagattcctcattactccgttctcagccggacggtatccggtgtcattggtgccgcgctctctgccagtctacaggagaaaaaagtcttctgggtggggggcattgaagggtacaagacggaggaactggaagatctttactggttctctgccgatatgcctgaacggatgcagtccccccgtctccgtcaggattaccgggactttgaggaatattgctccattgcgaaggcgacacaggatgtggagatgaatcaggccatccggttgcttgatgagtattttccgctgccgcaaaagctggccattatgcgccggcaggttgtgacgcatgaaaaggatgcgcaggtcacagtttccactgcgcaccgcagtaagggactggagtgggaagtggtcgtactgaatgaagatttttgtgatatcaccgacccgttactctctgcagaagagcgacaggacgaaacaaatctgctgtatgtggccgtgacccgcgcccgtaagaccctggtgctgaatgagttgatgcagtgcctgaaggctggtgaagggccgaaagattgcgaacaacctgcaacggatgatgttgagaacgatgggggagaagcaattttcccatgttaa

SEQ ID NO: 99974 - DNA, 1068 bp, Enterobacter aerogenes
atgaacaatgcaacactcatgtatctgataaaaattatttttaggccaaaagatcaattatcccgactgacgtttggggtgcttaaaattggaatggcgggattagttggagggtggggagtaaatcttgttttctcagaagaatttcttaagaaaaatgttaatattatcgatggattaacgtttacttatcaaaagtgctctgatcttgctcttttttttggtgtgatttttctggttgctgggtttggtctgtgggggatttgtgcttatttcgctcttcgagatttgaataagcgagacattgctcttattcgtgcgtatgggttcgaaaatacggattcacaagctgcggagaaaatgctctcttccagagaaaaagcaaaaatattaaatgtggactttaaggcatttgattcaagggacaaaaataacaatatatccaatgcaggttttattcggcaaataattcaagaaagaatatatcacaccgatgcgacaattgcttatgttgctgcacttggcagtgtgccatatctgtatatggttggtagcttcatgacggatggacacttaccattaaagttgtttgattttgaccgggataaaagaacttttcaccctcttgatgcaccgccgacaaatgcaaaattagtaaaatgctacagcggtcagaatattcatgatagtaagtgtgtgccatcaaataatggaaaggttatcggtcttgcaatttcatttacgatgaaaattttagaaaaagaccttcctgttgaatttattggacatactttacatgttcaactgaatacaggattccgatttgataatctccctgcggaggacgagcaagaaaaaatagtgaaggaacttagttatattatctctgaattaaaaaaacaggcagacgaagtgcatctttttgtgtctgcacaagcatcagtagtcgtacgacttggtactctttaccaggaaggcttgcatggtgttataaatatttggcattggaatgctatagctaatcattatgaatggtgcttgaagatcaccagtaaaagcgtaagttga

SEQ ID NO: 99975 - DNA, 492 bp, Enterobacter aerogenes
atgaagagtgtgatatctgcaatggataatgctgatgcgataattgtcgatactgaacattttagtctccacatttcaaagaaagtgattgggatctggcaggggtttcgacagtttaaaccaatggatcccgaggcatttggagtgctcgttggtgacaaagaacttgagattgaacgttacggattagttgaaatcacggttccacagaaagaagatcgatgttcaagaatgagttttactctcagagatcccgaacatcagcgtattgttgatcgcttgtataatgattctgaaggtcaattgatttactttggtacgtggcatacacatcctgaaaaaaatccccatgcttcatacatcgatataagggactggaaacaatgtaggttacgaaatcctgtacaaaggcttttttttataataattggaacagagaaaaacgcgctttactattttgaaggtgaaaatattttgcgacaggaattctga

SEQ ID NO: 99976 - DNA, 1734 bp, Enterobacter aerogenes
atgaattattcagtcatcctggctcacttgaatgaatgcggatacaaggtatccgcaattccatcaaagacggcagaggtcggatttttaaccgtcgaactggtgataaacgatatgccagttactctttggcatatcgctgttcctgaactcacaaaaatgcccagttttctcctggccgatccattaacattgcccaggcttgcgcacactgcgttctatcctgaaagcaaatttgcaagcatttgtgtgaatgtaccagacgcagtatcagtgaattttgagtgccctgagctagccttcgaagaatcgctaaaacgtcatgtctctttattaagtcaggctttaaccgatagtgaatggaatacaaaggaattacttcgggaatttgaagctggctggttgaatatcgttgagccggacacaaccccttttctctgtttaactgaaagcgaaacaccagaagagttgtgcgttctgaagccgagaaaaggcagcgtaggtctgggaaaatatcatttagggtatgctgaaggggctgtcccaggtaatattttttcacctatcaatcagcttctaaaagaacgccaggctgcaaaaggtaacggattcgtcataccgttgagcgtgacaaaacctgcaccatggaaaaaagatgaacttactgactggtatctagatctgctgtcagatctaccgacgaatgttcaaataaaattaactcaaaaatttgctcaaaagcgatctcatgaattttggctagtctttaatgcccaaaccccctctgggatcacatggtttggaatccatttttcccaaaagaactctagtaaaggtcgaaaaaccttgccttttaagcattcacatatggccgaatggacgcttgaaccggtcatcgtattaacttttaataaagaaaggattatgccaaggagtggagcggatcaatcccttactagcaaaaaagttatgcttgttggatgtggttctgttggaggagatattgcagataaacttgcagcctctggcgttggccatatagatttatatgatccagatactctatcgttgaataatctttatcgacatgttttgcccccacagtatacttcattccataaatcacatgcattatggcatagcctcaccagcaaatatccatggattgagattggaagttatactggtaagttacttgatttaagacgtcgtgacttactaatgaagtatgatcttatcattatagcgataggatctccgacccaggaacgattgtttcatgattttttgattaaagaaaaaattaatgtcccagttattaacacatgggttgaagggtatggcataggtgggcatgccgttctggcgataccaggaacaaaaggatgcttacgctgttcgtatgtagatccagctgatttttcaagaggattagcttctaacttgaattttttggctccgaatcaagatttgactaaaaaccatgctggatgtggagatgcgtttctaccatattcatacatagcctcaactcagactgctcttatcaccgctaatctcggagtaaaatatcttcttaataagattcgagagtcatccagagtgagctggaaggggagttctgaggatgcgatagcaaatggattcaaattaagtggaaggtattacgcatttacccgtatattagaagtgctacccttgtttaatgaagagtgtgatatctgcaatggataa

SEQ ID NO: 99977 - DNA, 1044 bp, Enterobacter aerogenes
atgagtcttcaaaataaatttaagaattttcatgatgctatcaagttaggaagaaaagacctagagtacacgacggcccgtctcaaggacgatagcattactgccgatatcgttgaacgattcaaagaggatggatatccggtcattgaggatttcattcaaggatctttggcgaccttcacgggtatccgggaaaaagggcaggatttcgatattgaccgtgcaatcgtaatcgaagcggagctggctccagaaaacccgataacccccaagcttgcagttcttgaagtgctggaagaccgaggttttaaaaatgctaagatcaaaaaaccttgtgtgactgcggattacaaggctgatgaccttcatatcgatatcccaatttaccgcaagtatgataacgggcagtacgaactagccgttggcaagagacattcagatgaggataatcgtgagtgggccagagcagcgccacgtgaacttatcgattgggtgaataattatgacgctaatgaaacttatggttcgaataagcatgaccagtttcggcgtattgtcagatacctcaagcgctggagaaattttacatttggcgatgatgtacgtcgtaaagtctactcaattggtatcgcggtcatggtcaaggaatccttcgactcctccatcaacgatgaaggcttcccagatgacctcactgcactgagaaagacaatcaaccacatgcttaactatcgtagctatttcactcaggttggtgtagataaatatagtgttaatgttacgcttccagtgagcccctacagagatatttttcatagcagcagtatcgtcacgggaacacagtttcgcaataagctcagcgcactgttgaaaaccttggataaggttgctgatgaagagcaagagtccaaacagtgcgagttgctgcgaagtgtattcggtgaagattttcctgagtgcgctgaaacatcatctgcatcgtcagctgctgttaaaactgttttcgcatctgccggagtagtggggacatcgcaaggcgcatga

SEQ ID NO: 99978 - DNA, 684 bp, Enterobacter aerogenes
atggccggttttattgaccatgaaaaagcgtttatctcactttttaatcagaccgcacgatatcatcaccgccataaggtattcgaagattttgtcagctgcagcgttattgcactggagaaccgtctctgtttcagcgaaaagcgggaagctaaatatcttcgaataatcggtggttatgaaaagccggatgttgtccgtatggcgcaactgctggctcatgtggttaacgggctgcagaatgggttctgtgattttctgggtaacgtatttatgcagctggaactgggcgataagtatcgcggccagttcttcaccccctgggatgtggccagaatgatggcgcagctgcaactgggggatgtgaaggctatgtttgatgaaaagcctttcatcactctcagcgaacctgcctgcggtgccggttgcatggtactggcttttgccgatgctcttaaccaggcaggctatgcgtcacaccgctatctgtgggtttccgcgacggatatcgatccgctggccgctggcatggcctacatccagttatcactctgcggcgtggccggcgaggtcgtcattggcaacgcattgtgtgacgaacggcggcgggtactgctgacgccgggccattatctcggtaactggtcgctccgtctgcattcactgcgaaaaaaggtcgcataa

SEQ ID NO: 99979 - DNA, 936 bp, Enterobacter aerogenes
atgtctgaatggtgccagaaccgttttgaaattaccggtaaatctgtctgtatcgatgtgttgttgcagtggataaacggtgcagacacgccgcgttatcgccacgcaatactgcagagtatacagctgttcctggcagggtgtgcggggatactgaaaccggtgcgaactgtctcgtacatcccctttcaggggctggttcgtcatggtgtcgggcagtcaacggccgctaaccttgcgtttgagcagtggctggagctgttgcagaaagacgtggcgctggatacggagactatacgccggattgaccggttgtatcaccagtccggcctgggggcgctgaagtgggaaaatatccctcaggcgtcacgggacatcatggctatgttgatgaaaaggcagtatgcggactggttcggtctggccggcctgaacgatgagcctgatgctgcggtttgctgggaacgtctgcgggaatacccggaacggtcgcagccctgcgatatgctgatggttattccgacgcggctggccacagagcttaatggctccggtgggctgctgacgggagtatccacaacgttgagcttctacagccgtatttacgggatggagtggccggccgggcataatgtaaacctgcaccgccatgccgctaacgggttaacgttgcggctggattctccatggtatccgccgtcaggtgaggtggtggccggtatttccgctctctttgagtgtgaagtgcgacatacatacagcgaaccggtcagcggcctcagtggttatgactgttatgatctcggggcgcatgtggatggccaccaggggttgccggtggacactctacagtccgcgccggctctgtatctggtcagtagtgaacagccgcatcctgaaccggagacggctggttacagcgaagcccgtggataa

SEQ ID NO: 99980 - DNA, 1053 bp, Enterobacter aerogenes
atggaaactgataactgtaaaaccacaaccgcggtctgtaaaaagccggcggcacgcaaaacttcctccggtaaacgtcgccgggcaggaacggccgcgacgctcaccggctgcggtgatatttaccgtctggtcactgaccggataattgtcgcgctggaaaacggtatactcccctggcgacggccgtggcgaaacgcgcagcaggggataaacaccctgatgccggtcaactcgcttaccggccgggactacagtggcgtgaatgttctgctgctgtggctcgcggctgaagagcgcggttttaccagcgaccgctggctgacatacaaccaggcacaggaggccggaggtcaggtccgcaagggcgaaaccgccacgcttgcggtgatataccgcgactggacaaagcaggcagaagacagcaacggcaacaagctgtttgatgctgacggtatgccgcagatggaaacggtgccgatgttgcgccagtttcctttgttcaatgttgaacagtgcgatgatcttcccgaccaggtatgtggcactgccaccgtcacccggccgcaggaggatttcgctggtgtcagtccggcacaactgcagcaggtcctgtcggtggtgaatgccaccggcgtgcagttttcaccccggccgcagaaccgggcgtattaccgtgccgccacagaccagatagtgctgcccctgacatcgcagtttgatgctgagggtgactactggtcaacggtgcttcacgagctggtgcatgccagtggccatgcgaagcgactgaaccgtgaagggataactcgggcgtcaaagaaatttggcgacccggtgtatgccttcgaggagttgatagccgaaattggcagtgcctttctgtgcgcacatctcgggataaccggtgatttgcagcatgaaagttatgttgacggatggctgtcaaaactgaaatccgacaaaaaggcgctgttcagtgcctgccggcaggcccgggaagcgtcggaatatttgctcgcgccactcaaccgtcaggctgaaacggcgtaa

SEQ ID NO: 99981 - DNA, 618 bp, Enterobacter aerogenes
atgttgcgttttcacggaaaagacctgaaggctgttctgaccgagtccttaagtaacgacaggccagtggtactcacctgtgacgtaaccgtgtctttgtccgttcaggatggcgaacgtttccgttcggcctccgggcgtgaagaccagttacgtcaccagacatttgcagattgctgtcatcccgacagggatcagggatgggctacgctggcccctgtgctggtcgacaatgctgttttcactaaacctctcgtcctgacggaagggcgtatatgggacatgctgacgaaaaatcatcagctgacactgaggctttcagagaacgatattgcggtatacagcggtgaacggcgttatgtgccggtggccggttaccgggatctgacggaccggctgcatgtgacggccaccgggtattttgctgcctgcagcagtcgcagcgagctgaaatactggcgtatgactgcattacggttgcttgaggatgttcattccgttgcgtgccgtcatgccagacctgcggaccatagccgatttctgatggccgctcataatctgcaacgccggacagaatgtgtttcacctgacggggcgctgttgcttctgagcgcctga

SEQ ID NO: 99982 - DNA, 999 bp, Enterobacter aerogenes
atgactgaacatttcttaccagcaggccaccctgttgtttacactatcgagcagcggagtaccgttccggtcgagacctggaacaaatttacctcagcgattatcgatatataccactgcctgccatgctgcatgcggccggtgaatccgcgccggaacaatgagcaaaccggtgctttctcacttttccatcccgacagtagtccaaaagctgacgagctggtcttcagcggtaaaacgggcgaaggttacaggcatcgtatcattaccatatcgcgtgagcgtacccgggatgtcctgagcgtggatgagattgaaacagagcatcagatgtcggtagatttgtttacccgcatggtgatgctggcgcttcataatatctgcggtgcgcattttcttgttcattccacggcaggtgcctgttcatgggcgctgccgctggccatcctgaaccgggcccgtgacgaccagtttgcgggctgggaaattcctgatgcggtgcagtatgccacatcgttttcgcaggaaaatgcccggctgactgaacaggctattgccggcagtctgacgctgagcgcgggaataaatctctcccgcgagcagtgggaggatattgccgctctggagttcagattgtatgaaccccaggcgtgtctttcagccgatccggaagccccttcgctggaactcgttttaggctccagtaccgctgatctggtgacgttgagtggtttagacgctctgctttactgggtcagcgtcaatatgccggactatgcggaacgcgttccggatcaggaaccgatatttctgtcccgcaatcatctcgcattactgcgcgatgacatccgcaacggctggttctcgtcgtacaacaacgatccgacctatggagagatgttctgtaccgagttgcagctgattgccgtgtgggcggaatactgcatccgtacgctggatatggagcgggaaagcgttttcctgtttgcgatctggtaa

SEQ ID NO: 99983 - DNA, 588 bp, Enterobacter aerogenes
atgaatgtttataagttagagcatcagtattcccgctcgcataagttttatggtgtgcgtacaacgttgacatttcacgaactgaatgtcctgtgcgcatatctgcaattgttacattttgaacttccccgtattgatggcgcagaagacaccatcgcagaggataatggagagaaattacttaaaaccatctttaatgctgagtctgtttatgaagaggaaaaatattcacaaacactggattttcatgataactggaatgaatactgtggcggccgtttgggtgaatatatgcatgagattattcaggttgccagaccagatgcgtacaaaaaattgctgcaaaatatgatagctgaatgtcgggatgtgatcagtcgatatcgcgaaggaaagttctggttggaaaaccctgacaaatggagcagcgatgttgaaagtaatattcatcggctccgccaccttgttgaaggggacgcagtaaaacctgagtggggctggcagacgatgggtggtgcttcgtgtacaggacgtgtttatgtgcgtaatgataatcaacccgacgtaccgtctccgtatgatgactga

SEQ ID NO: 99984 - DNA, 903 bp, Enterobacter aerogenes
atgtccagattcagtaagcaacttgataaacagctcgtcacgcttgcgcgtcaggggcagggtagttttaaaactgtcgcagaccgttcaagaattgccgaacgattctctgaacggctggcgaagttaaatattcagatcagggatgcaaagcatataaagactgtccatattcagagatacatccagagtcgacaggcagaaaaaatatcaaatcggacattgcaaaacgaaatggcggctgtacgttctatcatgtctgttgccggaagaaataaactggcaaatcctcagcatgaattattgagtaacaaagcgttgggaatttctggtgcaagccgggatggtactaaaaaggcaatatctgacgacacgcttcgtgaggttattaattatgcaatgaaaaaagacgaaggtgtggccctcgcggttcaactggctcgttatattggacttagaactgaagaaactgttcagtcagctaaatcattaaaaacgtggcagcagtcgcttttaagtggaaatgaacgtgtccgggttgtattcggaacaaaaggggggcgtccgagagagacaacagtttttgacagggaaaaagttctgacgcttttaaataaagctattacgtattgtgacgataataacgggaaacttatcaacaagccaaccttgcatactgcaatagaacgctatcgtaatattcttcgcgatgccggaatgacaggggagaatgcgccgcattctttgcgctatgcgtatgcaaaagatgctgtgaatttccatgtcaataatggcatgagccggaatgaagcggaggctttagtatcgatggatttaggtcatggagatggacgaggacgttatataaagcaagtgtattttaaagagggtttggatgaatga

SEQ ID NO: 99985 - DNA, 702 bp, Enterobacter aerogenes
atgaaatcttttcatgattggttttattcatcatgttacaattcatttaaagttaaaagcaagagacaagttattttaactatggagagttggcataaatgttctgagggggtggcggataaaattaaaaacgaaaaagggataagttctatatgccataaaggatgctcgcgttgctgttctttacatgtttccttaattacgccggatgtgttttttatagctgagaatttaacaaagaatttgagtgagtcaaagttgtttttcattaaaaaaaggctaaaacttcgagctgataaggttgaagaatatattgatgatagctatagaatggagtgtgtttttctcggaaaaagttctgggcagtgtgttatctataattaccgtccggaagcgtgcagacgtttctttactaatgatgaaaaagattgcattaaaagtaatggttcaccacttcaggatggtgcggtgttttattcaactgggattctttcttcttatatggctcttgcagcacataacaatgacctatttatagatagtcatgagatgagtaagtctttatatattgctctggataatcctttgctttttaaaaaatggctgagaggcgagcctaatttttttccgggtgttaagtgggaagggtatcatcaggaaattaaaaaaatgaatgctgatatgaagatcaaaataaagtaa

SEQ ID NO: 99986 - DNA, 558 bp, Enterobacter aerogenes
atgttcaggaagaaagtatcggttgtttgtattgtctctatgtttataacagcatgttccatggatgagttatcttcagtaaataagaaaatcagtgattttggatcgtcaatagcaggaaatcagtcatcgcagaatgaaccaggcatgcctaagttagcacctaaagttgaagccagtcaggattccacatcaaaagatttatctataccagttgatgtcgatactgccgctgctcgtttgcgccgttattataaatttatgacgacagatgagttaaatagtattaaaaatagagaaagtacttcggcccgtttggctgctgctgcgattgaggaacaaaggcctgaatggtcggcatcggcaggaagttattataaaatggggcgaaactggggggaaggcaaagatcatattacactggaggttgaaaagaatggtgttggaagtcgtgtctatattcagtttttttcttcaaacccacaacatttaacagaagcctatttaggtaatttgtatacgcaagtgaaaggtgttgcagagggcaaggttcgataa

SEQ ID NO: 99987 - DNA, 180 bp, Enterobacter aerogenes
atgaatattttcatgaaaaagctactgaatgcggtgctacctgcccctcaaccagacaatcacgctgacgacagatctttactgacaagtttcaacgatgatgaagcggaagaaacgccggcattgtttgatacacgcccttacttagattttgagcaatggcataacgataacaactaa

SEQ ID NO: 99988 - DNA, 1542 bp, Enterobacter aerogenes
atgacaacgaacagctatctggagtatttcctgaccctgctgggctggctggtcaataatggcctctgggacgtccttgtcagtaccggactgtttgcgctgccaatggcctttaaggtcgtgggtatctggctgaaggttcgcgaagaaggggaagatgaaggtaacaagggtatgctgtcgctaccccgtatcgagaatgcgctttatggtgcgttcttcgtgatgattgcctgttgcgttccgctgattcaggtgagcctgactacgctggaatttgataaaacccgagcgaaaacgtgtggaacctggacaccaaaagcgcctgatgaaagtggttacaataacattatctccagtatggacggcgaaagcgcagctgcgccagtctggtgggttctggtccataagctctccaaaggtgtgacccaggcggcagttgccagcattccctgtcggccggatctgcgacaactgcggtttgaggtgcaacggacattcattgagaaccgtgcgctggctgatgagttgcaggattttaccaacgattgctactcgcttgcgctttaccagtggaaacggcgcgatcaggggcagacaacagataaggcggctttgtcagacctcagttggataggcagcagtacctttcttaaaggagactacaccaccctgcagtcgaaattgccgcgcgggatgttctcctggagtgatgcccgtgacagtggtcggccgaataccggtaatgggggatacccttactgttctgagtggtggtcggcagcagataccggcctgaaggccagggtgatgaagctggttgatgacagctactggctgcgtttatctgcggcgatgaagatgattggcagcagccagactgattatcaggaggaggttatacgccggctcgtcagcccggtgaacctgacggtatctcatggcggtgaagtgtataacggctatggtggtaatgcggatatgactgcaatgaacgctgtttcccgtatcgccggtacggcaggtgcttcagttgcctctctgggcgcgttcccggctctggatgcgatgcgccaggcactgccgatggtgcaggccgttatgctgatggccatttatattatggtgccgttgatcctggcctttgcggcctatgagttcaagacggtgatcaccctgacgtttgtcatttttgccgtgaacttcctgacgttctggtgggaactggcccgctggctcgacagctggttgctgacggcgctatacagttctgatacccactcacgctttaatatgatgggattccagaatacatcggatgatctgattatgaatctggttatggggacgatgtttatcgtgctgccaaccgtatggatcggtgcattgtcttgggcgggtgtaaatattggtgtggctatcagcaatgcatctaaagaagggactggcagttcacatcaggccgctcagaatggcggaaatcttgtgaaaggagggattagcagtttccaggcgggaatgagtaagggaatgaacaaataa

SEQ ID NO: 99989 - DNA, 354 bp, Enterobacter aerogenes
atgaaaaacagtcaccgcgacctgctgcgtaaaacaggaaaagggttaaaagttgggacgctttatctgctggttctggcattgataatggtcctgggattctggctggccgatacgggaatgcgtcatccggagagcgtggcatccctgaagcgatggatgtacgcaacgcgctacggctggctggcgtggcggctggttatctactgcgccgtcgggtggggactgtggaaaatctggcatgcaccgggctttcggcaggaatatcgtcgtccactgctgcgcatcgccggcgccagcacattattctttctggtctgcgagtactccattttttccggcgtgggaggctga

SEQ ID NO: 99990 - DNA, 1434 bp, Enterobacter aerogenes
atgaacatcgaagcattgaaattggcgactggcgcagtgttactgcttgccggaactgtgggtaccctattgcctgtccgggctgaaatttcgctaccgcaggttaatgacagcgcttttggctacggcaaatccgttgacggcgcggtatccgataaattgttttataccttgggcggtgggtcggtgatatcgcagccggcgacgcgcagcaatatgaaaaaaatgggtctggatgtggggtggagcagtgacctgatgtgcggcaactttgacctcaaaaccacaattggcaaccagttaaacggcgtaaccgatggttttaaaaacctgatgggtgacgttattcagggtgcaactggcgcggtggccagcctgccagcaatgcttattcagcgggccaacccgggactgtatgacatgctgaccaacggtgtactgcaggcgaatgtctcgttcgacaaagcacaactgaactgccagaacatggcgaagaaaatgatggatttcagtgataccagcaagtggagccaggcagctatagctgaagaatataaatcgctcgtcaatagtggggaaacggacgcaatacgtgcagaccaaaaatatcaggatgcagatggaaccgctggcaaaaaatggattggtggtcagataagaggaggaaaagggcagaaggcgatccggccgacctatgatttggcatctgctggttacaacatgatgaacagcctcaacgtactaagttcagaaaccgtgagtagcaccagttgtaacggtggtgcctgcagtaagttcagtaatgctgaagaagctgcacaagccgtggtgagagttcttggtgatcgctcaatgcgcacctgcagcaatgcgtcgcaatgcaccagtggagataccgatgatcagcccggtctgtccgttgctggtacaggatttgccccgatgctggaagaagccacaaagaacaatacagagcaactggtgaaactggttaatggtgccgtaaaacccacggcaaatgaactggcgaagctgaaaacgggtggtttgccggtaacggccaatgtcattaaggcactgcaacgtgacccggataataccgcactgacagttcgtctcgccagtgagcttgccatgtctgatacggtcgaaaccgctttgttgatgcgccggatgctgacaacaggtatgagtgagccaaatgctcaggatcaacctattgcactggaagatggtgttcgccggattgatgcactcgatcgcgaaatcatggcattgaagaatgaaatggaccttaaacgagagctggcgaggaactcggtactgaccatcattgagcgggacaacgaacgtgtcggcacaaacccgatgattcagcagacggacaatgccgacagccggttccagaaacttgatactcctgatgcagagtaa

SEQ ID NO: 99991 - DNA, 993 bp, Enterobacter aerogenes
gtgaatcagcctccttcccgactcagaaaaacgttctgctctgccgctgtcgccaccgttctggccacagcgtcaatacctgcagcgtttgctgcgctgaatacggcacagatagtggccagtgcagtgacgcaggactgcattagttggcgggtaagaggtatctgttactggctgttctgtactgcattcggctgcaccgtaaaaacctctgtaaaggtcacccattttatcccggaagcggtggtttcgacctacgttgcgcccggtggaaatccctggacagagatggcttttgtcagccagacggcgggcgggctggaaaatgtcgttactggcgctttgtcaggggtgacagccggtggtgccaacccggcagatatgaagaacccggggcagcgtaaatctaatattcgcttcaaatacgccgatgccattgggcatccggccacgtctcttatcgggggcagtatcgccgggtattcctgcgacagcgccgccactcccctgatgccgtatttcctcagcacgctggactcgattgcctggcgaacgggtgttccggaatcgctttatcccgaggcactgatccccggtcgacgggaaatcggtagccaggcatccggcaacatgtggggcaacgtctacccgcgctccgggtttgtcagccagaccgatgatgacaaagcgtcggcggtggtggcacagcgtgtggcagacattatcacccggacaggccagccgcacgtttatcaggtgttgaaggggacccgccgcgacgggtactggccaccgggagaagtcacggaaaacaccggcactaagaaccataagtggcagcgtctggcgcctcagatgactcaaagctgcgcggtatttccggacgggagccacagcgcggctactgataataacgaggcctttgcgctgtggcagccctacagctgctgcaagcgtatggggcagagattcctgagcagcactgatttttga

SEQ ID NO: 99992 - DNA, 402 bp, Enterobacter aerogenes
atgaaattacgtgattttatccttctgccggcattgttgccggtatccgttctggccagcacggtggtatataccgacagccagcacttgcctgaaaatctttccccgaatgtcgtggttgtgttgctggatgaacctgaacgcctgcaggcgaaagtgtttggccagcttccggctgacccggagctggcagcaatgcaggccaggcaggtgatgtcctcccctcagtggcaacaaaagcagcagcaactggtcacggcatatcgccaggtagtgcacgcccgggaactcggtattcgcaaggtgcccgctgtcgtttttgacgaacgggatgtggtttatggcacaactgatgtcgcgcgggctcaggcactacggctgcaggcaggaggtggtcagtga

SEQ ID NO: 99993 - DNA, 3798 bp, Enterobacter aerogenes
atggctctattggatgtaataaaaggctgttggtcagcaaaagaaactggtgcttcgattaatgaacaacagggagtctatgataccttaacgccgaaaataattactgatagcagtgttgaaccttattttgatgcgctggattttgctttttccaaatcagatgtgaaaaatattgctattactggaccttatggtgcaggtaaaagcacagttattctttcttatcttaaatctcgccttaaaaaagattttatcaatgtgtcacttgctgatttttccttgtcaggaaagagtgaaaaatcagaatcagagagcgtagagattgaattaagcatactccagcagatcctgtacaaggaaaataaagataatcttcctgattcacgtattgatcggattcagaatagaaataaaaaacacattttttctcttttcgctactgtattaacagtggttgggccgatattattgttagctgtggcactgtttccaaaaaaaatcctgtcattatttagcgtagatgaagttacgctaaatacgatcattgatgcttatccagcacggttggtatttagcgcttttatgggaatagttggtttgttttttatcgttcgggctgcttccaaagctggtattttcgataagaaaatcaagcttagcaagatagcatttcttcagggtagtgccgatatggcatcccaggatgcttcttcactgcttaataactgcctggatgagattgtctatttcttttcccgttcacaacataaaattgtggtatttgaggatttagacaggttaggtaacaccgaagtatttgttaagctaagagagattaaccagatagttaataataatatccagggtgagccggttagatttgtctatgcctgccgggatgatattttccttggtgcagatatccggactaaattttttgactttattttacctgtgatcccggtgatggattcccggaatgcctacactcatttaaaaaacaaactaaatgattttccggccaatgagcaggcgcttcttaagcagatgtcattgtatataagtgatatgcgctctttgcaaaatattgtcaatgagttcaatctgttcaagaaggtggttgatgacaataggaatcaggcgaagattttttcacttatcttttataagaacatctacgcacaagattataatttaatagataaaaaatctggtgttctatattcattcatccacgattatcggttgcgtaaactgcatgaaagctatttcattagtttggataaaaaattagaacaacttaataataagttggtggagataaaaaaagaatctgcaaatactgataaggaattacggaagcagattgttagtcgatttattgctcctgaattatggcctattgtgcattttagctccgaacaatattacagcaatggtcattatatgactcatgctgatagtttatgtgacgatgaaacaaattttattgcgttctttagtaggaaatcacaactttatgtaggttatggtaattataattctaataattaccaacctattgcccattcatccataatagaagaatataacctaagagttaaggttattgccaaggataaagcagcagaatatcaaaagaccgtcagtgaaattgaggaggttagggaaaatattcgtactcgtaattccatctcactggccgaattattaaaattgattggttgggaaagatttaaggagattgctgaagtctatattgaaaaatgtgatgatcgcacaattattgacttggaacagttggaaactatccgcaatggattccgctttggcggcttagaggctctttattacctgttgaccaatggtcatatcatgcaggattttatgatgttccggtctgtctttcataagggaaccatctctgttaatgataatgactatatcaaagccgttggtcgtcatatgggttgtgaagaagtaaaccagaattttttactggacaaccccaaagatgtgttggcggaattgattggccagcgttatcaatatcgagctggtgctatccaccatcaaatcgtagcactattgcttgatagtcgtcatagcgttgacacaaaaaatttgtctgagatggttgcgatgatattccagaaaacctctacggatattctggctatctttaacgtattagaatcctgttttgttgatgccgattattttacccggttagtggtcttttccttgggagatagccgctatctggataagatgatcgcggtgattgaggaacaggaacgcagcagcatcgtcacgtcaattgttacgaagatggtagctttaatctcacctgaggtatcagccaatcaggaaaattatcgacaatttattgtcgagcaagggtttagtttgatttcttttgtagaaggtagcaatcttgaaccatttcttaataatatcaaacttcttggcgttatttaccatgatatttctttgccgatcactccctctgaaactcaggcattaacctttatcgccgaaaatcagatgtatactctggataagagcagttacagagttatcgttgctggattattacaatatgaaaatataccttgcgatcgggtagatgagctgccgtggtcattactggagaagtaccaattatccagcgtaaaagagtacgtgaatgacaatatcgatatttttgttcgggaaatatttatagactctaaggaaagtagtgaggctattgtatcggtgcttattcacccaaatttaagtgatgaccttaaaattggtatactgaaaaagatgcaattcactgtggtggatttacatgattttccagagcatattgatgctgatatggatgaattatcataccatgatctgttctaccgctacgatcgcatagtgccgggatgggatgctttattaaattatatttgcgaagcgtgcaaccttgaggtattaacccagtatattgaagagcatgctcaggttttgagccaaaaggaagtgagcctgattgatggggatcgctatgatctcctttatatgaaggttatttgtaatgataaacttagtgatagtgcatatttctcagtgttaaaaccagtttatattaatgttcatcattgggatgaacggttgagcctggataactttctgcgtctgataaaaaatagcaaagtagagttggatacagaatcctttaaacaggcagtgcaatgtttcatttcggatactgctaagggaagtattgaaccatttgtactgtggttttctcaatttaaagaaacctttttctccgatacagattattatcttcgggatgagcatgacgatacttttcttgaggaaatgttggttgctattcataactcccagtgcttcactttttcggaaaaagccacgctgctgttcaaataccgtgagcgttaccatgagtccttccttgatgagctaactatctctaacgaaggtttactcgctataattgcgctttctactgatgatgatttttccatgaatctgatagtcaggctgttaaaaaatggctatcgcagtcgagtggagatcgcacgtctggtgggcaggcttgaagaaaaagaattctctaagatatttaatcaaaaaagcgcaacactgaatctcagtaatggtcaacaagcggaactattcctgtctgctttacagcaagctggtcttattaaaaaatggtcacttcgggaagcaggcaaatatcacgtacactgctgttatgaagaggatgagaactacattgattga

SEQ ID NO: 99994 - DNA, 384 bp, Enterobacter aerogenes
atgatgacgctgaagtatccggttccctgtgtttgcggtaatgacagcccggataacactgttttcaccctgcccccgcagggtgaacccgggatatcagtggtgacgcaggctaatctgcaacgtctgagcgaacacatccgacagcgaatgaacggcccggtgaccgttacctgtcaccctcatcgggtgggcctgagcagttgtgtggcggtgacggtggagggcagactccgcagagcggttaatattcttatcaccgttagtgggcagggaagctggccggcagaggaggagtacgaacatccccgctggtatattaccgtgacggacgcggccgatatgctctatctggtactttggttaggtgatatattagactaa

SEQ ID NO: 99995 - DNA, 2865 bp, Enterobacter aerogenes
atgttttctcttttcggccgtaaaaatgaagtgaaaccagacggcacgccagggcagccagaggggaaggattctcctctggttattcatggtcgggagccactgacgcgaccgggccggatgacccggcaggatgaggcgaaaatttatcatgccaacccgtccatcattgattatctgccgtgggtggagttcctggatgaagaggagtgtcttctgcttgaggacggtatctccgtcggcgccgtttatgatgtgacgccggtggccacggaagggcgcacaaatgatcgtctggagcagatccgggatacggtggaagatgccctgcaggacagctttgatgaatatgatgagaatccctgggtggtgcagttcttctgccaggatgaagatgatgccgaagcgtatctggatcacttacgcggttacgtgaaaccgcatgcgcagcgcacggcatttacggaagcctggctgggtgaaatggaacgtcatatccgtagtatctcgcggccggaagggctgtttaccgatgcgttgatcaccggtcagccgtggcgcggccagcagcgtcgcacccgtatggttatttatcgctggatcgggaaatctgcgtcccgggacccgatgccgccggtggcgatgctcaaccaggcgtgtgaacgtgtggtaagtgcgcttggcggggccggtattcgttgtacccgccagaacggcctgcaggttcacagttggctgctgcgcctgtttaatccgtctccggactgggtggagaaatccacactgtatcatcaggcggcgtatgccgatccgcgcaacttcccggcgggcgtggcgccggtcagcaatgattttgctgaaacgctgtggtttacgccacccgtttcggatccggaaaacggcgtatggtggatagataataaaccacattgtgcgctgccggttgagagactgcgtactccaccggagccgggtaccattaccggtgaacaggcccgtggtgagaaaaaaatcaacgcgctgatggatatgtttccggaagggacactgctgtgcatgacgattgttgtgcagccacaggacaggctggaagaacagtttaaccgcctgtcgaaaaatgccgtcggggagaataccgaatccggccgtgtccgccaggatgtgaaaacggtgaaagagtatctgggaaaccggcataagctgtatcgtgccgggatcaccttcctgctgcgcggggatgatatggataatcttaagcgtaaacgtcttgatttgaccaccgtattgcttggggccggtctgcagccggttcgaccggaatttgaggtggggccgctgaatacctggctgcgggcgctgccaatgtgttttaacccggacagcgataaaaaatactggtacacccgtctgacctgggtacaacaccttgcggggttgctgccggttaccgggcgggaaaccggtaccggcaacccgggtttcagcttttttaaccgcggcggcgatattctgacgtttgatccactgaacaagtatgatcgtacccagaatgcgcatctgttgttgttcggaccgacgggggcaggtaagtcggccacgctgtgttatgccttttctcagctgatggcggttcaccggccacgtctgtttatcgctgaagccgggaacagttttggcctgcaggctgattattttgaaagccttggactttctgtcaacaagataagcgtcaaaccgggtagtggggtcagcctgccgccgtttgcctacgcgcataaactggtcgaagaagggctggcagcacatgctgttgatgaaagcgacctccccgatattgatgctgacagcgatggagagggtgaagacgaggataaacgggatattctcggtgagatggagatttcagcccggatgatgataacgggcggcgatccgaaagaagaagccgaaatgaagcgtgccgaccgggctatgatccgtgaagcgctgctgatggccgcgcatgcaacatataaagaagggaggcagatgctgccttctgacctgcagaaagcgttatacagcattgccggtgatgacagcgataaggggcagaatgtccgtaatgcccagcgtaaggcgaaagccgcagagatggcggaggcgctggggatgttcactcaggaaggcagctttgaggcggagctgttcaaccgcgagggggagttgtggcctgaagcggatgtgaccctggtggatctcggtcatctggcgcgtgagggttatgaagcgcagatggcgctgaccatggtgtcaatgaccaacatgattaacaatattgcggagcgggaccagtatctcggccgcgatattgtcttcgcggtggatgaggcgcatatcgtgacggttaatccactgttgtcgccgtatatgaccaaagtggtcaaaatgtggcgaaagttgggggcctggctgtggctggccacgcagaacctgaaggactttccggatattgcggagaaaatgctgaacatggcggagtggtggatttgcctcaccatgccaccggaggaggtgaaagatatcagccggttccgtgcgctcacgcctgaacaggaagccgtactactttccgcccgcaagctgtcaggttgctataccgaaggggtggtgctggccaaacgtattgaggcgctgttccgtgctgttccccccagtctgtatctcgcgctgggcatgacggagaaagaggaaaaggcggaacgccgggcgctgatgcgtgagcatcactgtagcgaactggatgcggcgaagctgattgcccgtaaactggaccggttgcgaggactgactgacgcacacgacgaggagagcacagcagcatga

SEQ ID NO: 99996 - DNA, 414 bp, Enterobacter aerogenes
atgaatctgaaaccgatcgttatggtattcaccgttgcgctgttgctgaacggctgcgcgacgacaaaagaagagatgctgccgactggcgagcataccatgcttgaactgtggaacggggcagacggtgaagggggaaccactcgtcagtccgctgttgcgagggacacgctgcgtcgtccgttaaccgacgatgaacaccggaaaggtacacaggacgatcgcagctacagccgctcgcaggagagtgaaatttcacagcaattctcccggttgcccaacccggatatggtgatgtacctgtatccccatctggctggcggcaacacgccagtgcctggctatagcactgtatttcctttctacagccagacacagtatgcgatgccaggtgaacgtacggaggcgctgtaa

SEQ ID NO: 99997 - DNA, 1506 bp, Enterobacter aerogenes
atgcagattaagtccaatgccatggtgaaattcattgttcccgcagtggtggtggcggggctggctgtgggcctgaaaagctgtaagggagagcgttcacctgagaatgcatcgggtgatgtgacgacggtactgaaaaatctctcacaggatgagcttaaggcgctcggagtggaaggtgatacgccggaagataccctgcgtacgctgataggtcggctgaatgacgttcgcgatcgccagaaaacgctggataagcagaatgccgatttgctgaaagagaatgagcaactgcgtaaacgcggcactaatgtatccggtcaggttgacgaggcagtgcaggggctgcgtaaagagtatgacaaacgtcagcagcagctacagaacgaacagaccagcctgctggcaaaagtgcaggcactgtctgaacagctgaaaaccaccgaccgtggtgcagcaagtgcaaaaccggcttctgacagcgatattccgctgggtctcggtctggatggtctgggtggcagcacccatggtaccgccactcggggcgatgatggtctgatgtgggtgacgccaggcgatcaaaaagcggtcgatccgcgcgatgccgccagtggtaaggcttcaccgcaatttcccacttcatttctggacaacaatcctctgacccggcagaaagcggcctatgagcaacaggttaaggggcacacgaatgagaagggggcacaggacagcgctgaacctgtttacaccctgccggaaaattccaccctggtgggcagccgggcgatgacggcgttactgggccgcatcccgattaacggcacggtgactgatccctatcctttcaagatcctgattggcaaagacaacctgaccgccaatgggattgaactgccggatgtggagggggcgattgtctccggcagcgccagcggtgactggactctctcctgcgttcgtgggcaggtgaacagcatcaccttcgtttttgctgacggtacggtccgtaccgtgccccagccagacgttagtgggaaaaacaccggcaacggcaatacgcagaataaaaccggtaccgacggcggcatcggctggatttcggataatgacggtattccctgtatcagcggtacccgcaagtctaacgcgtcaacgtatctgcctactctctttgcgctctctgctgccggcgctgccggggaagctctcagtgagggccagtacaccacgcagaacaatgttaacgggatttcatccacgctgaccggcagtgccggcgaagcggcgctggggaaagccctctcaggtggcatgagtgagaccactgactgggttaagcagcgctatgggcagacgtttgacgcgatttatgtgccgccgggtgcgaagctggccgtgcatatcacccgccagcttgccattgactatgaagataacggccgcagggttcgctacgatttcaccctcccgggtggggtcagcgacaacggcggtctggactga

SEQ ID NO: 99998 - DNA, 924 bp, Enterobacter aerogenes
atgaagacccgtaatgatacccgcgccgggctgatggcgctgtcccttttgctgtcgccgctggtctctctgaacagcgagctggctaaggctgatgaatttatgaaatgggagcgtatcccgttgcaaatcccgctgcaggtggggctggaacgggtggtatttgtggataaaaatgtccgggtgggttttcctccggcactcaacggtaagctgcgtgtgcagagtaccggcggggctgtctacctgaaggccgacagcgcttttcctcagacgcgggtgcagttgcaggatgtggaaagcggtgaggttattcttctcgatgtcactgccggtgaaaaaggtccttccgagcccgttcgtctggtctacagcggtgaggtgaacacggtaagcagtacggccgatacccgtcggcaggcggaaaacagcagcatccagccgggaagtgatgacggtacacaggcgaagcgtaaaaaggtgcaatacagcgcccccgttccggtattgctgacccgttatgctgctcaaagcctgtatgcgccgttgcgtacggtagaagccgtgccgggtatccgcccggtgaatccgcatttacccaaacgcctgacaacactgtatccgtctgaagccataacggccacgccgctagccgcctggggcgtggcaaatcgcgccgtagtggccgtccgtctgcaaaatactgccagccgcaggattgtactggatccccgggccctgcagggacagtttgtcgcggcgacgttccagcaccgctggctggggccggtgggcacgccggaagataccaccacagcctatatcgtgacgggcacgcggccggaaagcgctttcatcgctgaaccttccccgatgcgtaaggttgttcgtaccgcgaagaagggggttaaccatgcagattaa

SEQ ID NO: 99999 - DNA, 660 bp, Enterobacter aerogenes
atgagccgttttcgtcatgcggtcaaagaccgggatcagcatattctgacactgcgtattgcctgcggtgtgctggcctttttcctgttaatcacctgcggcggctggatgctggccccaaacaaactgactgtccataacccacctgatttacgtaccggcagtacccgaccctggtgggaagtaccggcgtcatcggtctattcctttgccttctatattttccagcagctcaacgcctggccgaaaaatggtgaagtggattatccggcaaaaattcatgcgttgtcagcctatctgacgccgggttgccaggactatctgaatgccgaggccaggaaaagaagcaacgccggtgaactgactgaccgtgttcgcgtggtttatgaaatccccggccgtggttatcagtcgaagagtgtcagcgttatcagcagagacagctgggtggtacgtctcgacctggtggcggatgagtattttcatgctgaaccggtaaaacgcgccctggtccgttatccactgaaagttgtgcgctgggagggggatgctgaacgcaatccgtttggtctggcgctggactgttatgacggtgtaccgcagcgtctggaggctgcaccaccgacggaaattcccgcgaaatcaggagtgtttcagtga

SEQ ID NO: 100000 - DNA, 357 bp, Enterobacter aerogenes
atgcagaccattcgctttttacctgaccgtctgaacagtgaaccggtggtgtttcgcggattcactacaccggagatggggcttgccgccctggccggtctgggcgtgggtctgctcctgtctctgccatttattcctcttgccggctgggtcattatcccgaccggcatgttactggcaccgttactggttatcggtttcggcggtcggtggctgagccgcattaaacgcggcaagccggaaaactatatctggcagcggctggaggcgttcaaacgtcgtcacagcctgggcaacccgacactgatcgttgatgcccggggatggtccctgaaacgaaccgggagagaaaaatga

SEQ ID NO: 100001 - DNA, 387 bp, Enterobacter aerogenes
atgtatcactttgcgtctgttgccacccgcgtgcgtcgtggtattgaccgcgttattaaccgtacgttcacgctggcgcttctggtctggctgacctgtaaacccgcatttgctgacctgcccactgtagaagcgcctgaatcaggaggcggcagtggcctgatggggcagatcaaaggttatctgcaggatggtgttgttattggtgggctggtagtggcagccattgcgttcattaacgtggcgattgcggcagttcatactttttctgaggtccggaatgagaaggccacctggacgaagtttggctccatcatcgtggtgggtgtggtgttactggttgccgttatctggctgctgggcaagtccgccgacattattctctga

SEQ ID NO: 100002 - DNA, 243 bp, Enterobacter aerogenes
atgggaatgacctctgcacaatccaccgcctttaaagcggcttccggcaatgtcgaggtcagcattctgcacctggtctgcatcggtgtgttgctggcctttctgtttctgtgggctgcatgggcactgtccgatgtgtggaccggctggagtaacgagaaagttcggaatgctgcgctgggtcgctttgctatccgggccgtgctcctgctggttgtgagtatctggatgtttgccagttga

SEQ ID NO: 100003 - DNA, 342 bp, Enterobacter aerogenes
atgaaccatccccgtccggcctggcgatatattgcctgcataccgggcattgccggtatgttgctgttggccacattgtccacgactgcacaggcggcagaaaaagacgagcttgcctcagcccagcgccagctggatcaggtgcaggcctcgcttgaacgtgcccgcttagcggcggcccaggccgatcctgctgagcaggggcgtttcttttttgactaccgtcaggccacatccgatttaaacaccattcgtgccggtattgaccgctacctggagccatcccgatcccagccccgggctttatctgtcagcggcaattatcgtcgggagcgtccctga

SEQ ID NO: 100004 - DNA, 369 bp, Enterobacter aerogenes
atgaaaaataagccctttaaatcaaacttaatcttagtcagaccgaggatctatattaacgacaatatctcgctggggccggggaaggttgaccttttaagggcgattgatggctttcactctctttctgcggcagctaaagatttggggataccttataaaagagcatggctcttaattgacactttgaataagggaattggtcagccagttgtaatcacttccactggtggtaacaacggtggtgggacagttctgacgccattggggcgtagtctgctgacctggtatgaccaagccgagacccacctcaatgagcaatctcagcaacagttaatcgaacttgaaaagatactttttggaaaatga

SEQ ID NO: 100005 - DNA, 813 bp, Enterobacter aerogenes
atgtcatcagaaatgaaacggaatgggaaaggccttttatcaggaacgttagtaggagctttaggcggcctgattggtcttggtggtgctgaattccgccttccaatcctgattggtagtttcaaaatgcccacgctggaagcggttatttttaacaaagcaatgagtcttacggttgttgccgttgctttgctcttccgcacgaaggccattgcagtagatcagctgttagcacatcttgatattgttatcaatttgctggccggtagccttattggcgcatggtgggctgccggaagagccataaaaatgccccgtatttggctggacagaaccattctgcttctgcttgtcatcctgtcattcgtcatgctttcagaagcatggatgcctttgcatgatagctctgctggattattccctcccggaatctcaaccattattgcgggtgttattgcggggttcttcatcgggaatgtggctgctcttttgggtgttgcagggggagaactcctgataccaactatcgttatcctttttggggcagacatcaaactagcaggcagtttgtcactcatgatcagtttaccgacaatgattgtggggttctctcgctacactaatgcagatgctttccagatcctgagaaaagagaaaaaactctttgtgtggatggtcatcggttccgttataggtgccgctattgggggccttatgctcggtatgttcccggtaagagtacttatgactctgttaggcgcggtacttcttatttccgcgatcaaaacctttaagcatacccggcaaagataa

SEQ ID NO: 100006 - DNA, 165 bp, Enterobacter aerogenes
atgaaaaagcttatgaccggcaagctggcaaatctttcataccatcttttgttttcatccatacaggaaggcaaatatatgcttcctgtacccatattttttatgatacctttctcgttatgtcaatttagacataacgagaaaaaaacatgtcatcagaaatga

SEQ ID NO: 100007 - DNA, 537 bp, Enterobacter aerogenes
atgaaaatcgttaacgcagaagaaaagcacatccccgccatacgtgatatctacgcccaccatgttattcacggtaccgccagctttgaaactgaaccaccgaatacccacgagatgcttactcgcctggaaaagatccatagccaggggctactgtgggttgttgcactacaggaagaaaaggtcataggttattgttatctcactcgctaccgtgaacgatatgcctaccgtcatactctcgaagattcgatttatattgcccctgcagctcagcgtcagggcgtgggaaaagcattactgcgctatgtcatcgcatgggctgaaactcacggttaccggcagttgattgccattgtcggcgacagcaataatcaggggtcgctgaaagtccatcagcaggtcggatttacagaaataggcacgctgaaagacattggtttcaaacatggccgctggcttgacacggttttgctgcaaatgaaacttggtgaagggaatagtactctgccagaagattcagatcttatgctctga

SEQ ID NO: 100008 - DNA, 795 bp, Enterobacter aerogenes
atgatgcgccggccattgtgcctgcagggggtgaacgtggctgaacctcagcgtaagagtccgcctccgccccggccggagaagcagcatggtctgctttataatgtgttctggggctggccctgggcactgatcggcatgctgctgggttcgctgatgctgagcctgctgattgagtacgccggtatagccttcttctggccggaagcgggggcagcgcacagtgaggcggtgatgaataccgaactgggctggctgtcgacagagttcacccgcagcctgttgctgtctgagccttctgtaactgttgttcgatgggtatcattagcgtatcagtggctgtttgttgacagtgggtttactggctggataaagcagcagaatgtgctgcagactggcagcgataacgagctgacccgtaatctgaacaactggagtgggtggctcgtgggctatctacatgaatatctgatggcgaccgtatggatatgcgtgattaccctggtgcgggtaaccatactggttctgtcagtcccgttgtttctgatggtggtgctggtttcgctggtcgaagggctgggacgcagggatctgcggcgctacggggcgggttatgaaagttcgtttgtttatcaccatgctaaaaagatggtgaaaccagcgatcgtagcacccatgatgctgtatctttcctggccgacggcggtataccccaacctgctgctgttgcctgctgccatattgctgggtgtcgctatcaccgtcacaacggcttcattcaagaaatatctttag

SEQ ID NO: 100009 - DNA, 2091 bp, Enterobacter aerogenes
atgagtaaccgctacgtgattgaagccctgctgcgtccggcggttgagctgaatactgctgtcgtggccggtatggcggcatatgtttgtgtacaggctccctgggctgtggcgctggcaccttcagtcagttatgtgaccgcgtctggcttcgcggtgttgtccgttgtgcgtgcccggcaggggatgaagatccttcgttatcgccgcaatctgacccggctcccccgctacgtcatgagcgccggacagataccggtcagccgtcagcgcctttttctcgggcgcgggtttcgctggacgcaaaaacacacccagcgactgcaggatacgctacgtccggaagtggcgaagtacctgcagccgggccggctgtatctggccgctcgctggctggaaatgaggacggagcagtcagcaccggggctgggaaaactgctgcgtacggatttgcccctgaacccggctcgcccattgccgccggttggtggtaatccggtgctgcatggcattgagccgaatgagcaggatgtctggctgacgctgctggagcgagtggggcacaccatcgtctatggcaccacgcgcgtgggaaaaacacgtctggctgaattgctggttacccaggatatccgtcgcggtgaaattaccattgtctttgacccgaagggagatgccgatctgatgaggcgcgtctgggctgaagcacaccgtgccggccggggggacgcgctgtatattttccacctgggctggcccgaaatctccgcccgctataacgcagtaggacgttttggtcgtgtttcagaagtggcatcccgcgtggcggggcagctgtccggcgaagggaacagcgcggcgtttcgcgagtttgcctggcggttcgtcaacatcatcgcccgggctctggtggcactgggggagcgtccggattacacgctgataatgcgctatgtgaataatattgccgatctgtatatccgttacgctgagaaggttatccgagagcagcttccttcgctgcaggcacaaattcagaataacgagcaggttctgggagatgatgatgtgccgcggaatatgcaggggcagccggatgcggtgcgcatctggtccatcgaagtggcgctcagctcagaagagggaaagcagctgtatgatcccattctggatggtctgcgaagcgcggtccgctatgaccgtacctattttgataaaattgtggcttccctgctgccgctgctggagaaactgacaaccgggaaaactgcggagttgctggcgccggactatctggatatgagcgattcccgaccaatttttgactgggagcagataatccgcaaaaaggccgtggtgtatatcggcctcgatgcactcagcgacagtgaagtggccagcgccgtggggaactccatgtttgccgatctggtgagcgtggcgggtcatatctacaagcacggtattcatgccggtctgccgggagagggagagagcaaggtcccgattaacctgcactgtgatgaatttaatgagttaatgggcgatgaatttatcccgcttattaacaaagggggcggtgccggcatgcaggtgacggcctacacccagacctcatcggatattgaggcccggatcggcaatgcggctaaaacggctcaggtccagggcaacttcaacaatctgattatgttacgtgtcagggagaaccgtaccgccgaacttctgaccacgcagctgccgcaggtggagatttacaccaagacgctggtctctggccatcaggataccgatatcagtgcgggccaggattttacctccagtacgcaggatcgtgtcgggacggtcaaggtgccgttgctggagccggctgatgtggtaacactaccgaaagggcaggcattcgccctgctggaaggcgggcaattgtggaaaatccgcatgccgctacctgccggtgatgtggatgataaactgatgccgcagagtattgcgaaaattgccgaggaaatgcgccgcaattaccacagtggtgaggcgtggtggaatgatgcgccggccattgtgcctgcagggggtgaacgtggctga

SEQ ID NO: 100010 - DNA, 513 bp, Enterobacter aerogenes
atgacattttctttacagcgtttactgcggaccggctgtctcagcctcgcccgtttactttttttgtggccggcgttactgaccggagccgtgatgctggtgatggccttcctgtcatatcaggggggcgtcacatcgcggctggattattacacatatgaggctgcccgctggcgcaacgcgccgaaagggagctttatggtgcggcgctgcatcgatgccgctacggacaatgccgtattccctgttgcaccgctgagcggggatgagtggcgtttgatggcagcaagggaaactgactgcccgacagtggcggaaccgtttgaacaggcagctgaaaacgatatccgtgcattacacctgctgatgaaaattgttctggtgatcagcgtttgcctggaactgtttatgacggttcgtgcccgtaggggaagggggcacagtggtgcggtggcgcatgttcgcatggcaaagggcggcgtccgtatcgtcagggaggaagataatgagtaa

SEQ ID NO: 100011 - DNA, 600 bp, Enterobacter aerogenes
atgagcgcactgcaactgagtgctgcgctgttggtcaacccgttgccggccctgcttctggcggcgctgtttatcatggtgatgctgcgtctgagctttcgccagcgggagaaagccagcgttcgtcgccaccgtcgctatcaggctgcggcggcacgggtgctggaaaaactgggcactctgccgggggacggccagcgtatgcggtacctgcgcaaaattaacccttatgtatttgaggaattgctgttgctggcgctggaacgacaggggctgacggtcgttcgtaatgcgtcttacagcggggatggcggcactgacggacaggtcattattgatgacgaatgctggttgatccaggccaaacgctacagccgggcgattacacctgcccatattcgcgactttgaccagcttcttgaacagcgtacctgctgcggttttttcattcacaccgggcggaccggaaacatgagtcgggcggtctgctccacctctccgcgtctttttatcatcagcggccagcgcctgctggatctgcttgccggccgacatggctggctgtcaggttgttcatattttcagaggacatctgtatga

SEQ ID NO: 100012 - DNA, 513 bp, Enterobacter aerogenes
atgaaaaaattgtttttaatgatgtgtctttttctgcccctgacgggccataccggactgaacgtcctcgctgacctcggcggagaagatgccacgccttattttgacggcattaataaacaacccggcctgccggaggcatcgccggcaactacacagccgccagtttctacaatggcagcgatgtttccggtcagcacgccggagatgacgccggggacggtggaggagcgtccgctacagttgccgggcattggtgcgcttttccttatcggtgatgacgaacagtcacggtactggctggcggagaatgcgcaggcgctaattgcccggcatgcggcaggcatgattgtcagtgttgacagtgcgtcggctgttgagtcattgcgggatctggctcccggtgttccgatggcaccggcatccggctctgagctggcccgccgtctgcagttacggcattacccggtgctgatcaccgataccggattgtcccgacaggtgcggccgtga

SEQ ID NO: 100013 - DNA, 675 bp, Enterobacter aerogenes
atggcatatcgccgcattctgatcgccctgatgctggctgtaagtggcagtgcaacggcagcaggtgagactgtaccggaagggtatatccgggtggccgttgcgcatggggtatcgccggaagcgctctattctgtctcgctaacggaaaccgcaatggcgccacgatcgattgctgcggtggtcaggcagaagacaaatctgcctgcggtgagtcgtccctggccgtggacgattaatgtggcgggtaagggataccgctacgccagccgtctggaggcctggcgggcgctgcaggtttttatgtcacgctattcccttaaacgtattgatgtcggtctggctcagataaacctgggctggaacgggcatcactttgtgtcgacctgggcggcgtttgacccgtacaccaacctcaatgccgcagccagcattctgcgcgagtgctgggagcgtaaaccgggtagctggctggatgcggctggttgttatcaccatccggcgggtgggcaagctgcagcacgatacaaaactatcgtgaaacgtcatcttgtccgtctcagcggcacgacccgccagccccctttgttgccgccttctttattaccgcagacagtggcagccattgcccctgaacctggttttatctggactgagcccgggagtgaaccctga

SEQ ID NO: 100014 - DNA, 705 bp, Enterobacter aerogenes
atgcaactgaaactgacctttctggcgctggtcatgctgagttcgcaggctctggcggccacggatatctccgtagttgaaaactcgcaaaccacacagagccagacgcagtccctgcagcagaaagccggcgaatgggggctaagcccggaggattacctgcggtatcagcaactgatgaatggccccagggggattcagtctccggggctggacccactctcggcgctggggattgaggcccgcacgccggcagagcgccgtcagtatgcggaaaaatgggttaaagaggagtttgcccgtacgcaaaaagaactggatttccagcgggaaatcaatacggcatggcaacggctttatccggacagactgccggtgaatctggggaatgctgccggtgttgcccgggataccggggggcgtctggcgttgttcgttaagtcgaagaactgtccgacctgcgatgcgcggctgtctgcggtactcagtgacaatcgtccggttgatatttacctggtcgacagcgaggggagtgacgataagttacgccagtgggcccgtgctcaccgtatcccggcggaaaaagtccgttcccgccagattacgctgaaccatgacggtggccgctggctgcgctttggcgacggaatgatgccggtgttgctgcaacagggagaaaaaggatggcatatcgccgcattctga

SEQ ID NO: 100015 - DNA, 723 bp, Enterobacter aerogenes
atgagcgaaaagaaaatcactgagtctgttcccgccggggaaaagaggcgtctgtggtcatggtggtctgctgccggcgtctgtctttgtctgatgatggcagcggccggctttgtattgtacgtgctggtcagcggcgtgactgacctggatacgcgtctttcacgtctggaagcacaggataatacagccacaaccagcacgatgttatccactcttcagtcgcaggtctcaacgctgcaggccggcctggccgataaccagcagcgcgtggccgcactacagaaagagactgaagcccggaccgggccctcgcaggaactggccactctgcgggcatctgcagcacggctgcaacaggtgcagcaggagatggagacccggctgagtgcgcttgctgaccagctgaatgccctgaaagcggtaccggctgctgcgattccggttccggaaaaaacaccgacagaagtcaaaaaacagttacccgttaaaccccgttcgacggctgttgttgcacgtcatgcgccgtttgtgctgaccggcgtggaaagacgaggcgcggagtcctgggcggcagtggccccccgcggttaccacagcctggcgcagatagcgcttatcggggaaggggaaacggtctccggctggaccctcgttcgcgcaggttacggcgaagcgactttccgtgtcaacgggcgcctgaccgcccttaaggtggagtaa

SEQ ID NO: 100016 - DNA, 597 bp, Enterobacter aerogenes
atgaaatttcaaccccgttataagaccctgtctgttgttctgccgctgcttttactggccggctgctcctctccacctcagaaactacaacagcgtgaagccgctgtacccacgccttccgtggctgtcacccgcaatgttcagaccgtcgcgcctgatgaatatgccagaacgccggaggtggtgcgttatgaccgttatctgctggtcagcacggatccgatggctgcccagcgcgatccgctgtcgcagattattgatatacgtatcccgtcatccctgcatccgacagtggcggatgccctgcgctataccctgaagcagtccggctattcactttgcgccacgggatcggcaaacggtgttctatatcgccagccactgccagccgtgcagtatcagctggggcccatgcgcctgcgtaccgcactgcaggtgatggctggcccggcctggcaactggaggttgatgatgttcagcgagtggtctgccacagtctgcgtgacgggtatcagttaccggccagtcagttaccgcctgtccaggttccccggaaggtacccaccccggctacgggagggtttctgaaaaaatga

SEQ ID NO: 100017 - DNA, 264 bp, Enterobacter aerogenes
atgcttactttacaaagtgagaatgatattcgcgtaatgaatgtctgtattgatgatgatcgcctgactgttgatctcatggatggacgcagtatctctgtgcccgttgcctggttcccgcgtcttgctgctggtacaactgagcagcgacaaaactgggagctgtgtggtgctggttatggtatccactggcctgaactggatgaggacctgagtaccgaagggctgcttcgtggtgctaaaggtgcgattccacgacattaa

SEQ ID NO: 100018 - DNA, 237 bp, Enterobacter aerogenes
gtgcctacagtattaaggatcggcgcttatcgattctacttttacagccatgaacctaatgaaccggcgcatgtccatattgataaaggcaatgcaaccgctaaaatatggttacatgatatcagtgtcgcgcgtagtgtgggatttgcttcgcacgagcttcgtgaattacaacgtctggttaaagaatatcagataacactccgggaggcctgggatgcttactttacaaagtga

SEQ ID NO: 100019 - DNA, 561 bp, Enterobacter aerogenes
atggcttcacgtggaattaacaaagtcattctggttggaaatttaggccaggatcctgaagtgcgctatatgcccaacagtaacgcagtgaccacgctgtcgatcgcgacttcagagagctggcgcgataagcaaaccggcgaaatgaaagagcagaccgaatggcaccgtgttgtgctgttcggcaaactggcggaagtggccagtgaatatctgcgtaaaggctcacaagtgtatattgaaggccagttacgtacccgtaaatggcaggatcagcatggccaggatcgttattctaccgaagtggtggtcaacgtgaacggtagcatgcagatgctgggtagtcgtcagcactcgggcagctcctcctctcaacaccagggctctcaacagcagggatggggacaacctcagcagcctgtatcaggtggtcagccgtcccaggttgggccgtcgtcaaccggaagctctgctgccggcatgccgatggattttgacgacgacatcccctttatcgggtgtggctatggcgttaatcgcgtgaccatacacgcaatctga

SEQ ID NO: 100020 - DNA, 204 bp, Enterobacter aerogenes
atgaataattcaacaggaattctggcagcagagtccggttttactttacctttgcaggtgctcaaaagcggtcgcggttattatatcggtacggcaaatcatgagggacctgtttcccgtgagtctgaagaatacttcagtacccataaaaaagcggttcaggcgttcaccactggtgtctggactcaacgtgagtgggcataa

SEQ ID NO: 100021 - DNA, 465 bp, Enterobacter aerogenes
atgtctgcaaataatcctgcttccggcaaaacggaatatttcaacctgaccattaaaggtctgggatatctcagcaatattcgccaggtcaatcttcagaacggctcttttctcagttgtgtgattaacgcgctgagtggtccgacggataacccggtatatgttcgctttgatgtttccgttgccggcaaagaagcgaccagcctgattggtcgctgtcagaaagccgttgatgaggataaaaaagtccttatcggcttcaccttaagtaatccgtccacggatatctttacgcttaacaaaggcgatcatgccggcgagcagcgtgtcagccttaaagcccgcttaataaaagtggactggataaaaataggccaggatatggtttataagactgaaaaaccggactccatgccgcctcagaatggttctgctcagcccgaatacgctgaaaattctttctga

SEQ ID NO: 100022 - DNA, 2046 bp, Enterobacter aerogenes
atgcagctttatctgtgtgagaaaccgtctcaggcgaaagatattgcgcgggttctcggcatcagtaaacggggacagggatttatcagcggtggcaatatcaccgtcacctgggccattggccatctgctggagcaggccagcccggatgcttatggcgaacagtttggtaaaccctggcgggccgatgtgctcccggttttacctgataactggaaaatggtggtcaaaccccagacccgggatcagtttacggttatcagtaagttgctgaagcaggccggagaggtgattattgccaccgatgctgaccgggaaggtgaggttattgcccgtgagctgctggcttattgtggatatcgtggcaaagtacgtcggctatggttatccgcgctggacgaagccagcgtccgggaggcgctggccggtattcttcccggggaaaatacggcaaaactgtatgacgccgggctggggcgcagcagggcggactggcttatcggaatgaatctgacccgcttgtatactctgatagctcgtgaatccggtgtttccgatgtactgtctgttgggcgggttcagacgccgacgctggccattgtggttaaccgtgataaagaaatcgctgattttgtcccggttccatggtggcaggtgcaggctctcgttgagaaagacggcgtgcgtttcagggcgacctggcaggcggcgacgcagtactgcgatgacgaaaagcgctgtgtgaatcagcaggcggcgaaagccgttggacaactctgccagcagcagaaaggtgcaacggttctggacgtgaatcagaagcgcgataaaacaccggcgccactttgcttcgatctgggaacgctgcagcaggtctgctctcgtaaatttgggatgggggctaaagagacgctggctgttgcccagtcattatatgaaacgcataaagcgacgacctatccgcgaaccgactgcggttatcttccgacatcgatgcagcaggaaattcctgatgtactgaccgccgtcgccaaatccgatccgtcagttgcaccggtgctggcccaactggaccgcgggtttgtctcccgggtctggaatgataaaaaaatcacggcacaccatgccattattcccacacgccaggcatttgatctctcgcgcctcagcgcggatgagctgaaggtttatcagcttatccgacagcattattttgcccagtttttgccgttgcaggagtctgatgtgaccgacgcctcttttaacataggcgggcagttgttccgggccagagggaaagtcaatgttgtcacgggctggaaactgttatttcagaaggaccatcagaatgagcaatctgaagataccagtgataacgatgccgacatggcgctgccaccgttaaacaaaggtgacaactgtattgtcaatggcgcagcggtggaagacaaaaaaaccagtccacctcccccgtttaccgagggaacgttgattgctgcgatgaaaaatgctgccagctttgtcagcgatccgaagctgaaaaaagtgctacgcgataatgcaggactgggaaccgaagcgacccgggccggggtgctggagacacttttctcccgtcattacctggagaaaaaaggcaaacatattcacaccacgttgctggccagggaactgatagcggcgttgcccgaaacgctgaccagccccggaatgaccgcgctgtgggaacaggcgctggatgatatcgctcaggggaaaatgccgctggatacctttatgcagaaacagctgcagtggacccgccatctggttgacaaagggcgagctgacacagtgaaaattactgcgcccgtgacgcctccctgcccggtctgtaagggcctgacccgcaggcgtaagggaaaaaatggtgatttctggggatgcgttcgttatccggagtgtagcggtattgttgcagggaaaaatggcgggaagggccggaaaacagcgcggggcaaaaaaccggcagcaaagacgaaagcggaattctctgcaccgcaataa

SEQ ID NO: 100023 - DNA, 756 bp, Enterobacter aerogenes
atggaaaagggtaaaaagaacgcggatgcgaaggtcggtaatgaagcatcttcaccgcgggcaggcgcactacagtccgcactctcggtagagcttcatactcactatgccatcagattatgggaagggcgtaagcaaagtgacagtaattcccgtagtctccatgagaaaaaacggcctgaaatcattagtatgccaaaggccattcagcgtgccggggtggcttcccgggattcagcagcagataacccttatgctgatatggtactggtgaagctggaaaccacgcttcacatggcgtcccgtaagatcagtacgatagtgaatgaactggatgtgattctgacagctgttcccaaagggataacgctttctgacattgcgtctgcgcatccactgaatatcagcgtttacagtcgttcccccctggggtaccggtgcgtatggcttctggtcggttacgaccaactggcaatgaaagcgtttcaggctttccattatgggctgatttcacgcgctcagcgcgatcaatatctcaacagaggcggacatgcggtcagacaggtttatggggctattcagccttattacaccgtggcggttaaccggagtgacattattaatctgaccacccgcgggaaagaggccctggcgcggttgggtgaacccgatccagatattttctccggtaaaaagcgatcttctttttcatcgcctctgcgggaacactctgttcgccagagcgaaaagcgctga

SEQ ID NO: 100024 - DNA, 219 bp, Enterobacter aerogenes
atgattaaaaagtatacggtgctggcactgccagcagtggttaaaaagcgtacggtattggcactgccaacagcggtcaaaaagtgtacggtgctggcactgccagcagtggtcaaaaagtgtacggtgctggcactgccagcagtggtcaaaaagtgtacggtgctggcactgccagcagtggtcaaaaagcgtgcggtacatactggcaatggataa

SEQ ID NO: 100025 - DNA, 1239 bp, Enterobacter aerogenes
atgacgctgcctgcggacagcctgatagcgtttacgctggaaaaaatgaatgcccgtctggcggctaatccgctgctcgatgacggacgggtacgcagcggcctgctgtttacggggaacatgcatgatgccatcccccgaaggctgttgctggatccacggctttccccccttgataagatgggctggatgatgatccgcctgtatgcgcagaataatgaaggcgcgatattccccagttatgatgagctgcaggtgcaactggcttccccgggtaaaggtaaagcctcccgtgaaaccgttagccgggtgttgctgatgttacgaataaccggctggctcagcctgtgtaagcgggttcgcgacgataaagggcgggttcgcggcaatatctacgcgcaacatgacgagcccctgaccttccgggatgcagaatcactggacccgcgttttcttgatgttgttgccgacgcctgcctgagtaaaaaccggacggtcagtcagatcgcccgggatgtgctggacgagattaaaaacgatcccaccatgcggcactatcacagccatctgtctctgcttgaaacccgtctgggtcgcccacaaaatgccggtcagttagcagcgcggcagcatccctcattattaaccccgaagccgggttcgggatccgaactcagtgtaaatcgaataaaaaacaaccatcaagaactgagtacggaaaccgaactcagtcagaatccgatgcgaataatacagagttcggattccgaactgccagtaaaatcaggggattatgacagggttcggaaaccgaaccattacgtacgtagtttcacacacagtgtgaataaaaaaacgtatgtggacaatccggttgtgttgcctgatgcgctgaaagccgtagtgtcgcaggaagaccaggcgatgttgattcgccagcttcaggctcttcctgaagaacaggcacaacaggtcctgtttgccctgcagaatctgatggccaggcagcgagtagacaatccgctcggctggatgctggcggtgatgaaaaaagcccgggaagggactttcaggcccgttaagcaaccgcaatcggttcagccggagactcagacgcgaccatgccgacctgaacaccagcctttttccgcgcctccgcgacctgtggtagcttctgaagagcaggtcaggaattacgtcaccagtctgcgggaacaactgagacataatacccgatga

SEQ ID NO: 100026 - DNA, 249 bp, Enterobacter aerogenes
atgaggatgaaaatcgttggccccgacctgtgggcttctcccggtgtgccatcgcagtgctgtcgtaaagccttacggctggtcagtcagtatcatcgtggcgatcgtaattatacccggcttgaggaccggggctgtggatacgtcaagattaatgttggtccgttctggcgtctgctcagtcgtaacgggggcagaacctggttactgctgagtcacgggcggtacaactcagcgatccgcaaatag

SEQ ID NO: 100027 - DNA, 609 bp, Enterobacter aerogenes
gtgactaattccggtggtttatctcaggctgccaacgggctgctgatgcaactggtgatggatctgaaaagtggctatctccgtcgctgtgagtcgctggggatcaagcgagaagagatgcagatgttgcaaggactctcccttgaggagctgcattatctcgcgaacagcgaagtttctgtggtcagcgtcagcatcgatcacagcaatctggtcagcatgctgcaacgggccagaatggagcaaaagcgcatgcaacgcatcgaccgggcgctggcgctgggcagttcgatagagctgatgcagacatttttcgggctttccagtacagatgtggcggcccgtcgcaggatcgccggtatcgaagcccgatccggacggggcaatacgctcggggatgaagacaatgcagaaatctggcggctgtggcagagatcaggcgttgaagaagtggaaagcccggacgggcttgacgtcatgatgctggccgcagagcaactgaatatccctcttacctctgtctggcatgctgtgaaaggatggcacagaaccacaccccgccggtctgtgggtcagtccccgaaaccctccgtgaggaagcgtgcatga

SEQ ID NO: 100028 - DNA, 426 bp, Enterobacter aerogenes
atgacgaagcatcaacgggtgttgctgtcgggtacctcccattgtctgtggtgcggtgtggtattggggctgctggccgcagatatgtatcccggtgtcgttccggcattttccggggccgttttacgggggctggctgttgccagcttcatttctgtcctgctgtgggtgatggtgagttacctggaggacatttcctggacgtatatctggggggcgatgttcctgcctccgctggccgcattacttctctgtcatgtgggctggctgggttacagctttattttctggaaatgggactatgattttgctctcttcatccgggaggcggttctgccagttgttttccttgtgtggggagcatgtaacttcttaatagtcccctttatctttttgtttatcttgtctcccggaggtgttgagtga

SEQ ID NO: 100029 - DNA, 723 bp, Enterobacter aerogenes
atgaataatgacaaacgccaggagcggctggtcagtctggtcaggaaactgctggaactgagccgaagcaacagcaatgcgcatgaagccggactggcgctttcaagggcgcaacgcctgatggaaaaatatggtatcagcgagctggacgccactctttcgtcagttcgtgacgttgcctctcagagcgcgccatcagaggccgaaaaggtgcctgagtggatgacccgtctggcatgggcggttggtcatgcctttggctgtcggccttacttctcatggcgcaatacatcatcgggcgactgtcgacgaaccgtaacattttatggtttcagtgaacggcctgccgtggcggcttatgcttttgatgtactgacccgccagttgaaagatgccactgcggtatacctgaaaacccagagtaaaaagctgaagctgtcgacccgccgaaaccgggcagagctttttcgtgccgggtgggttgacggcatgcgtcgcgtcaccacggtttcccgggttacagaacgggaaacgcaactgatgacccgctggatggataaccagaatatgaaggcggcgaccatccgggaactgaaaagatgccgcggaggcgatattgcccgccaccggggttatgaggcgggtaagaacgccaggttgcatcatggtgttgaaggtgaaaatacggccgccattggtcaccgggaggaacgtacgtcatga

SEQ ID NO: 100030 - DNA, 1665 bp, Enterobacter aerogenes
atgagccgtaaccgcacgaatataggggcgtccatgctccagccgggccgcagggcctcagggagcgttgagagtacaccggtggttgaaatgccgatggtactgacgattgaacagctggcgccgaacccggataacccgcgaacatcgcgtaatccacgttatgacgagataaaagcgtcaattaaagcccgcgggctggacacggtaccaaaagtcacccgcgatccggatggcgatccgaataaatacattttcagtgatggcggtaacacccgttatcagatactgacggaactgtggcaggaaacgggggaagagcggtttttccgcatccatgtgctcgtgaaaccctggcccggaaggctccagtgtgtgattggtcatcttgctgagaatgaagtccgtggcgatttgtcctttattgaaaaggccagggggatccataaggcgcggattatctatgaagaacaactgggaaaatcagtttctctgcgcgaattatccactttgttaaccagtgaaggcctgcctgttcataattcgacaatcagccggatggaagatgccctgaagtacctcttcccctggatgccggacctccttgaatccgggcttggcgctccacaaatcaggctattgcttgccttgcgccaggatgcggagaaagtctgggatcagttttgccttctgtctgaacgaagcgataaatgctttaccgatgtatttggtgaatgttgccgcaagtttaattcccccgaactgtggtcaccggaaatgttccgcgatgaatttattggtgatctgctgctggcgctaccgcatccggatctgaattatgaccgctgggtgatggaactggatcctggcgagcgtaaccggcgctatcactttggcgaaccagaagaggctacccgtcttcagggagtggtgccatcaccgttcactgacggcattcaggatactgcacccgagccagattttgccctgccgaaagcactaactgagtcgccgcctgccacgccagcggttacggaggaatggccgcagcaagatgaaaatttacgggtatcgccggaggacaataaagaggcacctttgtctcttccgcgcacagaggtacagcccgatatgtacggtggttccccggttatttcgggtgacggcatggggccggggctttctccggacaatgatgagacgcttatctctatgctggcgccggggctggaggatgagggagaggccctgcatccggcctgtcacattgccggagatgcgatctggtctgttccggcttatcaggatgatatcgaacatctgcagaatatggccttcatcatggcgtgggaactgggggaaaagctggggtgtgaagatgaaatcctgccagaccgcgccagtagtctgtcgccaggctattgcgctgcgggtgacagttgcagcgcaccggccgccttccttttgtcccttgcggggtgttgtccggcacagtgtccgacaaccgggatggatgttgtgctgatcggcggttctgcacagcaggatgtgccagttcttgatgatgaaaatgccataaaactgctgaggctgatgcgtgtcatgcgccgcctgcgggagctgcagcgtggcgtaacggcggtagaggaggagcatgatgaataa

SEQ ID NO: 100031 - DNA, 1371 bp, Enterobacter aerogenes
atggacaatacaaatattccccactcggcagaagcagagcaggccgttctgggcggattaatgctggataacgaccgctgggatgaagtggttttattgctggcaccggatgatttctttgtgggctggcaccgcgccatttaccgggcaatggctgagctggtcggtgaaagtctgccgctggatctgattacgctttctgaccggatggagaatgctggtttgctggagcgggttggcggctttgcttatctggctgagttgagtaagaacacgccatcggccgccaatattctggcatatgcaggggtagtggcggaaaaaagccggctacgcaaactgcagagcgtcggcaatatgctggttgctgacgtgcaggcgttgaatgcgcgctcttctgacgttctggaggtggctgagaaccagctgttctgcattgctgagcagggcatgctgcaggcaggtactgaaaccaccgtaaacgatgccatggacaagctggtcagccggcttgaagccatgatggcgctggacggtctgaccggtacgccaaccggtttcagtcaactggacgagatgacctgcggccttcagccgggcgatctggttttactggccgcacgtccatcgatggggaaaaccgctctggcgctggcgacatgtgccgccgctgtacggggaaaaccggatgattacgtttttgtctacagcatggaaatgccggaagaacagctctccatgcgtctgatgtctatggaagggcgggttgaacttagcaggcttcgtagtgcatcactgggtgatgaagaatgggcccgtctttcacaggctatgaaggagattattcagtggaacaatcgtctgattattgatgacacaagctatcagacaccggcaaccttacgtgcccgtacccgccgctatgtccgtaagtacggcaatcccgcccttattatggtcgactacctgcaactgatccgctcccccgaacaggaaaaccggacgcaggaaattgccgaaatatcgcgctccctgaaggcgatgggcaaggagttcgggtgtcccgtgctggcgctttctcagctcaatcgtcaggtggagcagcgggcggataaacgtcccaataacggcgatttgcgcgattcgggggcactggaacaggatgccgacctcattatgtttatctaccgggatgaggtgtataacccgggcaccatgacgccgggtgtggcagaaatcattatcggtaagcagcgtcaagggccaaccggaacggtgaaagtgcagtttgacggctgctatacgcttttttccgaatatcaggaagggggatatgacctcgggtaccacaggacaggaggtcgggcatga

SEQ ID NO: 100032 - DNA, 243 bp, Enterobacter aerogenes
atgagcaacatgattgttaatgccattctgacgcagcttctggagcgacagccttatgacgacaagctcgttggaactgaaccagcaacctgtgttggatgcggttgtacagacaataacgcctgcgtgaacgaataccgtgaaacctgctactggcttaaggtgaatcgcgaaacagggctgggggtttgttcctgttgccctgagttcctgagccacccttgcacaccagatttcgactga

SEQ ID NO: 100033 - DNA, 381 bp, Enterobacter aerogenes
atgaaccagaatctaatctggcgggctgtcgcttattcaattaacacctgtagattccaggacgaagttcatgttttcgtcgatgcgtcggatcaggaaacagcgaaagagcggatttacgagcggctggctgaagagtgggaaattagcagagcgagtcagtgggatgataagcctgcacgcatcgaatttcataatctctgtgatgagaaagaattacgcgatatggccctggggacgcgggtaccggcaggtatgccgttgcttgagagtggctgggggggagggagagcaatttatgatacgaagcctctgattctggttgcatccccacgtctgcgtgaagtgctggaaagtgcgttgcgggaggtgacggcatga

SEQ ID NO: 100034 - DNA, 873 bp, Enterobacter aerogenes
atgaaaattttacccgttatttccccaaaaggcggtgaaggtaaatcgactttcgctgcttatctcgccggtttccttgccgatgccggtgtaaagacacttcttattgatgcagactggactcagccgacggccagcagcatttttgccctgcagcaagaagctcctttcgggctgtatgaacttctcatgcagacgatccccgacccaattcaggctatttctcagacctcaatagataatctggaccttatttactcaaacgatccggacgaacttctgccgacagcgatgctgcacgcggcagacggtcgtatccgcttaaggaatattcttcagcatcctgcctttgcccgctacggggcaattattatcgactccaaaggtgccaccggggtgatgactgagctttccatacttgcgtcaaccggccgcgtcatgggagttgtgaaacccatacttcccgacgttcgcgagtttattcgcggttccctgcatatgttttcccgcctcaaaacctacgaaaattacggtatacacctgcccgatatctctattcttgtgaactgtttcgaaaatacgcttcttgaccgggaggcgatggacggtctctcaaaaattatcagcgagaagctgtatgacagcagtgtattgggagagcgaaatatgttcagtctgctcgatacctgtatcgagcaactggatatcttcaaactgggccatgttaagtcacagccggttcaccggcttgaatataaaacccggcgtaagggacctgcggcggcagataccatgtaccgccttgcctgcgagttgtttcctgagtggaaagccctctttgatgatgttctggctcggggggcgtgcatatga

SEQ ID NO: 100035 - DNA, 921 bp, Enterobacter aerogenes
atggatgtttttagttattcagttgtatctttaaatgaaagtgaaaaagaagaactgtcggcagtggtaagaggcattcatagcgaatgtcccggtcaaatacagagtcgctatctttccagaataaaagagataaaagataaaattacaagtagtagaatcgtgaaaaacttcaattttcatgatcccttgcttatcagcaatctacctgagtttgaaaacatagaactaagtaaaattctcctgctgacattaggtgagtcaatcggccgatgtgttgcatactctgattataatcaaagttacgtcacagatattcgtcctaccctcacctccagagagctgagcagcagttctgaattgctcacgatgcataacgatttatgctttgcatcagacagatgcagacccgagtatctggtattggtgccacatgtagcgaatggtgacatacctaaaaccctactggctacgtctgcacagttggtggaattttttacaaaagaagaactatctattctacaaagtgaaatatttgaaatgcgtgccggtgggaaattattgtggcccaatgaagaaataaggaaaatgaaaataatagagaaggaaataaatggaaaaatcaagattaaacttaacttctccaacataaaaccggcaccaggcctgagcgagtccatgtacaaacaggccgaagaattactggagaaactatcttctctggcgcttcgtacaggacgcgaaaatgggcacagcattcaaaaaggggaagcgttaatcattcctaataattatactgttcatggtcgtgatgtttttacatcagacaacatccagcgtcttttattacgttcctatgtcgtgtcacaggatgtcgttgatttgttttctggtaacaccatgatatccattagaaactaa

SEQ ID NO: 100036 - DNA, 1167 bp, Enterobacter aerogenes
atggaaaacgtaattattattggtggcggtcatgtgggttcgacacttgcagtagacatgttcctgagaagaaatgaaaccaacctcgaccctcatctggtattaatgcactacggaaatcatctgtttctgaaaaattcagggaaaagatcattcagatgtgagaatatcatgacaggggaagtcaatgaaacggtattcccttctcaaaatgttcatgcaataaatcacgacatcagacatctgatgcaaagtgccgttgcagttattattactgtaccggatattccattattacgtaaggtgctgattgaatatctggaagcgtgtccagtaaatccaggagcgacagtagcatttgttcgcgcaggtcagggcggacagctcgtccttatggacaaatggcgtaaaagctcacgtttgaataaattgcatttgctgatggtagaagacagtttttacggtaccagatgcattgataacatcatcgagtttaaaaggaaaaacatcactcgagttgcaacacttagtgaaaaacctgatgaagcaatggattgtgtcaatcaactgtttttcgggccatctgtgcctgacaatcaacatcagtttgaacgagtaagacctctggacttgcagtttgaccctctgggttacattattcatcttgctgttgctctggataagacaaatctcacaaaaacagcttctggaactcaataccttcattatagcgatggtgttcacgaggaaaatgccggtctcattaattcacttgatcacgaacgagtagcactcgctcgttcttatggtgctgagacacgactatttaccactatgttgactgagcaatatgggcttcctcaacaacctaccttccttgaaatggcaaagagcacaaaaagtatctatcgttcattatcagaaaaatcactcaactcacttaaaacaggccgtatgattcaggaggactatcctgggttattaacgatgagttggtttgctgaaatctctggtgaagactttatgatcacccgggactatgtcaaccagattactcaaatgctacaggccctgaaggtgaatacagatggccttgattattatcataactatctgaatgctctcaatttaaacaaatccgacctgatcggcatgctttcgaactaa

SEQ ID NO: 100037 - DNA, 966 bp, Enterobacter aerogenes
atgaaaaataacgatttcacatcagtctcatcattcggtaaaaataccagcgttgatgctaattattatcttgaacatggatttgcagatgtcagggaattaatttcaaaagaaatggtagaacatcttcgtgatattaacaatcaaacgaaaagcaatagtgcattcgattcattcaaaagaaatacatataatgtagcaatcgaagatgaaaaaatcctgtcctttatacgcacagaaaagtttgccgatcttgttaaaaaacttggttatgaaaattgtgtattcactgatgggataatttttgaaacggacagcaactctgttggtttcgactggcatatcggtgtgaccagtttcaaatatatctatccggaagacagagccttctctatttggatagctcttgatgatgttgatccggaaaagcaggatgggggtatgagtcttctttccacacaggcattctccggtcatgagttttacaagttacagtcaaaagtaacaaaatctcttaccgagggaaaatataaaatcccagcgatatttaaaaccgtccttggaccaaggttcagaactgaggaacaaaaaaaattcaaagagctttatccatttatacaggaaaaaatcccacacctgttcagtgaatctctttatatttcagggtttgcacgtaatttattcgacagtgaatcggtacgttaccgtctagcgcccggggatgcaattgcatttgataaagatgttttccataaaagcaatcgatttttacccggacctcagttatcacgtcgtgcatttgtcatgcgcttcattgatgtaaaatctcgttacaatcaggtaaattcagataaaacagggggcgatgtttccgttctggttaacaagatgattgctggtaatggtaatcactttgatatacaaaaaggaactgttatcaggactacatcagaggtaaaaaaatga

SEQ ID NO: 100038 - DNA, 903 bp, Enterobacter aerogenes
atgattacgtatatcatcaaaagaacgggtaatcgatacattgatatcagcagtggtaagacaattgatgcctattatccaaaaggagacatgaataagcgctcctgtcttgccgtcaagcacaaaattatccgctgcgaatcatttgaaattgagacagatatttcaaaagatatcacgtcgactgaagatgcttatctccgtttacagcttctttcatctcgtgaatacaaaccaaacgaaataaatctggaaggcatttttcagcatcttcccaatgtagcctggaccagtgcaggcccggtattccctgagtatgtacaacgtttacgccatattattgcggaggattatcatcaacttaccgtatttagcgtggataaatttccaaggatggttgactacatagtcccttcaggtgtgcgtattgccgatgccgaccgggtacgtctgggagcctacatttctcagggaacgactgttatgcatgaagggtttatcaactttaatgcaggtactttagggcaatgtatggtagaggggaggatcaccccaggggtaaccgtcggtgatggaagtgacgtcggcgcaggagcctctattatgggaaccctgtccggtggcggtaaacagaaaaatcagataggtaacggctcattactgggggctaatgcagggatagggatctctctgggagattcctgcattgtggaggccgggttatatgtgacgtcagggacgaaagtgacgctgccggacggctccgtcgattatgctcgtaatttatcaggcaaaaataatcttctgttccgacgtaacagcctgacaggtagtgttgaagtgctgacaactgatagcagtgtatggggaggtgttaatgccgttcttcaccagaacgactga

SEQ ID NO: 100039 - DNA, 744 bp, Enterobacter aerogenes
atgccgttcttcaccagaacgactgacacccagaatacttccgcagaccgcgtcgcactggttatcggtgcgacggggggagtcgggcagaaaagtgttgatgacttgctgcagaatgggtttcgggttattgcagtaggtcgtgatcgccataaactgggtgtgatcgtcgccaggactaagctgtacaaaagcaagcttcataccatctgtgctgacattcagtctactgaagatgtgaggggtatccgggaccgaatagcggagtttggccatttggatttgctgatacttgcagcagggatcacctgtaataaaaccacaggggcaacaggacaagaaatacagaatgtaataagcagtaatctgcttgggcctgtttttgtcataaatgacttgttgccattcctattgagagcggaatcaccgtcggtgatctgcctctcatcaagagcgggtaaaataggcttcgcggataagggcatttatggggcgtcaaaagcaggtttacagctctatatggcagccttatcgtcagatcctgcgcttaataaaattcgttttaccgtattatgtccgggatggattaacactgcgatggctattgaaggtggatgcaagagagcaagcaactctatacttcaacctgaagatatttcgtcgttgatgatctggcttgttaactctcctgaaagagtcagaatcaaggaaatcgttatcgaaacgtctcctgatgagcattaa

SEQ ID NO: 100040 - DNA, 987 bp, Enterobacter aerogenes
atggaatttctgaactacaaaaagtgtattattctggcactgctaatattcagcgcaagtaacatttctatatctgaattaaggagtcagtatttaataatatttttttatgcgctactaaatttagcatattctttatacagtgtagtacttaaagttgtgatttctgatgctgagaaaataaacaaatcaaggctgttttcgataaattacaccatgacaaatgttggatgggttattgggcctttactagggagcctttgctctggactcgatggtcgcataatgttctggatctcaggagtaataggtgttttgctcgcttcatttttcattttatacaaagtgcgattaagtgaggagaagcaattaacaaaaaatgctcagtgcgctcctgttgcgacaaaacatcggaaccactctaataacactttatgtttgataattcttgctggatttatttattctttttgttatggcagattttcatcaagcataacacaggtgcttactgtaatatttaacaaggaaactacataccaaattattacgtcgctgatggtaacaaatgcactttttgtaatcttactccagatcccattaggttcaagggtatctaaagataacgttgtcttaaattcttttattggtagctgtagcttaattattggcgtgatggtcttcgcaggatctttcggacatttaactatgtgggtcacagggatgatattctttacactgggagaggttctccttaatccggtgctgtatttgatgttggattctttaaagacaaatacgagcaaagccagtctcttttctttacagatgcttacaggtgtgggagcagctatcaatccggcggcaacaggatggcttgtagagaatattagttcaggatcaatatttatggtcatcgcctttgccgctataaccggtttttttctcgttgcgctggctttaaaagactggagaagatatgcataa

SEQ ID NO: 100041 - DNA, 543 bp, Enterobacter aerogenes
atgcataatttatttttccttacctgtgcttcgttattgttcattcctggacctactaacattttgatttttaattcaggatatagcaatggcttcaataaagccccatctttgatgttatcagaatggtctggttatatcatcagcattactttatggtctatcgctgcaggattattttttagttcctatgggtgggtggatatcatttctaagattgcatgttcattgtatcttttcgttctttcaataaaactatggttttccggacatatagaaaatactaaaaaggtaattattgcaacgataattttccctgtaaaaatcacagatgatttatttttatactctgagattttaatacgctttaccatggttttgtttaccgcatcggttttttggttgtgttcagggaattttataaagaatgaaacagatggacattctgttaaaatagcgatccgatatttttccgttctgacattaataagtttcagtgtctatatattttatcagggtgtgataaaaatatcatggatttaa

SEQ ID NO: 100042 - DNA, 1269 bp, Enterobacter aerogenes
atgaaacatattgtagttatcaatagttctgaattcagtggtgttgagttattagataaattgcttaaagaaaattacaaagtcagctactttcgtaatcttgcttacatacgggactgggactcctccagaacggacgatgttcttcgacgtcttcataatgttattgatctacctaatacacatacaccagaaattgtcagagatgctgttggtattttaaatggcagtcaaccggttgatgcacttatttgtatcgatgatttttcattagaagctgctgcttgtgcagccgaacatataaaagtaccatacagcagtgtgaatgctgttaaagcaaccaaaaataagttactgtcacgccagattctcgaaggaacagataaaaatgccccttgggttattcatgaacgtgattatcataaacttccgtctgttctgacgtccgtagaattgccggtaatagtcaaacctgtcacatcagcttcaagccggctggcatacattattaaggagcgggctcagattaacctccttattaataatatcgaggaagaaatcaatcagttaccatcatcctatacggatttctttaaccgtggttttcttgtagaaaaatatttaactggacctcttgtttctgttgagatcggaagaataggtaattcttattacccatttatggtaactagcaggattcgttgtgccagtgataacgttattgaactgggtagtgttatgccttcttctcttaatgataaggaggagcaggaatgttttaaactggcaatatccgcactggataaattaggactcgataatggtatttttcatatcgaaatgatttacactaattccggccctgcaatagtagaagttaatggcaggcttggaggtcgcaccattccggttctttatgagcttgcgactggtaatagcatgtttgaacatcttatcgatattactcaacgtgctgaaccaaaagcagagtccatttaccaggggcaaaaagcggtttcgtttttctttaaagcggaacaattcggtaaagtgctggacggtacatccagagcgttaccacaaaatctcgcaagttatattcaatcttttgaatttatgaagaaacctagtgacaccttgcaaaaaggtgagattctgggatggactattgtatcagcgcggcaggaagagatctggaatgttctccatgagctgattcagtttgttgaaacttcttcaggcgtggaagttaaaaaacctttaatataa

SEQ ID NO: 100043 - DNA, 237 bp, Enterobacter aerogenes
atggtattcccatttcacacccttgccactataccgcaggaaggtccgtggccccagtcgacattcagaccaccataccaacaggtgggaccgtggtcccggtcgacactcagtccactataccaacagatgggaccatggtcccagtctgtgcaagtggcttacgacaaaaaacagatatatgtcctttttatcatttcacaaataaatacagatatctgtggcaacaaaagttaa

SEQ ID NO: 100044 - DNA, 510 bp, Enterobacter aerogenes
atgaccgaggagaaaacggtaactggcagtattgccagccatccaggatttggagttttatgtacgcttgcaggcgtcgcacttacaagtttttttagctggcttggagttcatcagtcggcggttatcagtgaaaaaacatcctgcatatccagaattgatactaatgaaaggatattgagggaacactctgcggagtttatgtcatccatcggcgatttaattaattatacggtatttcctccatcaaacagaccagaagatttatcaaaagttgctggccctgtcataaagcagggttttgctattagtgcctatgcacctctttctctgtcattaattgcattaaagatctcgatgacagtacagcaagcatcgttagcatcgatgggttatgctaaccaggaggcagcaatagcttctgtaaacgaatcgtttgggaaatggccatcaaccttcgctcattcaatgcaagaattcgataaacagcgaagccagtgtggcaaatag

SEQ ID NO: 100045 - DNA, 222 bp, Enterobacter aerogenes
atgaactatgcaggacacgaaaaactccgcgcagaggtggcggaagtcgccaacagcatgtgtgacctgcgggcgacgctgaacgggatggagcaccgctatcgctttgattccgatgtgctggccgaacgcctgacccgtcagaccctttttcgcatcaatgccctgtttatggcggcatacaacgaaattcttgagctggatgcctgctttaaggactaa

SEQ ID NO: 100046 - DNA, 420 bp, Enterobacter aerogenes
atgtacggaacctgtgaaaccctctgccagttgttgcgtgaacagtatcccgcagaaaccccgctgaacctcattatttggtccccggcggatatcgaagcactggccgacggaatggaatatgccgtttcggagcaggacacaagggcggtactggcgcgtatggacgccattccggaggaacaacggcttgagtcgggcgtgtctgccggtgcggtgatggatctgattgaacaggtgaaagaggccgttccggcggtgatggtgccggcggatctgcttgaaaccctgctgaccactgccgaacaggcgttatggcacagggaatggactgctcgtgacagcaatcatccggtcccggaaagcgttacacgtcgcctggctgatgcggcgaaagttcgcgcattactgaaaaactga

SEQ ID NO: 100047 - DNA, 783 bp, Enterobacter aerogenes
atgcaggaaaccaccacgttaaacgcccttgtgatgcgccgtgcgcgcgatttgattgctgattatggatggcctgaccataccgatgttgatcagcgtgatccggtcaataaaccgggatggataagcatttatgtccgtctggatgcggcaaatattgttcatctgcttcctttactttgtatcggtgacgtacccgcagagctgcaaagtgccatgacaaaaatagccgggacgccagcgcagattattttatccggcagccgctatgccgacgcgccgcagcttccggaggacggaacacagatagctttcccctgggccggggaatggctgacggagccggagattcaggctgtaacgaattgcctgtcccgcgccgtgcgggatgtatcccggcaggtatgggaggatgcgcgccggataaaggcggcactgaacacgcgcggggaaacgctgttttatcgccagacccgaaatttccgtctggttgtgaaggaaaacgatatgccctgctggctggacgacgatggcgataatctatcggtggtgctcgatgccatcctgaacaaaggggcgcactacagcagcgttgagttctttgttatcagtgacaaagtggatcaaatcctggcatgtggccagatgtgcgatgtgctgcgcattccgggtgagcctccgcgccggtggatggatttaaccctgttacatgaggtcatggcagaagcgcgtgcagaaatcagtcttgtccgcaatgccctgtcagcaatccggccagtgtag

SEQ ID NO: 100048 - DNA, 531 bp, Enterobacter aerogenes
gtgacctgttcaacagcggctatgtgttccatggcggctacgtcttcagcaactgattttccccggcaggcggttaagccgcctgtcagcccgcgcgcaaaaccctggcaggctttgcctgccggcgaagttcgccgcgcctgcggcgccgcgcatctccgccagtgcctgatgcccctgtggtgtcaggatatgaatacaggtgtgctgcagctggtcagtgttatttctgttctggcgataatccctgcgttgccgttgccgttgccgttgccgttgccgttgccgttgccgttgccgttgccgctggcaatagtgtccataccgatggcgtactggctgatatcgctgttctgtcggtttttcttcctgttgtgtctgcctgtgggcgacttccctgacgggaaccggcgctgtcgtaaacggagccggcaagccgtctccgccctgccgggcttccatcgcgctgtcgcaacatcacgcttgcagcatccgccaacggatgcgccgctctcaccagcccggcggtaa

SEQ ID NO: 100049 - DNA, 678 bp, Enterobacter aerogenes
atgtgtgcgaaggatcgtagtcaaaatccgtttgccagtcaaactgattccattcattctttaggtgaaatgcttaatatttcatcttctttagggtttatccggaattgttctggaaaatttattctttccagccctcttttcgataaaactttcttaacaaactgttctcttgatgcttggtttacctctcttacagaaagcgtcagttatgagttgttaaaaaatgaaattcatgcgttgtcggaatgttctgcttgtatttcgaaaaatatcattattgatgattttgtctggactgtttttattgaaggtctgtattttgatagctcattatatagtaagtggatctttttcaaagaaaatcagatattgcgtggaactctagaaattaaggaggtagatgttaggggattagaaagatatcttggtcgtatgagcagtgttgattttgattcatggaaagtctttaatctttatgccattggatttacttatcagaaaatatccaatatcactggcttatctgaggataaatcaaaaaaaatagtgagtgcaattaaaaaagatatttcgttcaataccagagatggcttgctttattctatattatactcggttaactatagcaaacttgcaatgaatgtcattgatatattatctggcaatgtaaattga

SEQ ID NO: 100050 - DNA, 216 bp, Enterobacter aerogenes
atggccaccactaccggtgcggatttgatgaagtctggtgatggcaccgtaaaagcgacatttggtaaaggttcaagtgtcgtgaaatgggtgatcctggcggaagttattgtcggcggcatcatgtacatgatgaccaaaaacgttaagttcctggcaggttttgccatcctgtcggtattcgttaccgtcggcatgtctgttgccggatattaa

SEQ ID NO: 100051 - DNA, 399 bp, Enterobacter aerogenes
atgcatgcttacataaacggtatggatgtgtggtgggctatcgtcattggcctggtgctattatttgcagggattattgggctgttcctggcgtgtattcttcccgagcattatcaattcaggggaaacctttttctggctggagcgttcactgcgctggctggctttgcaatctcttttgttatggtgaagttaacttatagtaccagcgagatcgatgctggccggcactggaaaacagagtgctcacttatagaggcaaatgtgcagggcggttttttgaatgacaccataaataaattaaggtgtgagggggttattgttaatgttccagtgtatgcctatgaggcctacactgaacagtggcagttattacaaaagaaaaaaggtggagaataa

SEQ ID NO: 100052 - DNA, 312 bp, Enterobacter aerogenes
atgcatgtcatatctaaagaaccctttgcagaggctacgagacggtttccaaatgatgccgtagcgcttaaagctttgtatcgtcttgtgcgagaaaaggatttcgcttcaccagttgaactgaggtcagtgtttccgagccttgataactttaagtacagaaacaaatggtgggttctggatgttggtggcaataatttacgtgtaattgcttatattaattttgtaaataagcgcttttacgtaaagcatattaccactcatgctgagtacgataaattgacccgctattacagggagaacaaagaatga

SEQ ID NO: 100053 - DNA, 417 bp, Enterobacter aerogenes
atgattgctacaacgaaagctatcgaagcaactaaagaactggtagccgcagtacctttcctggggggcagtgccaccgaaactgattaccgtgatgctctggcactggtagattatctaattgaaaatgatgatgaaaatccgctgattgattttcttgccagtaaaatttctgagtatgaagacaactgtgaatctttcgccgatttcaacaattccattgctgaaatgcctgttggtgttgcattgttacgtacgattatcgatcaacataagttgtcatactctgacctgaaagaagagattgggtcaaagtcgctggtgagtcagatcctgtccggacaacgctcgttgacaattgctcacattaaggcactttccgcacgttttggcgttaaggctgaatggtttctttaa

SEQ ID NO: 100054 - DNA, 3237 bp, Enterobacter aerogenes
atgaccggtacctcagatctgtctgccatcgcgcagaaacacacagccgtgttgcaactggccggttaccagactgtttttgacatctgcgcagacggccgtacagcttttatccgcaccctgcgtggccagatttcagttgaagaggcgcgctcggtgtatcgtgatgcccgccagcgcgcggcgcaactgaaaaccctgtaccgcgcctggcagctccgccaggagccggtgacgggcggactgaagaagctcgcctccgctccctccgcggccctgcacgaggcgctggtgcgcaacatcggtggcgacggcgacttctctgacctgattgagcgtagcagcgagtacgccgacgcggcctccattcagtccctgttttccccggggcgctatgcagcagcgctgtacgcggcggcaatccgactgcacgacagcgggagtgcgctggccattgacacacgccgcggcgacctgaaggacctcatcctgagcgagaccaccatgaatcaggaggtctcttcgctggatattctgctggaggtgctacaggcagaaccgaaaaacacgctgccgggcctggcggaggcgtatttcccgatgaccctgccgtatgacgacagcctggagcagattaccaccgcgctggcggcacaggggcgcaacctgaacggcgtctgggatacgctggcggatgcgcaggcgcaggcctttacgccggcgaatacggggaccctgacatcccgggccgtgcgggcagcgtcgtcagagggcggcaccttttacctgaaggcgcagggtaagatggtgtatgtgaccaacgacaccctgggcgactacgtgctggcggccaacctggtgttaggtgaaccctacccgcacgtgaaggacagtgccgtggtggcgctgaagctggtccgggcggcagacggaaagctgtacctggggttgtccggttcgctgaacgacttcacccatccgctggcggatgtctggctgaagggctcgaacgggcaacagaacaaccgggacggccgctttgccgtgctgacccgtgcagagggcgccgaagaggggctgaatacgaacagccatcttgccgtcactcaggaagcacagaacgatatcatacggctgcggaccagcagaggctatatcggtctgagcgaaaccgggacaggggagaacctgagaaacaccctggtgctggacgctgaaaaatcggacgcgctgactttcacgtcatcggcggatgaggatgggaaagtgattctgccggtcgttccgctgccgccggcgccatcgctgcccccggcttcgccaaacccgccaacgcgcaccaccctgtcactgacgccggtcagctatcagctgatggttaacgacgcgctgacggagagcgatatcgcgaaccactacggtctgtcggagacctcccgctccgtcggtgacctggtgacgacgctgaacgtcatcgacaccttctgcgaaaagaccgggctgacgtttaatcaggtgctggagctaaccgcacaatattcctgggacacaagcgcggcggaatcacaaaatcgcgggcgttatcaaaaatatggtcagggcagttccggtatcaccaccaataaacagtatggtgccaatttcctgaacagcccgaatggctcaaagaactcgctgtgggtgaccccgcaggcggaaggggagccgaggctgaacctggcgaccagtgacaatgttaccggccttgccggcaacgccgaaaagcttatccgcctgcgtaacaccaccgggctgtccttccgcgagctggactggattatcgtgaacgcctcccgcgcactgggctatgagacgcccacattggatgccaacgtgctgcgtgccatcgccgccgccgtggacctgcagcagcgttatgggctcagcccggacaccttcaccgcctttatcggcgcggtgaacccgtacgcggcggaccaggagaagagcctgtatgagaccctcttcacctccccggacggcacctttacccagccactgtccggaacgattctggcgaacggcgatgcaggatatgtgcagcagcgcgcgacgctctgcgcggcgaccggtgtcaccgacgacgagctgagccgcatcctgaagtactgtggtctgaagacgggggacgcctttgatgaagaagtggctggccgtatcctgcgcttcggcgccatcgcccgcctgctgggtatcaccttcgcgcagatggaggcgctgtgccgtctgacggacggcgatatcccgctcgttcgcctcggcgcgcctgcaggtggcggcctgccggcgattgacctgattgcctccctggagccggtgatggcctgggtggaggaaaacggcctgaccctgattcaggtgcaggcgatggtcagtgataactacagcggcaccgctactgcggaaatgttcaccttcctgcagaacgtgtaccacagcgtaaacggcaatgccccggccacccgtacgggggaaatgggtgatgccctgcgtcagaaggtgctgcgcgcactgggtggcggctttggcgtcaaaaccggtgtgatggcggcggtctccgactggctgagtgccgtggcgggtgtccacctggcggactactggacgggcattgcagatttctttactcaggagaacgccacggtggaaagcctgcagcagagcgccggtgacctggtggagaacacccagcgcctgagccagctggtgctggtcgcccgctggctggagctgagcgagcaggacctgaccgtgctgaccgaccaccctgagcagctggacgccacgctgagtgcggtcccgtcgccggacctgcccctgctgctgctgctgacccgctttaagcgctggcagacgcaggtcaccgcctcccgcgacgaggccctgcgtctgttgccgctgctggctgacgggacatcttatgccagtgccgtggtgaacactatcgccacgctgcacgactatccggcggacacggtaaaagccatgagcgacctgctgtttacggccggaaaatatccgacggactttgcagggctgtggcagctcctgacctggctgcgcaccgggaagaccctgaacgtgggcaccccgaccctgaacgacctgcttaccatgttgcgtagtgacgagagcgccgaggagcccatcctgctggcccgcgtggcgtccaccctgtcggctggcctgagccgctga

SEQ ID NO: 100055 - DNA, 3678 bp, Enterobacter aerogenes
atgtctgttgccttataccagaagaacctgaaggaagcgcgccgcgacgcgctagtcagcagctacctggcgacccacgactttagcacgctgccgaaaggcagcaccgtcaccaccgcggacgacctgtacgagtacctgttactggacaccagaatcagcgacgcggtcaccaccacccgcctcggggaggccatcagcagcctgcagctgtacatccatcgcaccctggagggttacgaaggggaactggggagcaccgccaccggcctgctggcgcagggggcctttctggacaactgggaccggtacaacaagcgctacagcacctgggcgggtctggataagctgcgctattatgccgggaactacactgacccgaccctgcgcaccaacaaaaccgcgctgtttgagaccctggaaaataccctgagccagggcaagctgaccactgccgcagtggagggcgccctgaccacctttattgccgactgcgaccgctacaccggcatggagcacctgtgcgcggggctcgccagcgcggacgaaacgcgcctgtacttcaccgggcacctgaacggacagtactactggcgtgaggtgtggctggacaagagtgccgggagcgctgattgcaaaccgacctgctggggcgagtggcagccgctgccggcggccatcaggaacccggtgggcgatagggtggtgatgcgctacggcagtcacggcgcgcagtgccagtggcaggcccaggagaaggggcagggcgcggagaataccagtgaggacatttatgtccagtacacctgggcgatgggccgcgacggccagtgggcgcagcagctccgtgagcaggtgctggagcaggaggtcccacgggggattaatagtgcggctactgtcacccggacgggatttaacgcctggcaggtaaaaagtacgtcaaatggcacctcgtcgttccatatgcagattgtgggaaaccagttgcgtattaccgggataacgtcaagtggtggttcgagatccgtttacgacagatatattatggtactcatagataattcactcgtccatgttgaccatgaccttgctgatgttacgtttgagttgccagcaagcggtattctggaagtgtctataggcttcaagtctgaaacgggtacggggatccaggcagggatcatccagcccctgaacctctccgcccccatcccctggagcaccttcattgaggacaactatggcgtctggctgaggtggggcatgaacagcgagggaaaattgttcaccgttaccgcgccgtcggtgtctggccagctcggggcctggctgaatgcgggcatcgataccctgctccggtatgacaaccaggctaccgtggccagtgtaggtaaatggtactactacggcagcacggcgctgcacggcaacgccttctccggcccctacggtctgtacctgtgggaagtcttcttccacgtcccgtacctgattgcggcccgcttcgccaccgaacagcgctttgaggaggcggaaaagtggtacaaatacctctttaacagcgccggctaccgcgacggtgagggagacctcgtgatggatggtgatgctccccgctactggaactgctggccgctgcagcaggacccggcctgggacgagtccgtggcggacgccaccgacccggacgtgatagccaccatcgacccgatgcactacaggctgtctgtgtttgagcacaccctggatttgctcattgcccgcggcgatgcggcctaccgcatgctcgaacgcgacaccctgacggaggcgaagatgttctacgtccaggcgcagcagctgctggggccgcgcccggatatccgcatcaccaacagctgggccaacccgacgctcggtggcgaagcgaacgcggtgatgccggccacccgcgacgcccgccccccggtcaccttcgcgcagtggctgcgcggcgcaagtacgaacccgggcgacggtaacttcctgccgccgtataacgacgtgatactggcctgcttcgacaggctggaggtccgcctttacaacctgcgccacggcctgacgctggacggtcaggcgctgaccctgccgctgtacgccaccccgacggacccggaggagctgcaccgccagcaggccggcggcgacggcgcgcagggcgacgttgccccgtccgcagccggactgtggggctggcgttatccactgattgccgagcgagcccgcggcgcggtcgcgcagctcagtcagtttggcagcagcctgctgaatgccctggagcggcgcgacagcgaacagatgaccctgctgctgcagacccagcagatgaatgtcctcagccagcagcaggccattgccaggaagaacctcgacagcctgacggcgtcgctgacctccctgcagaccgggcgcgagagcgcgcagctgcgtcaggcttactataccggcctgattaacggtgatttatcggccgcggagcagaaagggctgaccctgcgcaatgatgcgatgatagcgagcgccgcagcttcttcctttatggtgaccggcggcgcgctcagcgcggcaccgaacatcttcggcttttccgtgggcggcggcgactttggtgcgccgcttatcggggcaggccagacggcgcagatcattgcgggtaccactgaacaggcggcgtccatcagtgaggtgagcgccggctaccagcgacgcgccgaagagtgggcgctgcagcgcgacgtggcggaaaaagaggtcagtcagctggaggcacaaatcaccgggctgcaggcgcagatagcaatgcagcagctgcagattgcgctggctgaaaccgaggcggccaatgcgcaggcggtgtacgacctgcagagcagtcgcttcaccggccagtcgctgtacaactggatggtgggccgactgtcggcactgtactaccagctgtacgatgccaccattccggtgtgcctgcaggcgaaaaccgcgctggaacaggagctggggaagacgtacaccacaggtctctttggcgccgccgtatggaatgacctgtaccagggcctgctggccggagaggggctgaccaccgcgctgcagcagctggacaacgtctggctggagcacggcgcacaggggatggaggccacccgcacggtgtccctggcgcagctgatgggcgaggagagcggcaacctgaacgcccgcatccggacgctgctggaggccggtgacggcaccgacggcatcctgaagctggctggcggcctgttctccgctacggttgacctgtcgacgctgggtctgagcacgtcttacggcgacaagagcggcaccgcctggtcgcgccgtatcaagagcgtggcggtcaccctgccgaccctgctggggccgtatcaggatatcgaagccacggtctccggcggcggcaccaccgccaccctgtcgcacggcatccaggataacgggcgcttcatcaccgatatggagaacggcagtcgcctcctgccgtttgagggaatggacgccaccaccggcaccctgaccctcagcgtctttaatgtgggcagcgggagtgagccgggggcgcagtacggcatcgttgacaacctgagcgacgtcatcttccatattcactacatcatgcgcgacaaggcgtag

SEQ ID NO: 100056 - DNA, 4353 bp, Enterobacter aerogenes
atgcaatcttcagataccctgacgttgaacgcgccctcgcttcccaaaggcggtggcgcgctgaccggcctcagcggcagcatcggcgcggcgggccccgatggtgccgccgcgttttctctgcccctgccggtctctgtcggccgcggttatgccccgtccctgactctgagctacagcagtcaggccggtaacggcccgttcggcatgggctggtccgccggcctgccggccatccgtcgccgcacccggatgggggcgccccgctacacccgtgatgcgcagactctgctgccggatgatgaatttctggcgccgtccggcgaggtactggtcgcggtcgccggcgatgacggcagatatgcggtctcccgcgattcgctggcaggcgtgtcgctcggcgtcccgcatgacgtcatcacctggcgtacccgggtggaagacttcagccgctatgaatactggcagccagcaggagagcacgccaccggccagcccgatttctgggtgatgtacaccccggacgggcagatgtacctgctgggttatgaggctacggcccgggtgaccagcccggccgatgacacgcaaagcgcgcagtggctgatgaacgcctcggcctccgccaccggtgaacagatatattaccgctggcaggcggaagacgacgccggctgcgatgacgatgaacaagcggcccgtcctgatgccaccgcgcagcgctacctgacgcaggtccattacggcaacatgaccgccgggcgcactttcgcgtgcctgaacggggcggatgcgccggcggccggctggctgttcgtgctggtcctggactacggcgagcgcagcagcgcgctggcggatgttccgccctttgctccgcccggaaaatggttgtgccgccaggaccggttttccggttatgagtacggctttgaggtgcgcacccgccgcctgtgccgccaggtgctgatgttccaccgtctgcagacgctggcgggagagacggatgccggcgcggaaggagttgatgtaccggcactggtctcccgcctggtgctggaatacgacgaatccccccgcgtgaccaccctgacggccgcccgccagatggcctttgagcaggatgacgcccggaccccgcttaccctgccgccgctgacgtttggctggcaaaaaccggccacgccggcgcagaccgactggcaggccgtggaggctgataacctgaacgggcagcagccctggcagtatgtcgacctgctgggcgaggggctgtccggcctgctgtaccgcgataacggggcctggtggtaccgcccaccggtacgcagggacaccccggatgatgtcaacgccgtcacctggggcgaaaaacggccgctgccggcgctgccctccctgcagaccggtgctgtgctcaccgacctgaacggtgatggcaggctgcagtggatggtctccgcggcgggggtccatggtcactacgaccaggacgtggagcaaccggggcagtggctgcactttacgccgctgtcggcgctgccggtggagttccctcatccccgggcacaactggctgacttgaccggcagcggctttgccgacctcgtcatggtgggaccccgcagcgttcgtctgtacgccggcaccggcgatgcctggcggtccggagagaccgtgatgcagtccggcggtatcaccctgccggtgccgggggccaacccggccaccctggtggccttcagtgaccttcccggttcggggcagcagcatctggtggaaatccacgccgacggcgtcacctgctggccaaacctggggcacggtcatttcggccagcccctgacgctgacgggcttcagccagccggcggcgacctttaaccctgaccgggtatatctggcggacaccgacggcagcgggaccccggatattctttatgctcacgcggaccatatcgcggtgtaccgcaaccgctgtggcaacggctttgatgccccggtggccattcccttgccggaaggggtgacgtatgaccggacctgccagcttcaggtcgcagatgtccaggggctgggcgtggccactgttctcctgagcgtgccgcacatggcccctcaccactacgtcctgaattttggtactgacaaaccctggctgctgaatactgtcaacaatcataccggcatgcatcagacgctgacataccgcagttcggcacagttctggctggatgaaaaggtggaagccgtggcggccgggcaggccgtaccgggctgttatctgccgtttccggtgcacaccctatggcgaaccaccacggaggatgacctcaccggtaaccgcctggtgagcgaagcctgttaccgccacggcgtctgggatggacgcgagcgcgagttccgcgggtttggcttcgtggcggtcaccgacacggatacggtggcggcaaccgccaccgcagaagagctggccaccccgtcgctgacaaaaagctggtacgccaccggcgtgaacgccgtcgacgagcggatgcgccgtgcgtggtggtccggtgacgacggggcgtttccggcgttcatcccgcgctttaccaccggcagcggtgacgacgaaacccacctcccggaggagatggtgcaggcccggtcgttctggctgaatcgcgccatgaagggcatgccgctgcgtaccgaggtatacgggctggacggcagtgaacaggcgggtgtcccgtacagcgtgacggagcagcgtctgcaggttcggctggtgaaggcagatggcgccacaccggtggtctggccttcagcaacggaaagccggacatatcactatgaacgcgtggccgccgacccggtctgctcgcaggacatcaccctaagcactgatgcgtacggtcactccctgaggcaggcggacgtgaactacccgcgccgtccgcagccggcggtgaacccgtatccggacacgctacccgaaaccctgccgggcagcagctatgacccgcaacagcaggtgttgtatatcacggtctcacggcagacctggcatcatctggacgacccggcctccggcgtgctgatgacggggctgacggatgccacccgccgcgatgtgttcagtgccgggaccgacgcggtaccggagggcgggctgatgcaggaagagctgatggcagcagacagcctgattgcggataaccggccctgtgcgctggccgggcagaagcagacgtactggctgaatgcggacaatatcccggccacgaacgcccccgcctttccgccccgccaggcgtttaccgacagtgccaccctggatgaagagcgggtacgaacgctggcggcgttatacccggacatggacctggcggccaccctgacggcggccggttaccggctggcagactacctgttcgcccgcccggatgagcaggagtcccggttatgggtagcccgcagcagtcaggccgacttcggcacggcttcgcagttctggctgccacaggcctggcgtgacagtccgctgaccggctggcagcacgtgacccgcgacgcccatcactgcgtgattgtgcagcatcaggatgcagccggactgaccgtcagtgcggagtacgactggcgcttcctgacaccggtgcgactgaccgacgggaacggtaatcaccaccatgtcctgactgacgccctggggcgggtgcgggccggctggttcaccggtaccgaaaacggcgttactgccgggttcagcggtccgaagggcttcacgctgccgggcagtgcggaggaggccctcgccctgagcggccccttaccggtcgcacagtgccacacctacgtcactgacggcctgatacagggcggggaggcccggctgccgccgcacgtggtcacgctcaccgcagaccgctacgatggcgacccggaccagcagatacgccagcaggtgacgttcagcgacggttttggccgggtactgcagacggctgtccgtcaggctcccggctacgcctggcagcggacgaacggcggcagtctggtcaccggtgacgacggcacaccgcagtctgtaccaaccggtttccgctgggcggtgtccgggaaaacggagtacgacaacaagggtcagccggttcgcacgtaccagccgttcttcctggacagctggaagccggtcagtgacgacagtgcccgccgggacctgtacgccgatacggcgtaccacgatccgctgggtcgggtcacgcagacagtgaccgcgaagggctggctgaagcgcgctctggtcaccccatggttcactgtcgcggaggatgaaaacgacacggcgggcgagcggcgagcctga

SEQ ID NO: 100057 - DNA, 2814 bp, Enterobacter aerogenes
atgcgcagcactgatttaaccctgtttcaccgcaccccggaagtggcggtgaccgacaaccgcggccttcccgtccgcgccctgcagtattaccgccatccggacacgccggaccggacggacgaacgcctcacccgtaatacctgttcggccaccggtcagctcctgacccgcgccgacccgcgactgggcgggagcggactggcgaacttcacgtacctgagtgacctgaccggccggcccctgctggttaccggtgccgacagcggcacgcagttcaccctgcatgatatcgccggccgtccacacctgcaggtgaacggcaacggtgtgacccgcacgttcggctacgaggatgatacactccccggtcgtccgctcagcgtgacggagcaggtgaccggtgaagccgcccgcgtcacggagcgctttgtgtatgccgggaacacggaaggcgaacaggcgctgaacctcgccggactgtgtgtcagccactacgacaccgccggtcaggtacagaccagcagcatcagtctcaccggcgtaccgctctcggtcacccgtcgcctgctgaaggacgcggacaacccggataccgtgtccgactggcagggcgtggatgcgtccgcctggaatgacctgctggctggcgaagccttcaccaccctgaccaccaccgacgccaacggcgtggtgctgaccaccaccgatgccagaggcaaccagcatcgggtggcgtacgacgtggcgggtctgttgtcaggcagctggctgacgctgaagggcggaaaagagcaggttatcgtcgcctccctgacgtactccgccgccgggcagaagctgcgcgaggtacatggtaacggcgtggtgaccacgtactcgtatgagccggagacagagcgcctggttgggattaaaacggaacgtcccgtcggtcatgtctccggtgtgaaggtgctgcaggacctgcgctacgactacgacccggtgggcaacgtgctcagcgtgcgtaacgacgccgaagagacccgcttctggcgcaaccagaaagtggtaccggagaacacgtacgtctacgacagcctgtaccagctggtcagcgccaccggacgcgagatggcgaacgccgaccggcagggcggcgcactgccggacgttatgacgccggataatgcgacatacaccaactacagccgcacttacacttatgatgaggccggcaatctgacgcaaataaggcacagcgccccggcgacaaacaacagttacaccacaaacatcacggtcagcgataaaagcaaccgtgccgtgctgagctccctgacagagaacgccgcagaggtggacgccctgttcacggcgggcggtcagcagacacagctgctgccgggacaggtgcttctctggacgccacgcaacgagctgctgaaggtggcaccggtaacccgtggcggcgctgcggatgaccgggagagctaccgctatgacgcggccagccagcgatgcctgaaagtgagcgtgcagaaaacgaataccagtacgcagacgcagcgggtgctgtatctgccggagctggagctgcgcagcacgcagaacggtaacaccgaaacagagagtctggagttgatgaccgtgggcgaggcgggcagggcgcaggtgcgggtgctgcactggacatcaggcaggccaacggaaatcaccggtgaccagctgcgttacagttacgataacctgacgggcagcagccagctggagctggacggtgacgggaatgttatcagcatggaggagtactacccgtacggcggcacggcggtgtggacggcgcgcagcgcagtggaagcggattacaggaccgtacgctactcggggaaggagcgggatgcaacggggctgtactgttacggttaccggtattatcagccgtgggcgggccggtggctgagcgcggaccccgcgggcacggtggacggcctgaacctgttcagaatggtcaggaataatcccgcactattatgggataatgatgggcgggcaccctctaagccagaaaatgatttggcaaaagaactgatggatcttcttgtgtccgaaagaaattacatctctacaccaaaggttgttgttcaatctgatgcaatgatacagcaactaacgaatttaggttcaagtgttagtaagccacctagagcttcgttagtaaacatagcacctcctctcaggttgcgggaaggcggagatgatcttgttaatgagactaccgtgggtaattttctcggaacacggtctgatacgtttgtccagcaatcgaaccgcctaaaaagccagctggatgaggcggttatccaaattactagtgatccgagtagcccatcggtattggctacataccagtcaaaattgagcgaatatactctttctcgtaatgctcaaagcagcaccgtgaaagcttataaagacatttcaaacaacattattcagaatgttgttgtatcaaataccagccatgttgtatcgccagcaaatatagcacctcctctcaggctgcggggaggtggagatgatctggctaatgacactgccgtgggtaattttctcggaacacggtctgatacgtttgtccagcaatcgaaccacctaaaaagccagcttgatgaggcggttacccaacttactagtgatccgagtagcccatcggtattggctacataccagtcaaaattgagcgaatatactctttatcgtaatgctcaaagcagcaccgtgaaagcttataaagacataagcgtcgcaattataagtaatttccgttaa

SEQ ID NO: 100058 - DNA, 561 bp, Enterobacter aerogenes
atggcaatttacggctatgcccgcgtatcaaccagcgatcaggatcttaccctgcagacacaaattctccgcgctgccggttgtgaaatcattcgtgcagaaaaagccagcggaaacagccggaccggaaggagcgagttgctgctattactggagttcctgcgccccggagatacgttgatggtgacccgcgtggatcgcctggcccgcagcattaaggacctgcaggatatcgtgtatgccctgaatcagcagggcgtaacgctcagggcaacggaacagcccgtagacacgcgctcggcagcaggtaaagccttcctcgatatgctgggtgttttcgctgagtttgaaaccaacctgcgacgtgaacgccagatggaaggtattgccgcggcaaaagcgcggggcgtgtaccggggaaggaaaccttccatagatcctgctgaggtatatcgtctgtataccacggagaagatgggggctacggccatcgcccgtcagctcgggatcgggagagcgtcagtgtaccgggcgctggaaaattatgagcagccggcgtag

SEQ ID NO: 100059 - DNA, 708 bp, Enterobacter aerogenes
atgagcagccggcgtagcgctattccggctgattctctgttgaaactgcggcaacggctcgatcgcctgccgccaaaaagccctgaacgggccacccagattgccgctgccgctcagttgtatggtatttcagtcacgacggtctatcgcgcccttcgtctggttctcagaccacgcacagctcaccgccgcgatcatggccagccacggatactccccccgtctgaactggaacattactgtgaactgattgccgcgctaaaactgcgaacaacgaataaatccggtcaccatctgtcaaccgggcgggcaatacagttgctggaagagcacggtgtggagaccgctcagggactgataaaaagacccaggggcttgctgcgtaagcagaccgtcaatcgctggctttcccgctggcgtctcgaccagccccgcctgctacgggagcctcctgcggtgaggtttcaggctgaaaacagcaatgactgctggcagtttgatatgtcaccgtccgacctcaaacatatcgagcggcctgactgggttgaccccacccgtggcgaacccacactgatgctgttcagcgtggtggatgaccggagcggggttacttaccaggaataccggtgtgtgtatggtgaggatggggtcagtttggatatcgaaaattattgtacgttacggctgatttttaatcgcaaaagttaa

SEQ ID NO: 100060 - DNA, 657 bp, Enterobacter aerogenes
atggcatggtggggaggacgtggagctgccccggtaatttcccatgaaaatgaggcaattcttctggagcgtgccacggggcccgcatctctgtccacgatgtccagcgaaggtcaggacacagaggcttgccgtattctgtgccttacagcaaaccagttgcacataggtcagaaacagccaataccacaacttacttctcttcatgactggttccacgcccttaaaccagccgcccggatatatggggggattctgaagcagtgcgcagaaatatctgaagatctgctatcttcgccgcgtgatgtgaccacgctacatggcgatttgcatcacgctaacgtccttgattttgggtcatccggttggctggcaattgacccgaaaggcttaaaaggtgagcgagggttcgactatgccaatattttcacaaatccggaccttggtaatccaacttctggaatagccgttgtcccggaaatatttaaacaacgacttaatatagtgaccgaaactgccggtctggacagagagaggctgctgatgtggatctgcgcatggtgtggattatccgcgtcttggtctttggaaagtaacgacccggtcactgttactacgaaaatagcagagctggcactatctgaacttcactactga

SEQ ID NO: 100061 - DNA, 147 bp, Enterobacter aerogenes
atgacgttccaggtcggcctgcttactccggtatttacacagcatatgggcccgttcaattccctgtttttgacgctggcggcgggtcagcctgcgaagggtctttatctgacagcgcctgccacgaagtgggcacatccaggctga

SEQ ID NO: 100062 - DNA, 426 bp, Enterobacter aerogenes
gtgattcgcccttatgtgctaacgctggtcattctgccgttcgctggtcacgcagcagatgcacctggtaacgaatgcgccgcgcgaggccattatgctgaagagatgcttttatccgcagtgactaaagatggagtaaagggaatcgatcgtggtaacacgacggttgaagtattgagtctttcccctgtttccgatgcgttagcgcgtcagttcgcgcaggctgacgcgaaaactggcaatggtctctcggtcaaagattactacggcatttaccacgataacggtgcaatgaacctgacggtgaagtacacctataccaacgtgaaaggtgccagtaatgtttatatcgtctccagcctgttaaataacgatgagtgctctgtccgatttaatggatatttgacgttatctcgtgagttctaa

SEQ ID NO: 100063 - DNA, 795 bp, Enterobacter aerogenes
atgccagttaataaagaaccggtgacctcacctgaagagtttgatgctgatgctttcagtcaggccgctatcgccctgcatgtttcatcgtcaggcgagtatgccggacagagtccgcacgctcaccgtaagggacaacttattatctctttgcgcggtgcagtgagctgtgaggttgaggatgcgctgtggcttgttccaccgggacatgctgtctgggttccgggtgaaatcccccacagttgccgggtcacgaagaatgcagatacctgctttctgtttatcgaacccggggcggcagcgatgccggaaatctgctgtaccctggcgataacttctctggtccgcgagcttgttctgtatctggcagagcagggacaggcttattctcctgacagtaaaaccgcgaggctggcagaggtgctgctggaacatattccagatgtgccggttgaagcgctgcatctgccggtatcagaccatcctaaaatccggagtatggctgaggtactttttaatgatcctgatgaccggcgaacgctaaagcagtgggctgcgcatctggcaaccagcgagcgatctctggcgagactgattaaagaggcaacaggaatgagctttggtcgctggcgtcagcaactgcatttaatgatagcccttagccatctggcagaaggtcagcccgtgcagcgcgtagccggaacgctgggatacgattcggtcagcgcgtttattacgatgttcaggaaagcgctgggtaaatcaccgactcaatatttttcgtctctaaactaa

SEQ ID NO: 100064 - DNA, 1191 bp, Enterobacter aerogenes
atgtcccacactacgaacaagtggtcttcagtcatacttgtgacaggcatcctctttattgccattaacctgcgtgttccttttaccgctatcgcacccgttttagagtccatccgccatgattttgggctgagtatcacagccgttgggttgcttaactcacttcctttactggcctttgccgccttttctccgctgagcgcatccatctcgcggaattacggtctggaacgcaccctctttggtgcgctggccataatttcagcgggcatcttgcttcgctccacaggcagtgtctgggcgctttatggcggaaccctattaataggtatcgggattgccctgggcaatgtcctgctgcctggccttatcaagcgtgacttttccggcaacgtggcttccgtgacgggggcatattccatcacaatgggtgccgctggtgccattggttcagccattgtcattcctcttacgcagagctggggctggaacatcgcgttagccatgctggttattgcaccgctccttgcgctacttttatggttgccccagttatcgaagaagcatcagctgccagcagcgggtgagaaaaaagcagcgaccgtcgcggtctggcgctcgcctctggcctggcaggtcaccctgtttatgggcctgaatgcgatgccgttttatgttgcggtcggctggctccccgccattctgacgaacagtggactctcctcagctcaggctggcgaagtgcacggcatccttcagctgaccaccgccattcccggcctgattctggcggccacgctgcgtcgtcttaacgatcagaaagcagccgctgctggcgtcagcctgttaaccgcagtgtcctttatcggcattctgtacctgccaaatctggcgatgctgtgggctgcgcttctcggcttcggctcaggtgccagcatgatgctgggtctgaccttcatcggtctgcgtactaaaaacgccggtgatgctgccgcactgtcaggcatggcgcagagtgtcggatatctgatggcggcgatggggccgctgttgctgggcaaagtacaggagttgtccggaggctggacggtacccttactgatgaccgcagcaatcgcagtcgcaggagcctgcaccggaatggctgccggacgaaatgctcacctggaacctgcacagcagccgggctga

SEQ ID NO: 100065 - DNA, 918 bp, Enterobacter aerogenes
atggatcggattcaggctatgcaggttttcacgcgggttgctgaggccgggagttttgttcgcgcggcagaaacactgtcactgccttcctccaccgttaccagcacgattaaaaacctggagaaatacctgcaggtgcgcctgctgaaccgtacgacaaggcgggtcagccttactcctgaaggcctgaagtatctggcgcagtgccgggagatcctgtcgctgatagaacatagtgaatccagcctgaccgaatccatcagacgcccccagggacggctgcgggttgatatgcccggtgggattgcccatttcatcgtcatgcccaacctgaaagatttttaccggctctatccggatatttacctgatgattggtgtcagcgaccggcaggtcgatcttgttcaggaaggggtggattgcgtcatacgatccggtgaattaaccgattccatgctggttgcccgtccgcttggccggtttcgctgggtgacctgcgcctcgcctgactatctcaggaaatttggtatccctgagacgcctgaaacgttgtcacagcatcgggcgattcattatttttccggttcgggaagacgcactaatgaactgcgttttacacaaggcactgaggccttctcagttccggttgagggggatgcagctgttaacgaaacgggactctatatcagactgtgtcttgagggttttgggctggcgcagcttgctgagaatgtgatttcggagaatctgcagcaaggcaagctggtcgaggttctggcggactggcagccaccttcagtgccggtgacgatgctctatccgcatcagcgttttctctcccccgccgtgcgtgcttttgctgactgggtcgccgggcttttcaacgatggcgaagatgagacggggtcttcccggtaa

SEQ ID NO: 100066 - DNA, 1398 bp, Enterobacter aerogenes
atgaccggttacatcagaaatattgttaacaatcagaatgtcacttcacaggctacgttgattcgcggcgcgacgatactaagcatggacgagaacgtcggtaacattgagcgcggcgatattctcatcaacggctcaacgataaccgccgtgggccagaatcttgatatgccgggtgcgcatgtcattgatgccaccaacatgattgccatgccgggaatggtcgattctcatcgtcacgcatgggaaggacagctgcgacgcattaacccaaacgccacctgcctggatgactacagcaacgccacgcacttctccttcgctaaatattaccgtcctgccgatatctatgtcggcaatctgctgacggcgctgggcgctattgacgcgggcatcaccacgatgattgataattcgcacaacagccggaccgcagcgcattccgatgccgccgttgaggccctgcttgataccggcattcgcgccattcatgcttccggtgcaccggtagccggcgaatgggataaagcgcactggcccggaaactggcagcgtctgcaggagaagtatttcaaagacaaccctgaaagcctggtttctctcgccgtcatggcgcagctggagccggaattgtgggctgaagcccgccggctgggactgtcgatcgtcactgagttctttggcgctgagatggggtctgaacttgagtcgctgcatcagcagggactgctgggtccggacaatattttcaatcactgcacggcgctgcccgaccggggatgggaaattctgcgggaagcgggtgtccgggtgaacgtctgcccacgctcagattcgcactatgggatcgaaagcggaatgtttgccattgaggccgcgcagcgtcatggcatcaatcccggtctgagcgtagacaatgaaacctcatacagcaccgacatgtttatggagatgcgcgtcgccttctacctgcagcgggtgatgggcatgcatcagcagcagtgctgtgattctgaacatgcgctgaaaacgcttccggcggcgcaactcctcaaagccgcgactctcgatggcgcagcctgtgcagggttacaggatacagtgggcagtctgacgccaggcaagcaggccgacctggtgcttattaacgccagtgatctcaatctttacccgtccggcaacgcctttggcacggtggttcatgccgccgagcgcagcaacatcgacaccgtcatgattggcgggcgcatcgttaaacagaacggcacggtgctgggcctggacagcgagcgactgcgtgcggcgattgatgagtcgcgtgagcacctgtttgccgcatctggctaccagcccgacatttttgctgacgccttcctgccgctggagcaggcagactga

SEQ ID NO: 100067 - DNA, 468 bp, Enterobacter aerogenes
atgatctattacgtaatcgcttttgcggcaggtctggggatcacccttcagacgaccctgaacagccagctggcaaaggggctgggcggcgatccggtcactgcggcgctgttttccttcacggcgggcgcgttcagtctggggatttacgcgctgctgcggggtgggttaatgacatcgttagtggcgatcccgtcgcaacccctctggagtctggcgggcggactgataggcgcatgtgccctgttcagctatgtcgtgctcgcgccgaaaatcggattttcagctctgctcgggctggcgattgtcggacagttactttcttcacagatcattgaccattttggcctgctgggcgctatgcggcgtccggtttcgttactcaggctggggggaatggttgtcatgctggccggactggccgtcatgcttttcggcgatcggctctctgcacgttttctgcagtga

SEQ ID NO: 100068 - DNA, 861 bp, Enterobacter aerogenes
atgttttcaattgcagctgatgtcaggaatacgctgggagagtgcccgttgtggtgtgaaagaacccgcaggctctactggactgatattgaagccagtgaactgctcgccatagaagaaggcaatgatgctgtaatgcgctggtcgctgcctgaacgccttggctcctttgcactgactgaacaaagtcatattctgctgatgggattcgcgtcagggctggctttttatgatcttaatagcgggttgcttaccccggtagccgcttcaccaggagacaccggcacccgtataggtgatggacggtgtgaccgcgccggtaattttgtcttcggaacgatggatgacggttatcccgtcaaagccatcggtaagtttcaccggctcaacgcggcgacgctgactgttgagacgcttgtactgcccgatgtcgctatcccgaacagcatctgtttcagccccgagggtggcacgctctattactgtgactcgatgcagggtcggataatgtgctgtgattatccctcgctgcggaaccagcgcgtgttcgcagaaaccgaaggcagcggcgcgcctgacggctcctgcgtggatgcgatgggatatctatggaatgctgaatggggagggagccgtgttgtccgttaccgcccggatgggaccacagctgctattctgacatcacctggaatgcagagcacctgtccggcacttgccggtgagggttttacccgtctctattgcaccactgctacagtgggacttactgcactgtctgaatatgacggtgcattgctcaaagctgaatctgatctcagccccggattacctgaaaaccgctttgttgcacacacagtttaa

SEQ ID NO: 100069 - DNA, 531 bp, Enterobacter aerogenes
gtggacggtttaaaagtagaaattttttctgaagaagttgagtatgatgtaagcaacttcgattgcggcgaagagtatcttaatacttttctcactgaccacctgaagcgtcaacatattggcaagtttttacgtggttatgtgctcgtcacgagagaggaaaaaccacgtgttgtgggatattacaccttgtccgggagctgctttgaaaaggagtatttcccgagcagaactcagcaaaaacgtgtgccctataaaaacgttccttgcgtcacattggggcgtctggccatcgataaaagcattcagcgtcagggatatggagatttgcttctgacgcacgccatgaaggttgtgtatcaggcatccctggctgttggaattcatggaatgttcgttgaagcacttactgacgacgccaaaaaattctaccttggtcttggcttcatacagctcaagaaagaaaatagtaactctctcttttatcccacaaaggcgatagaagaattgttcgaagctcaggacgaataa

SEQ ID NO: 100070 - DNA, 270 bp, Enterobacter aerogenes
atgtcaggactgaagaagcagcgtatcgatcttagattaaacgaagacgacaagagcatgatcgaggaagctgcagcaatgactaaccagtcaatttcacagttcatggttagcactgcctctgcacgtgccgcggaagttattgatcagcatcgtcgcctgatcctcaatgaggaatcatggaatcttgtcatggatgcactcagtaacccaccggcaccgaacgaccgcctaaaacgagctgctaagcgtctccagaatttggagtaa

SEQ ID NO: 100071 - DNA, 480 bp, Enterobacter aerogenes
atgaacctaatgcctctcgccattcaacgagggtggcttataagtgtagccatgctgctgctagcggcagggatcctgcttctccctgataaccaccgctcacccgagttgaaatgtaatacttacctggaacagtcagggggagatggtcaatatctaatgaaagcaacctttatgtttcttcttaacggggatggcacaggcgtgttcgttaatgacggtacaattacctacaagggaagtgtccatattcttcgccgggaagctaaagtcaggattgcaccaataaacgccgcccctgccgcatggaaactcacagagtttaaagaaacggtgagcagcagtgataccacccctgatgaggtgtataaacgttttttcttcgatggaagcgaacgttccgggcgttatataacgataaataaagtgggtgatcactggcttataggcagcattcgcacaccggcgttcctgtgctaa

SEQ ID NO: 100072 - DNA, 639 bp, Enterobacter aerogenes
atgttaactggctataaatacgaatccatcaggatactccgtagtgaagacgtgaatgcgtgggagctcctctctacggcagaaccgcacgttgatctggaagagcactttggattaatggccgtgccagagcaaaaaaaacatttttttgcccaactcagtcatgccacgttttctgcagagggtgagaaatatcatcttaatgccacatcctctttactgctggaaacggatttcctggaacggctatgtgaagaaactctttaccttgataaactggttattgagatcaccgatcttgaaaacatgattgaatcagaccctgttcgtattttttcattacgcaaatgtatcgctacgttgcgccagaagggaagcgaagtatgggctgatgatgtaactgaaactattctgtggaaattgtttgaatgtgcaatccactttgatggcatcaaaattgacaaatataccttctggaatggacgtaaagagcggaatgagtttcttcaacttgcgcagtgttgcacgtatttaactaataagcttctgatagaaggtattgaaacggagagtgatttggcattagcgcgtgctagtgttgctgagtttggtcagggttatctctggagaaacgcatga

SEQ ID NO: 100073 - DNA, 1251 bp, Enterobacter aerogenes
atgacaacaaaacctgccgctgaagttagtgtggcaccaggtctttttcaaacgctaaaaaccttcccggcgactgtccatgcactgctcttttttacatttgtaatacggtttagctattttatggcatggccatttatcgcagtcatcatgacgaagaattaccatatgtcgcctgtcgctattggtgtggtgatgaccagcagcgccctgatctcagtggtgctcggtatgtatggcgggcagatttctgacaggttgggaaggcggattatacttctgctgggctgtgggttttccgccgtgggttatattactctggcgcaagccaccgggatggggctgtttattactggcctgatgatcatcggagtttgttttgcgtgggttgatcccccggtcagagccctgatgagtgatttgctggttgatagccgtcgtcgcgccctagcccttcaaatgcgttactacctgatcaacgtcgcggcagtgtttggtccactgatagggatagtctttggcttgacttcgcagaagggaacattccttttaaccggactaacctatctgccgttttttgtctacgtgctgctttttattcctgcgggtaaactgtctggcgagcagaaaaacagcgctccagtgattaaactgcatcaggtgatagggattattgccagggacagaatttatattgcagcattgctgtgcagcatgttatgcagtgtcgtttatatccattatgaagccgttttgcctcaatacctgatgttgcttgacggcaatgcggcggttaagttgatcaccgtaattctggttacgaatgcctgtacggtacttttatttcaaagttttattatgcgctttctgacgcaagtcagcctacccaaacgtattcttttggggggaataattttcgctatctctcagctctgcttttttttcacacactcaacggaaatgtgggcatggctaatgggaactgctgtgttcagcgtgggggaggcaattctgatgccaaacctcaatattatgctcgatcaattggcacccgttgaacatcgcggagcctatcttggtgcctccacgttgtccacactgggcgttgctgtcgggccgttaattggtggcgtgattctggccatgaccggggcaggagtttttatatgtaccgccttacttagtgtactgctttgtacaattatctatgtctgcaggatcagcatgcttgcacgtcttcaggatccataa

SEQ ID NO: 100074 - DNA, 285 bp, Enterobacter aerogenes
atgacagggtacctccaggtgtctggaaatttgttaaatagaatgggtgaccttatgagttacggctggctcttcgaaaatccagatgatgaaatttccggtgatatttatatagctctggaacaactccctccggagctaaaacaggttgctctgcagatagtacagaatcagattgatcgtgatactgcagagaaaaaactggcagatctaatacagagactcgaatttgatataaccgcagcagaactgtcagcgtatctttttaaaccgggtcatgcctga

SEQ ID NO: 100075 - DNA, 483 bp, Enterobacter aerogenes
atgaaattaacagaactcaagctgaatacgctgatcgataatctgaatgtcctgatttgtgaggacagcctgctgacgcgtcaggagcgcgaggatttggtacgggccgtcgccgccatcggtgccatgaaagcgcgcgtcagtatgaagaagtccaacgttccggcagcgtcgaaaccaaaggaagagaaacaggaacgtgtgcccgacccacgttttccgcatgccggcgaaccctggcgggaagaagaggggactatgctgcttgatgccctcgaatccgtaccggacgaagcggtgggcgttcatctgttctggctggccgaaaagttggggcgtaccccctacagtgtggcctgtaagatagcggctctccgggacatgccagaagagtggaaagatcagtaccgcaaggtttcggatgatattcgcaagtcaggcctgagcatcagcgattatgttcagcataacgggctgaattaa

SEQ ID NO: 100076 - DNA, 576 bp, Enterobacter aerogenes
atggcagcagtaacaacctcccgcaggccgtcgccgctgcagcggcgggtgctgattgtgctggccgccctagatgcgatacgtccgggaccggtggcgacaagagatattgaacgggtgctggagcagggcggggacgccccggtgtacgggccgaatctccgcgcctcctgccggcgcatggaagccgcgggctggctgcgcaccctgcgcgccccgaacctgcagctggccgtcgagctgacggaggccggtcgcgccattgcagaaccgctcttccaggcagaacgcgaggctgaaacggcacgacaacggctgacagacgtccggcgtctgccgttacgccagacggctgccggtgatgcggtggagctgcagctggatgacggctattacatcatcagggaagcggcctacgtgatccgtctggacggtaccacctgcctgcaactgacggatgccggcggcatacgccggataaaagagggcgatcccctgcaggtggccagctggtatcagacctgttttgatgctggcctgccggtcaccatccaggtgaatgagagccggaactga

SEQ ID NO: 100077 - DNA, 270 bp, Enterobacter aerogenes
atggatgagaaagtattctttcacctaagttatgaaactatgctcggcgacacggaagatttcattaacgcgtgtcttgaacgggcaaaccgtgcggactgcaatgatgccgatgcggagattgcccgggcacgcagcgcgatcgaactctggtaccacctaacgatggcgggacgtgccccggaagaagtcgcagacagggaccatctgcgcctcaccgaaatactcctgcgagcaccaacagcagaacaacgttcatggcagcagtaa

SEQ ID NO: 100078 - DNA, 1044 bp, Enterobacter aerogenes
atgacccttaatgcatttatcaataccgaacgactggacatctaccccaggcatttgaaaatcgcaccggcacagactatggctgcttaccactggaacaaggcattgtgtggtgcaatgctgccggtatttcagtgtctggaaattaccctgcgtaatgctctcgatcaggcaattcagtcaaacccaccccctgctgctgcagggctgtggcttaccgatcataactggattttcgatctgccccgctacatgggagaccggacctggccgaaaaagcataaacgatatattcatatcgctgcaccaaagccgggtcaggtaacagacgcgcatgggttcctgctggataaatacggcaagcgggtgctgagaaataaacttcagtccgaaagtcttgttgataacgcgattaaagaaatcgtcagaatgaaaaaacctatcacgccgaaccgggtcatatcagggctgaccctggggttctggacacagttactcactcattactatgaaaatcccaaaggtggacataagaccttactctggcctcatctgacgagtacggttttccctaatgctccggcgcacttttcacggcaagaaatttgcaatgaattcatgagaatgaaggacttacgcaaccgtctgtcacatcacgaggccatatggaagtttcattatgacgatccggcgacgggactgccagattacggaaacccggtctatggcgctcaggccagctgcagtctcctcagaaaacattatgatgatattctggatatgatcggctggatgagtcctgaccggaaaacgaattttctcagccactcagccaatctgagattctatgccctctgctctgtggatggtctaaacagctacattgcccccgaaaagattaaggcgcaaattaagatctcccgtggcggtaaaggcatcaacaggttaattaaagtcctcgaaaaaaatgaattcatccgggttgtccgggaaggtcagacgatactaacactaggcaccgacaattcgatcgtccttctctga

SEQ ID NO: 100079 - DNA, 633 bp, Enterobacter aerogenes
atgaagcaagaatggggcaatgttattgtttcagtgttaatggggatcattatgacatttcaggaacaggaaccagacgtaaacaaaacagcaacccttacggtgcgaaatatcccgcttgatgttgatgcgatgattacggtgcaggccagcatagctggtaagtccaaaagcgattttctgaaagagctcctgactcaggaatttcaggatttgataaagaacttcagccggacaagtccgcttgtcagcctgatggatgaagaactcggtaagcagttcggcataaaggtcgccgaacactggtttgaaaacgatatgattaccggtaataaccttaagtataaggcgctgctgaaactgaccacccatgacgatttacagcagctcatgatgaggaatatgccttatcttcatctgcgggccagccaggttctgcacagccagtttgcctatatcccccgtggcctgtccctgacgttttcgctgtttaatgaaattgccggcggtgatgcgaagttgatcgaacggctatttcatgaggttttttatccggtcggagctgagaagttttacgcagacatcaatgctattcgtgcggagaagaaactggaacccgtggacgggctctga

SEQ ID NO: 100080 - DNA, 303 bp, Enterobacter aerogenes
atgaatacatattcctttgaaagcgagcgcatcccggtttctcttgaagcagtctggcgggcactgaccgctctcggccatcaacagctctggctccgccctcctgaaaatcacggtgtaaacacctggctgattgtcacctgggacggtctgacggtggctgaacgtatcctggtctcaggctcctggtggctgaccggggatgccagcgccatctacaccaatcctgagaggattgttccgggcgatctggaagaactcacatggcagtcagtgcagcgtcgaatgaaggacggattctga

SEQ ID NO: 100081 - DNA, 324 bp, Enterobacter aerogenes
atgatcgattgccatgttggcgtacaccggtatcaagacatactgtctgactcgttgcttatctcctgcctatttgttcatcatcgcctcacaactcacaaagaagtgcggacagcccattgtccgcagggtaaagagctcaaggaaaagtatgagccggcacctttcctgaaaaatttcagccccttcgcaatcattctcgagcgtcatacgaaagacagccagaaaagccttctgtttacaaaaatcacacttgtgtttacatgttatttacattttatccttttcgttaactcttttgacaatttcttgatgtgctgctaa

SEQ ID NO: 100082 - DNA, 306 bp, Enterobacter aerogenes
gtggcggaagatggcgacgtctacgatgccttaaccgataaatatctcgccatcggctgctcctgtatttcacctaacgaccagcgcctgcaattgctaagccagatggttgaggaataccaggccgacggcgtggtcgatgtcattctgcaggcttgccatacctacgccgtggaatcgctggcgattaagcgtcacgttcgccagcggcacgacattccttatatcgcgatcgagaccgattattcgacggcggatctcggccagctcagcacccgcgtcgccgcgtttatcgaaatgctataa

SEQ ID NO: 100083 - DNA, 1782 bp, Enterobacter aerogenes
atggcggtggaaaaactgattgtcgaccatatcgatacctggaccacggcgctgcaaacccgctccacggcggggcgcggcagctcgggtaagattgacctgtacggcattaagaagctgcgcgagctgattctggagctggcggtgcgcggcaagctggtgccgcaggatccgaacgacgaaccggcgtcggagctgctgaaacgcattgcggcggaaaaggccgagttggtgaagcagggaaaaattaaaaagcagaagccgctgccggagatcagcgaggaagagaaaccgtttgagctaccggtagggtgggagtgggtacgactgggtgattttaccaatattattcgcggtataaccttcccaggaagtgaaaaggctcaaacttattctcaaggtaaaatagcctgtttaagaacagcgaacgttcaggaacaaattgattgggatgatttaatctatatttcagaccgttttgtaaaaagagaagatcaatttcttcaagaaaatgacatcgttatgtctatggctaatagtcgagaattagttggtaaagttgcattagcttctctgcctaactatagcaaattcaccttcggtggttttctgagtgtgcttagaccattatttgtgaatgagcaatacctaatggctttactcagatgtgaaacgtataaatctcaactaattgaatctgctagccagactacaaatattgctaatatctcattagcaaaactgaatcccttgcttgtatgccttcccccagctaatgagcaaacttgtattgccaaaaagctgagtgaactcatggccctctgcgaccaactggagcagcactcactgtccagtctagacgcccatcaacagctggttgaaaccctactaaccacgctaaccgacagccaaaacgccgatgaactggccgaaaactgggcacgtatcagcgagcatttcgacacgctgtttaccaccgaagccagcattgatgccttaaaacagaccattctgcaactggcggtgatgggcaaactggtgccgcagaatccgaacgacgaaccggcctctgaactgctcaaacgtattgcgcaggaaaaagcacagctggtaaaagacgggaaaattaaaaagcaaaaaccgttaccgccagtaaatgatgaggacaagctatttgaaattccattcaattgggaacacgtttatctaaatgatatatgtgaagtgataactgacggtacacatcaaacgcccaaatatacagataggggccgcccgtttatctctgcacaatgtgtaaaaccatttaaattcatgccagagaattgccgatatgtgtctgaagaagattatcagcaatatataaagaatagaactccggaaataaatgacattctactcgcccgtgttggagcgggcattggtgaatgtgcagtgatcgatgtaaatctagagttttcaatttatgttagtactgcactaattaaaccaattaaatgtcatattaactcaaattatctttgcctatggcttaattcaccgataggtcgtttgttctcatcacgttatacatatggaaaaggtgtatctcaaggtaatttgaatctttcattgattaggacatttgttatatcgattcctccatataaagagcaaaatctgattgttgaaaaagtacgaacatatttatcaatatgtgagaaactaaaatcaaaaatccaatcagcccaacaaacccagctacacctggccgacgccctcaccgacgccgccatcaattaa

SEQ ID NO: 100084 - DNA, 1854 bp, Enterobacter aerogenes
atgagtactttcgacactacaaaaatagctttaaaggacatcctcgaacaaattactgatgggcgagttcaattacctgattttcaacgtggatgggtatgggatgatgagcatgttcgttctttgctggtcagtattgctcgttctttcccagtaggtgctgtaatgctactggatacagggggagaggttcgcttccaggtgcgccctattgaaaatttaccggaaaacatgcctgaacctgaacggcttattcttgatgggcaacagcgtttaacttcattgacccaagtattgatgttaaattcccccgttaaaacctttaacgaaaaagggaaagcgatagaccgtttttattacatcgacattgaagctgctctggatgatcgccttgatgaggcatttattgcagtagaaaaatctaaacgagtcacagtgaactttggtcgtgatataaaaacattcatcaattcagctggcgaagaaatcgaaatggatttttcgacagcagaaaaagagtgcaaggctttatttttcccatgtaatcagattatcaattctgataagtgggaggaaagtttacatgagtttgcgcaagacaaatttggcatttatatagaattccgtaaaaaaatcttgaatgcgtttcgtaattatcacttgccggttatttcactgggaaaatcaacaagcaaagaggccgtttgcttagtatttgagaaggtgaacactggcggggtgccgctatccgtttttgaactggtgacggcgagtttcgcggccgacggatttaacttgcgggatgattggtttggaagccagcttcgtaaaaaaagcggacgtcgtaccgcattgaacaaagagcccattcttgatggggtagaaccgactgattttttacaagcgatcagtatattaaatacgctgaaaaaaagaagagccgatatttctgaaggaaaaactgggaaatcagtgaccgctgtgagcgccaaacgtgtttctgtactagctctttctttagatgactaccatcattgggctgataatgttgaaaagggttttcttctggctgctaaattcctccagcaggagtgttttatgcacccgtgggatcttccttatcgtacacagttggtgccattggctgcggtattatcccaattacaaggcaactggctagagcctaaaatctacaataagctcactcgttggttctggtgcggcgttttgggtgaactttacggcggtgccgtagaaacgcgcatagcaaatgatgtagaagagttattgaactggattgaaggtgatggagaagagccgcgcactatttatgaggcatcgttccagccagggcgtttattgaccctgcgctcgcgacttagtgcggcctataaagcgctaagcgtgttaattctgcgtaacggggcgcaagatttcttctggaaagggaccatccagaaactggattttgttgatattgcgctcgatattcaccatatatttcctaaagcatggtgtgaagcgaataatattagcccagcgatatataactctgtaataaataaaacctcgatctcttataaagcaaataggatgatcggtggaaaatcaccggctgagtatctggctcaaattcagatgcataaacaggttggtctcgaagacactgagatggatgctattcttcgtagccacttcattgagccatctctgctacgtcagaacgatttcgctgagttttttgaagaccgcaaaaagcagctattaagattgatagagcaggccatggggaagaaaatcactcaggatgaagttgcggaatctgagagagaaatagaagagtttgaatcctga

SEQ ID NO: 100085 - DNA, 213 bp, Enterobacter aerogenes
atggccggattaaccaaagaacagcgcgctcaacgagcggctgcgcaggtagataactttattcctgaatcgcaggtgcaggaaccggaggtaccacagctggtggcaatggttaccgatttcccggcattccccgacgcgccgaccaccgccgacgttcatcctgacgaagtggaaaactggaaggcgcacggctggaaagaaatggagtga

SEQ ID NO: 100086 - DNA, 573 bp, Enterobacter aerogenes
atgtttgaagaagagatttggaaagaaacttccatatcgagcgattatgaagtcagtaatcatggtcgattccgatccttaacacgcaccgttagcgtgatgagtggctacaagaaggttttagaaggcaaggatttgaagccgtttgacgtgcatgccactggttaccttcagataaagattcgcggcaaaaagtatgcagcacacaggcttgtcgccatggaattttgcgacggttacgccgacggattagttgttaaccataaaaacggcaacaaaaaagataaccgagcagaaaaccttgaatggacaactccttcgaacaatcttcgtcatgcatataacgatcttggtgtaaccccaaatcaactaggaagattcggcgaggatcacaacgcaagtaaatcggtaattgcgacatgccgagttactggcaaagaggttcgctacgcagccgctatggatgcggttcgcgatggctttgacagtggctgcattagcaggtgctgcacaggtcaatcatcttaccataaaggttatttctggcgatttgagggtgagcagcatggctaa

SEQ ID NO: 100087 - DNA, 432 bp, Enterobacter aerogenes
gtgaatctacacaaagacggcatccgtctgcacaaatcaaacttcaacgcgatcggacaacagatacagcccatgctggaatccggagattgttatcgcctcattatcaagccgtggaaaaacaagcgctccattcctcagaactcacttatgtggatgtggaatagcgatgttgccgctgctgccagtcaacactcaacagaaacccacactgacgaagagcttcatgagttcttcaaagacctgtattgcccagcaaaaccagtgaccattttcggcgaaacgaagtgggtcaaatccacaaagcttctcgactccgaagaaatgaccttctacctgcgtcgcattgaagtctggtgtgctgagcgcggcatcaaattacggatccctaccaactccgaatatcactcaaaaggacacgaccatgtttga

SEQ ID NO: 100088 - DNA, 1140 bp, Enterobacter aerogenes
atggctaacgaagattcaatgacagttaatggtaatgctggcagcggcgttcactggggtggtggctctggtaatggcaataatggaggtgctggctcaaatggtggcgcaaacgtagctttgggtggaaccatggaagttgaactgggtaatggctttacaatgatcgttgacggtactcatcctattaaccccggcattggtggtgcgccatggtctgatgataagagtaataagagtgcagttgacgctctcaatgcaaataagagcaagcctgcaaaatttaaggccaatattcaaaattataaatctggaactcagggctctttaaatagcccggcagttaacaagtccagcagttctggagacgttgatacgtatgccgttagctttggcaaagaaaaatataacgttatgtataaccgtaaaaaagattcattcactagcggttacgttgatggtggtgcaaccaaacctgaacacagcatgaaagatcaggctattgcggttgtgcagctttatcttctcaacgaaaaggaaaaagatgtaatcactactgcggcggagattatttccagctctggagaaacgattagcgggaagcttggcgaaaaatataaaggtctggcgcaaggcgtcgctaacgatatccgtaattttcagggtaagaaaatccgtagctttaaagatgcaatgtcatcccttgaacaattcactaaaaatcctaacatgaagctgaaccaagcagataaagcagctctggttaatgctctcaatcaggttaatttatcaacgctggcagaccgttttaaagggctggaacgagccttcacctgggcagatcgtttgctcaaggctcaaaaaattaaagacggtgtcgttactggtgttaccaccgggaactggcaaccattggcattagaggtggaggcgatgtatcttagcggcgttgccgggagcgtggcactgggcattgttactggtatgattagtggattagcagcccttatttctatacctgctttagctgtcacagccctgaccgtaaccgccgttattggtattgctattgccacgtcgtatatcaacgctgatacagccaaggcactgaacaacgccgtagctgatttattcaaataa

SEQ ID NO: 100089 - DNA, 288 bp, Enterobacter aerogenes
atgagcatcatcgacgattcacatctgaccgatgaggttgttaacagcgcctttgaaggcacaaacttcgggcgtaccgacttccgcaccatactggcggaaaccgtacttaagcgcgcctctggttatcactcaggctggacagcaacgactatctgcatgcgccttggcctgctgagcgagaagaacctgagcgctacaaaactcggcctgacgtttgcctttcaccactactaccgccagagcgtccgcgatgcgctgatgccaaaacaggagcttgcagcatga

SEQ ID NO: 100090 - DNA, 294 bp, Enterobacter aerogenes
atgtatccattaaacagcttcggatatgcattcctttcaatcataatcatggtgcttggtatcggtttaatcataaaggctatcaaaaagccgctagttgcggtgaaaatgatcttgttgtttgtgattccacttattacattttggggcactacatttttgttagatcgtgggctgagttattttgagggggacaaggattcacggtttattctcgccgtcataggcggaggaataatgtttttcttcagccaacgtatcattggaaaaatgctaaggttcaaggatgaatag

SEQ ID NO: 100091 - DNA, 243 bp, Enterobacter aerogenes
atgacaataaaagtacattatagttacgatcttaatggtgaaactaaaagcaactcatttgagttagatagcgagtttcacattcttgatatttactacgatatttcttcattagaaaatgtctcttggctcattcctgcgagagaaaggggcggagaaagaaacaatttaactgatgttgctcatgctgcaattcaaagagcaggaattaagaatataaagtttgaatgcagagtcctttaa

SEQ ID NO: 100092 - DNA, 1656 bp, Enterobacter aerogenes
atgggtaacaaagtggacaacaaagctccaaaattcactaccaaacgcggcaacacgtactacatcaactttcgtctccctgacgggacattctttcgccgtagcctaggtacggactccttaaaagctgttcaggtgacgatgagtcgcctaagcccatacattccccttgttcaaaatggctcgctgtctgtcgcgcaattcaaaatgcacatagatggtttccgtgaggccactcagcgcgattttgatacctatttgttggattggttaagaatgggagtggaagaagctaaacggatgcctgacttagggcgtttccagcgtaaaatagattctgaggctaccatctcacctgctgctacagtcacagaggcaaaaggccgtgccgatatacatttgaatcgggtttatagcggggacgattctaccgctcgaatgttacttgctactttgcaccagaagaaagtttctttcggtcaacgagatttagaccaggtttatgaggtggcggggcagattgatatgcatcaggccatgctacaccaagcttatgaggcgttttatgctggcgatattgtccgttaccgcgctcttgttgaatccatgcaatctcaattagctgataccgaaaaacggaagaagaaagtaattaaacaggctgtagcaactgttgaagctcctgaagctgacaatacgccgttactctcggaagcgtggaaactgtttgtagcggagaagggaaaaacctgggcgatcaccatagctcgcgagaatcatcgtttctatgaagtgctgatgcatgttttaggagatgttcccgtaggtagtattaccaaacagcacatacgccaaacactggcagtgattgaaaacttaccgcgacgtaatctcaaaccgtattctgatatgagtcttgatgaatgcatagattttgatgttcctgaagatgatctgatcagtagtgctaacgttaaaaaacacctcaagatttattcctcgtttttcaaagtgttccttaaagatgaaaaggacattttagaaaaagcgccaactgaggggatcaaatatgaggtgacagagaacaagggggggcattactcgcggcctgagatgcaacggctcatagagcggttatctacgttcaccgattggcgtaaagactacttcctgactctgatttacacaggtgctcgtcggggtgaaatggcggctattcgtaaagagcatatccgcaaagatgaagaaacagggcgctattacatctttatcgagggtggcaagacagaacatgcacagaggcaaattcctcttagtaaacatatagaagcgttactgttagcacgtatcaagcatcttaaatcagatgatcttgtatttagagacttgccaacttacgagcatattgctcttgtgtggcgtagcctaatggaagattgcaacgttccaaaatataacgaatttggacagaagagggtgatccatgcatgccgccacactttcatttctgaggccgtagcgaagactcagaatgcagcgctggtgcaatttgtggtaggccatagccgtactcaatcattaggtataacggcgaggtatacgcataggccaccgttgcatgatttattacaggttgtagacagtgtaaactggtga

SEQ ID NO: 100093 - DNA, 2472 bp, Enterobacter aerogenes
atgaactgttgggatattctgggattagcgccgggagcggagccacgtgacattaagcgccgttttgcgcaattggtaaaaattcaccgtccggaggacgatccacagggctatcagcggctacgtcaagcctatgaagcggcgctgagctgggaagagaatgaggataattttccggaagatgaagaagatgatgagcaagaggacggagaacgtcatccggagcagactttcttcccccggcaacgcggacctatcccgctacgatccgctgacgtaggccgtggcgcactgggctggcaaaatgtgctggaacgtctgtttcaggtgaatgaaagacagcctgaaaatgccagcaagcagctcgaggccgcgttgggcgaactcgaatatcttgatctgaaagcgcgaatacgttttgaggaagaattgctgatcaatctgcagcagcttactcgcccgttactgacgttagctgcggcaaaattcttccgttggcatctggttgccgccgggactcgggccgccattcagactgcgataaacgaaagttgcctgctgtatcaaaaattagaacaagaaatagcacctcattttattgccgatatgtcgtgggctgaggaagtggagtgcggcgataaaataaaaaaaatttattattcaataagggataatgaagtaagtaagacgtggttcgatgtcgtactgctattacagattggcaaatttcagctctcatccaattttttatgccaactcattgaacttgttgaatggtcatttaaaccggatgataaagtgcgcatatggtctttgtccgaccgttttcatgccctggccgccgtgcataaacaaagttatcgacagctcattgccgcgataaacgtgcagaataataattatacttcatcgatggttgttagcagttatttaaaagctgcagaacaggaccatgccttttcatataataaactggcggaaaaatattatgctggcgcggatgtcgaaaaagacgacgctcaggcggcatactggtatatccgcgcggccgagtcaggacatatttctgcccagcacaatgttggagtcctctatcgtgatggcgttggcgttgaaaaaaatgcgcaaaaagcatttgaatggtatatgcaggccgcgctgcagggcgatgacaagtcgcaatatgccgtgggggttatgtatgagacaggttctggtatcgagcagaatctgacgctggcgtttgagtggtatctgaagtccgcagaacaaggaaatagctggtcacagcttgaactggcaaagatgttatgtggcggcgggactggcgttgaagaggatctggcaaaggcttttgcctggtgcgttaaaagcgccgggagtgggtatgacgccgcgcaaagtcaattggggatcatgtactttcatggctggggtgtcgcgcaggattaccacctggccaaggagtggtatctcaaggcggcgggacagggagaaaataccgctcaacataatctgagtattctctaccgcgacggactgggagttgaaaaagatctccaaaaatcgtttgaatggtgttaccaatcggccatccagggttttgttaatgcgcaaaatgaacttggacataaatattattatgggcagggtattccgcagaattacattctggcatatgaatggtttagtaaagctgctggacaaaatgattgttgtgcgcaattttatctcggtgagattcatcgctttggttatattcccgatagtgattatcagcaggcgctttattggttaaatctggcggcggaacataactatagtcatgcgcaatatgctttaggaatgatgtattttgatggagctggcgtagaaaaaaatacgcagacggcgtttcactattttcatgctgctgcattacaggggaacgcagcagcacaaaatagcctggccattatgtttgaggacggtaatggcgtgactcaggatttccatcaggctagcaaatggtacatgcttgcaggtgaacaaggtttgaatgacggccagtttaatcttgcgctgttgtataaaaatcatctcgcggatcaccgccaggccgtctactggttcacacagtcctatgagcaaggtgaggatcttgacgcggcatttatgcttcataagatctttcaggaaggcggtaaaggagttgagaaggatgaagagctgtcatttacctggtgcgcccgggcggcgctcagaggacataaaaaagctcaaaatgtgctctgtatactctattattgcggatgtggggtcgagaagagttacgttgatgcatgggcctgggcacttatttttggcccggtaggcatactgttaaaaataaagaagtcaatgtcgtcggaggaaattacgcaagcgcaagctctggcaaaagacctgataatacagtatgaactggaaagtacctttcacccgctatcgtaa

SEQ ID NO: 100094 - DNA, 1701 bp, Enterobacter aerogenes
atgataattggtatcgatttaggtacaacgaatagtctggctgccgtgtggcagaatggtcaagcggtgctcatacccaatgcactaggtaaatatcttacgcctagtgtggtgagtgttgatgagaacggtatggtgttggtgggtgaagcagcccgcgatctccaactggtgcggccggccaactgcgcggcgaacttcaagcggttgatggggactgcgcagaccattatgctgggtaaacaggcttttcgcccggaagaactctcttcactggtactacgccagctaaaagaagacgctgagaatttccttggtgaaacggtaaatgaggcagtcatcagcgttcccgcctattttagcgacgtgcaacgtaaagcaacgaaaattgcggccagtatggccgggttaaccgtcgagcgtctgattaacgaaccgaccgccgccgcgctggcctacggcctgcacaaccaggaagatgaacaccagttcctggtatttgatctgggtggcggcacgtttgatgtctctatccttgagttgttcgacaatattatggaagtacgcgccagtgccggggacaacttcctcggtggcgaggatattgtcgatattctggtcgaggcctttcgccaacagcaggaattcatggaagagatcgaatggcgggaacccacgctacagcggcaactgcgggtagaggctgaacgggttaaaagagctctgagcctgcgtgaagccgcggttttcagcgtggaaataaaagggcaacactaccagtggcaaatcaccgaaacggattttgagttgctgttagaatcttttttcgcccgtattcgggagccgctggaaatggcgattcgtgatgcccggttggatatctctcagttagatcaggtcgttctggtgggaggttcaacacggatgccgcttatccgcaaacttgtcgcgcaactctttggccgcctgccagcaatgcatcttaatcctgacgaagtgatagcccagggggcggcgatccaggcggcgctcaaagcgcgcaatagtgaacttgaggatgttgtggtcactgatgtctgtcccttcaccttgggcgttaacacctcaaggaccttgggacacacacgggaacagggatactttgcaccaattattgagcgcaatcgcagtattccttgtagccgaatgcggaaattttatactgttcacgacgaccaatccactgtcgactttaaaatttatcagggcgagagccgaatggtagagaataatatctttctggccgagctttctattgccgtaccacccaaggcggcaggagaggtcgaaatagaagttcgttttacctacgatattaacggactgcttgatgttgatattcatgtgccgttaacgggcaatcgcagcagtctgctgattgaacagcatcccggagcgttgacggaagaacagcttcagcagtcgcttgctaaactcagcgcgctgaaaatccatcctcgcgatgatcaggcaaaccaggcgctaatggcgcgtctggatcatctctatcagttgagccttggtgatactcgcgaatggataagcgattgttcgcggcagtttagctacttgctggaaaagcaggataacgatccgattgttgcttttcgtgagcggcttaatcacattcttgacgaccttgagacggaccgactgctatga

SEQ ID NO: 100095 - DNA, 783 bp, Enterobacter aerogenes
gtgttttatcccgataactgctgggcagtacgccgaggcctcagccatccgccggttaacggcgaaccggacatcgcctgctatcatctgccgcaagaatgcaacgagcaatcattatgcgttccactgatcgcgcagggtgaagccattggcctgctctctttccgttatgtcaccagtgagacagccccttcccgcgcctatcttgaactcatggcggaagcgctgggtctggcgttgtccaatcagcgtctgcgcaacgctctgctggaaaaagcgttgtttgattctctgaccgggttgcgaaaccgccatcatcttgaggaagcgctgcatacgcagatgaatctcgcggtacgcaacaacagcccgctgagctgcctgatgattgatatcgatcactttaaggcggttaacgataattacggccatgaggcgggcgatctggtgattaaaaacgtcgcggcgatcatccagcgcgcggttcgcgatattggcatggcattccgctatggcggcgaagagtttttggtgctgctttccggcagcgatgaggccagagcggaaacctgcgcgactgaaatctacaacaacgtgagaaatatgaccttacgctgcgggctgacggatataggccaggtgaatgtctctattggtatcgccagctatccgcaacacgcacaaagcgacagcctgctacgtgccgcagatgccgcgttgtatcgggcgaaagagctgggacgctcgcgaattatccgctttgatatgctgaaatcggcataa

SEQ ID NO: 100096 - DNA, 900 bp, Enterobacter aerogenes
atgaaagaaaaatatcttatcaataacagtgtgtacttctaccctgctcagcaattattagtaccaatatcagaagagtatgcgcaagtttctttaaatgtgccggcaagcaggtgcttaaccctactattagaaaagaagggtgagatcgtcacaaaatatgacttatcgcaagatgtttggcaaagcagaggtcaatacaccagcgccaatacgctttatcaaaacatttcgctgatacgtaaggctctgcgagaagtaggtatttctcatgatactatccataccatacctcgagaaggattcagctttctgggtacagctattcttatgcaggaggataatgcccctgcagaaaacgtttctcaagcaggagctgcgtctaaagaaaaacgtcatgatgtatctgtaagttataatatgaaaattataaataatgactacagtgcccatgatatatattcccctacacaacataaaataccagagattaaccctggacctccccagaaaaccagcatttctcccttgaaagccacgcttaatttcatcgacattgtttatcaatacaaatggcgatcaatttctgcggccctattattgatgctatcaattttcaccttttattattacttaagtgacaatactcatgattactttaaaaattattacagcataggtgatataaacaactgtaccttaatgaaaagtgaaaaggataagcttagacaaaaagcagattatttttctatttttcagcagaaaaacattcactgtgaaacggctaaaaatgtctacatcgcaatggatactcgtgccacgaagatttttatgcatttttgtaataaaaacacagatgatacctcttcttgcttttcaactttttttatcgagcgctaa

SEQ ID NO: 100097 - DNA, 459 bp, Enterobacter aerogenes
atgaaaaagaaatggatttttgttttgatattgttaaccctcgccttatctccattgttactcaatgtaactgaaaattatgataaagatcacttctcctgttgggggaaaattagttttaacaggcaagcgggaacttactcagtgaaagtgagatatgtttttaatggcgataccggaaaggttattacgattggagaatataatgaaccaggattgcctgcgcgcaaagtaacgcagaatttggcttttaaatttaccaggcaagggaatgtatataccatgatctcgactctctcactgcttaccgcttcccagacccggcttttgagcggtgtggtacctgatttttacctctatgaagatcgaggcttacagctatttatccataaacaaggacgcaatgggctggtcttctctacggcgtctctacccatatttatctgtacgttgcagtag

SEQ ID NO: 100098 - DNA, 180 bp, Enterobacter aerogenes
atgcccgttttccgtgtccgctcgcaaaacttttgttacctgatagcaagagacaatatttcccggacagcgcgacgcaacgccattcttttcaacatgaccacggcggtgaattgtctgacactccccgataacagggaggagttatgcgattaccacatctggcaggctgcgccataa

SEQ ID NO: 100099 - DNA, 177 bp, Enterobacter aerogenes
atgctgaattataattttgactacattattaccttgatggttatgacgttagtggtagcggcagcgatggtgtgtttgatgttgttgtcgttaaagtccaataaccacagaaaattttttatttttgtctgtgtggcgatggcgctattggttacgatggctttccattatggatga

SEQ ID NO: 100100 - DNA, 804 bp, Enterobacter aerogenes
atgagaacaatcgttgcttttgtctgcctgacatctgtttcctgcacctcgccttaccctaatgctattcctgagatgaattacgtcagttcattagattgcagtaataaaaaaacggcttctcaatgcataaacacagctaaaaatgattatgaaaaaatggctactgaagttaaaagatatgaaatgcaattacgagaaaaagaacagcaactagccacgcaaaaatatcttctaagtgataccagtgccgctggtgctgtgacatcagtgattgcggctgcgagtggagcactgaccacggcactttatgccggtggaacttctgtggtaggtggtgccgcaagccagcgatataattatgatattcaacttctgaattatcgctctacccggaaaaaattaaactgtatatatcgctccatgatggatataacatccgaccaaatggatattgcaataagtaccgaccccaatccttcagtaagtgggctgatacaaccatatttaaacagtgtaatgtctgatctggagtttgaactccagtcggagcaggccgccgtcagtctggttgcacccgatgtcacagagattgctgagaccttaaatcagcaaaaggcggcgcagagtagcttaatgtctttttcggccgccgataaaaattcagcaatagctctcgctgagcttatccgtaccaacataaaaatgtgtaaagcaacgcctgccactgcgccggtagttgcatatcaggtaaccaaaccggcaggcggaaatagtgctcaaagtaaaggtgatggaaaatga

SEQ ID NO: 100101 - DNA, 864 bp, Enterobacter aerogenes
atgataaatagtatccagaactttaaaattgcaaggcttacttggcgcacatttctgtcgctgggagggggagcgctcgtcagttcctgtatgcaacctgcacaaattatcaatcaggaatatcgcatactgacacctgattttcaggacacttttgatatcccgcctccccccgacagttcgaccgggagaaaaataaagctatggtcgactaacttttataccacgcaacccgtcgaggataaaaacggcgtcccattccgggataaagatggtatcccgatatcggataatgtcagtaagcgtagctggtgcctgggtgctcaggaaggttctgtcaaaacaacatttcatggagaggaaatcaggctcacgcatgctggagtatttaagaaaaaacctccttattatatcgactgtgatgtggaatatgaaacccatactcatgatctgtctgcgtatgggttaagttatcatgtaaaaaccaacgcaccgtttggcttaggaattaacaattactttttggttccgtaccggactatggctgtaaaggttaatgataattcaggtttaaaattaaaggcaggagacgtactttatattaatgatgtgactaacaacatgatcacagatccctacactggcaggaaattcaagcatgacggatatttctttgtcggagatgttggtggaaaagttaaagatatccatgctgacaccttttgtggtttccaaaaaaattgccttcctccgtttacaagcagtgatgacgatcatcattatatgtttacagccgtggttatcactgaccccgcaatcaaagaaaaactgctacgaatgcacttaaaatccagctacaggtag

SEQ ID NO: 100102 - DNA, 501 bp, Enterobacter aerogenes
atgactgatatcaccgaactggcgctgattaccatcaaaaatcagatcagaagctttgacacggtagtgctgagagagaatgaagccctcgcgctggtagaggcgctggagaaggcgcagcagtacgccaaagagcgagacgaagagaatcaggacttgatgcttacaattgggcgctttcgcgtagagagagagggccttgaagctattcgcgctgcagccgaaaaactggttcgctgcaaaggtcgctatcacagcgagcagaactatcgcgcactggcggagatgtttggcgtgacaactccagaccttccgccgctggatagcgagtcccgcaccgtcaccgtgaagctgccggaggtacgaatcaccgtagctgaatctcgacgtagaaatatgacgtggcgtgaactgggggcttacaacgaaggtgctgatgttgcggctgagagaatcggcaaggagctaaccgcacagggcatcaagtgcgaggctgagtga

SEQ ID NO: 100103 - DNA, 609 bp, Enterobacter aerogenes
atggatttacaagcatgggataacgttatctctatcgcctccaatgcagtcacagcggttagtgtggttgggggcgttctttttggtaaacagaaagttgatgaatatcttagtaataaaaagaaaagcatatcattagatatagctttaaaatattatgatgaagtcactaatcttaggcataggatacaaaagatacaaattttgatgaactccgtcattcatcaatttcatgaccttaatgaaagcaacacagtaattaatccgactgattttttcaatatccaagctctatctcatgagtatattgaagaaaccctctctttgagtaagttatttgtcaaactgaataggtttaatatagaaataagcgaaaagagttgctccatagttgataataccttacaagcatctcacaggatgtctgaagcagtaaccaatttctttgcttacgtccttacttgctcaaatggtaaaactatcagcaaagaggaactgtcagatattaattcgctttatcagaaattccaagttaaagcctccgagtattccaattcagtacagagttttcagagtcttgtctttgatgagactttcattttcaaataa

SEQ ID NO: 100104 - DNA, 1092 bp, Enterobacter aerogenes
atgattagttctatggggttaaatcctctggaagctgacgcagccattcaagagacgttaaaacaaaccggctttaatatgagctatgaaaagatttcggatatcgcaaaggatacccaggacaagatcggacagttgagtctcggacaatggactaaagacaagaccgggaaagcctcatttagcggcggtggcgaaatggcagattggctaaatatcatggttaaccgtggaggctatacccagcaaggtgcactatcaacactaagaaacgtaaaaggtccagttgagttagctgtgttacttgaagggttacgtaaaagtgcaaaacttacagactctgaattcaccgcattagctgaagtaataaacgacttttcttatttagctaaatctgtcgatgccagcgggcaaaacgtcatcgatactatgaatacgatggttaacagtggcctagcacttaatagccaacagcagaaatccatcgataacctctctcagatgtcgattgtatttgataacgccagaaatgcattaggtgatcaatttgcggcatcttttagcaaaggtcttgatgatttaggaattaatacacaaaatctatcttctgaaatgggttcattggtgcctctggtgaaggatttaggaatgggaaccgctcagactgttaaaggttttaaagaccttctggatgtgttgtctattatcacagaatggaaaaataaactccttggaactgataaaccagaggaacagaatattttccagcaaggtgcaacatttgttggggaatcactgttgccaccgggtgtcctcgatatggcaagtcggattaaaaatatagttagtcctggttctgattcttcatatgcatcgcaattgcaaagtggaacgttaatgaatcagtttataacatcaacgccatctatgcagtaccaagcaatcatcccggatttaaaagctgattttaatcttactgtcaatccatctcctgaatttggaatgatggtagaggcggtcgccgataaacgcattgaatgggcatttgatgatcagaacttccagattaaccaaagcattcttggtcagtga

SEQ ID NO: 100105 - DNA, 1407 bp, Enterobacter aerogenes
atgatcgctgttaaattcatcattcgtcgtcttttttggcctgttcaatgtgtaaaacatcttgtcgctgagcagttgtcacatattttagcaaatagtaaacgtgctgaagacattgaaaatttacttgcagttgagatgagaaatcgtcaactggagtcagaggtggtagatattttaactgttttctggctagctagcctgaaaggttataaggtccagaataatatctctttctttatttgtgctcgtagctttctttcagacatattgctggagtctatcgctccaaatttaccaaacctcagttgctatcaagtactgcataaacatcctgatgatagtaatcactatggatttgaaaagattcttggcaatgacctcccccacatattttgggatgaaattaaaaggcttgaggataaatcagggatcccagctaaaagattaatgaaaaaagaatggagtgatatttgtcataaccatattcaacgatgggaaagggttgattatttcttcggttcagagcgtgatggttttactatgagtttttccacgagaaatacacgatttggtatatctgcatacttgagaaccattaaccgaattatcgctgaatttagaatgcccaaggattacgcagaacattattcggcttgtttaatgtcggccaacccattattttattctgtgtcaaatcacaggcctgattggttaccttcatggcaatatggggcgattactacaaaagaaaatataaagtcatatatcgaggaatgcctaaaagaatttaaaaatgaaaataataacttaatgttaggcgcattatcattacctatacgcatagatgaaaataattggttagatattacgattgttatgggcatacaaacagaagagcatgtctcttttaaaattcaatatgcagactgcggtcatagtatagatagtttacttcaaacttatagaaatattgaattttcacttgcaaaatgggctgaatataaaaattgcgtaccactattgggaagcacaggcgagttactgagaatagcacggtgggatataatgtacgaattccgtgggcttttctcattatgttgccaggaacaggttactgcctacccagctaaagattatattaacttcgattatcagggcaataccatcggctatagcgacttctggcaagcaataccattatcaatttatcctaaggatatacgctcacctgttgctacttacactgcttatgataaggaccttgcctataaatggaataatcatagcgtactgaaaaaacctaatatcatgttatgtgattgtaaggtacttaagagagaaaatagttacactccttttgaaacatcagatattcgatttcactttgaatctgagccattatag

SEQ ID NO: 100106 - DNA, 981 bp, Enterobacter aerogenes
atgaatacagtgcttattccccccggtcccggcggctacggtaaggggctgtggctgcccgttggcagcggcaaaaaagtactgtcgctgaccggacgtgagattcatccggtggcgatagaaattggcgcactcaccgaatcggaagtggtgaacggcttcgccgatatcccgcctgataacgacatcctgtgcgtggtgattaactgcgccgggtccctgcgctgcggcctgtatccgcagaagggcatcccgaccatcaacgtgctccccacctggcgcgccggaccgctggcgcactttattagcgaggagaattacgtctccggcgtgacgatggagcaactggttctggtgggtaccgccgaagcgccggacggtgaaccggagtccgtgcctgtcgctgcgccacgggttatcaccacaccgccacctgcccatggcgcggagaagctggtgcgcatggtcgagcagaccggtaccgcagtcggccacgttatcgccctgctgttcgccgccagccgtgaagcggtggacgtgtcgctgcgcaacgttatcccgtttatggcctttgtctcgctgctgatagccctggtgcaggagaccgcactcggcagcctgattgcccacgccctgacgccgctggcgaactcgctgtggggactggtgctgctgtcgctcatctgcggcattccgttcctctctccggtgctcgggccgggtgcggccatctcgcaggtgattggcgtgatgataggcacccagattggcgcgggcgcgatatctccggccttcgccctgcccgcgctgtttgccatcaacgtgcaggtcggctgcgacttcgtgccggtgggactctccatgcaggaggcgaagccggagaccattgcgaagggcgtccctgcttttctgctgtcgaggcaactgaccggaccgctggccgtcatcatcggctggctgttttccctgggcttattctga

SEQ ID NO: 100107 - DNA, 522 bp, Enterobacter aerogenes
atgtggacagtcagcctcgctgaggcatttattcatgtattccaggccgcaggcaaaatcttcctcgacatgatgaccgggctaatcccgatgctcatctgcctgctgttggccatcaacttcctgatgaagctggtcggcaccgtgcggatggagaaggtcgccgccctgctcggccgcacgcgtatcctcacctacggcgtgctgccggtgctcggctggttctttatgagcagccccggcgcgctcactttaggcaaactcctgcccgaaaagagcaagcccggctatgaggatgcgctcggcaccactgcccaccccctcaccagcctgtttccccatgtggtgccgtcggagctgtttgtctggctcggcgtcgccgccggggttaaggcgctcggcctgcccgtcacctcgctggcgctgcgctatatcgccgctgccatgctaattggcctgattcgcgggattatcaccgagtacctgttcctgcggctcagcaaacgggggaatgcgccatga

SEQ ID NO: 100108 - DNA, 408 bp, Enterobacter aerogenes
atggacaaaacagaaaacaagaatcgcgaagaagatcacaaaatccagtttggcagacgactggcgcaggccatgctgctgacaaagcataccaatgcctcattggcccaaaagattggggtcagtgaaccaatggttaagaagtatgtggatgggcaaaatcttcctaaggctgatgtgttgcttaagatcgcccgtgcgacaggtatcagtacggcatggttacttgaagagcaggaagatactcaaaccccggaagactctgctgaaaaagatcttgaatttctaaacgacatgttcaaattcttatcggctatgcagcgtaaaatagtcctgaaacaagtatctgaaacggtaacgaagttgcttgaacaggaagaaaaatacctcgcgaagaagcaggattaa

SEQ ID NO: 100109 - DNA, 837 bp, Enterobacter aerogenes
atgttaaaagttaatttttttgatagaaaggttagggcattattttataagtatgcaactggtattacaggggctattgctgcaattgttttattttgggatattcctgctaaatataaaaatcctgccggaatagtttgtggtattattttatttgtgatttacattataatctggatcgtttcaaataaaataaaatctattgatttaaccgttgacggaagtacagtgacaattaaatctggagatatttttgctgagcaagggtttaaagtcatagcttttaacgaatatttcgatacgcaggttgatgataaaattattgcctatcatagtcttaatggattgtttgttacagaacatctttcctgcacagttgaggaacttgataaccatattcaacagtatcctttttcaagggatgatgttttagattttaaatacgaaagattgtcaggtaaaaaacaaaaatatgaaatcggaactatttgtgtatgggaggattatttattaacagcattttctaaatttaatgattttaatgaagcccgtttaacaatgccagagtatcttgaattcttgatcaatttttgggatagagtcaaccgagtatatgcacagaaaagtgtttctgttcctatttttggttcgggcatcacacgtataaaagagcataaaaatattactgatgaagatttgttaaaaattatgctttggacatttagaataagtgaaatgcgttttacgcaccctgctaaattaaccataattattcataaggataaaatcgacaaaataaatttattcgaccttcaatcagcacgaaatggattgtga

SEQ ID NO: 100110 - DNA, 513 bp, Enterobacter aerogenes
atggtgtatagaacgaaaacatatatcgctggtgaatgggatggagatcaagacgcaattcaacagttacatgcttggaatgatagtaattattggagtttatccttcaccgatgcgcatgacttaactcaggctcgggatagtagtctgaactgcagcataaaatcttctttagccacacgccttaatgcttctaaaacattcgttctggttgttggaaacaatactaaaactgctagaagtggtagttgtcgatattgcagtagctataatagttattctggctattgtgccagagggaattcagtagatcatcgcagctatattgaatatgaatgtgataaagctttaagagatggtttgaaaataattattctttacaatgctgcgtctgttaataaagctaagtgtccggattcattaaggaatgcaggtactcatacagctatgtgctattatgataagggaaattattactgggattatttagctgtgaagacagccttgagctag

SEQ ID NO: 100111 - DNA, 627 bp, Enterobacter aerogenes
atggctggacgtattgactatcagattgaaaaatttcagttcatcgagcgcaacgaatccccgcgtattacccgccagtgggcggaagttattgctgaatgtcagcaggaaaaggcaaacagtgaaacgcgtttgcgtactgcgttgctgaatgtcgactacgtcaccagcttcgaactgccgtttcgtttattgcttatccgcgccccgcagctggtggatcgcttacgccatgcgctggcgctgaatcagaagaatgtggtgattaatggtaagaaacgcggctgcgtttacagcctgaaagccgatctcagcgccgttccggatgagtttcgttatcgctttgtgagtcggattattcgcagcgggccggatgcggtttccgccgcgccctatcagcagctggcaaaagagataaaggcgccgcgcgagcggttacgtttggcgctggaaagtggtttgcaggtcaatgcgctggatgggttgttctggtttggcatccagcgaatcgctgcggatatttcggcgctgcgttctgcggggatggcgattacgactgcggaagtggaggtggcggatagtctgaccagaacgacgcgaatgattgcggcgtatcgggtggagtga

SEQ ID NO: 100112 - DNA, 630 bp, Enterobacter aerogenes
atgtcagaaataaaagcgtctggcagggctattagccaacgagtgaaattatgtgtgccagatagccgcagggcacaagttataccattcaccaggcaaaaagcgcagggaggaagggtgaacagaataaaatggattatccggggcattgctttatttgtgtcagtgttgttatcgggatgttcgcactcccaggctggcgagtcgagcgcagggaatatcggcggatacaaccatgttgccgggcagaacgttaactggttttcagtaaacggctaccatgcgacgctaaatggaaatgtgtgctgcgttatgatcccggaccggtggcgacctgggatgactgcacatattgagtgggaagttgatcctaaccccgctgaaaatataaagaaaaaaacaaaaggatttggatacgatcctgcggcatatgctaagcataaggccaaataccttcgctatagtgctgacgttcccattccgcaatataaagagagtgcgggtattaacgtccattttctcccctgtcatcaggtgaaaatttatgcgggtatcgctggctatggggcagatgtgtatcccattaaagagccgatgaatatgcaggaacccgcaacatgtcagaaataa

SEQ ID NO: 100113 - DNA, 132 bp, Enterobacter aerogenes
atgctacttggacattggctgcaaggaaaagaaatccccgatccttatcgcaaaagtgatgaggcatttgagtcggtgtatcgattaatagaccaaagctgccagcactgggcagagaaactaggtagataa

SEQ ID NO: 100114 - DNA, 1581 bp, Enterobacter aerogenes; identical to SEQ ID NO: 99597

SEQ ID NO: 100115 - DNA, 1650 bp, Enterobacter aerogenes
atgagagttaattgggtaaacattctggtaattatgtggttaggtattagcctttcagtaattcaagcatatggtgcagtaactaaaactacttggccaaaagcatctccctcgcaattcgtgttggttgaaaataactctgatgataactttttcgtcacacctggtggtgcgttagatccgcgtatgaccggtgggaaccgctggacgggtttaaaatacaatggttcaggcacaatttatcagcagagcttgggttatatcgataatggctacaacaccccgcttatcgctaactatcggtttgatatgtggctggataattccccggttgcccacccattactggggctacgctgtattaactggtatgcaggatgtgatatgtcgaccagtctgatccagccgcagacgaccgacgacatcggtttttatggcgcgaaggtaaccagtggtggtgtcaaatggatgcacgggatgatgtccgatgccttctatcagtatctgcagcagatgccggtaggcggtagttttacgatgacgattaattcctgtcagacatcggtcgtttacgatgcgagtaatggcaaacgttgcaaagatcaggtatcaggcacctggtatgtccgcgacgtaacccatatcaaagcgagccacttacgcctgattaacactcacactctgtcggaagtttatattaatagtgatggtgtccccactctgggtgaaggtaatgccgattgccgcacgcaaaccatcggcactagtactgggttaagttgcagaatggtcaactactccttgcaaaccaatggattaagcaatacttcgattcacatcttcccgagtataaataattcatcgctggcctctgctgtagggatgtacgatatgcagttcagccttgacggtaattcatggaaaccggtcaatggtatttcacagtattatactttcaacgagatgaagagctccgattctgtctatatcttcttctcaagcaacttctttaagcagatggtgagattggggattagcgacattaacaccaaggatctgtttaacttccgtttttataacaccacttcgccggaatccggctggtatgaattctcgacatccaatagcctgattatcaaaccgcgtgatttcagcatcagcattatctccgatgagtacacctcggcgccatcacgtgagggttatgtcggcagcggcgaaccggcgctggatttcggctacatcgtcaccaccagcggtaaaaccgccgccgatgaggtgttgattaaagtgaccggtccggcacaggcgattggcgggcgctcgtattgtctgttcagctcggcggacggtaccgcgcaggtgccgtttccggcgtcgctctctttcattacccaaagcggggcgacgaaaagttacgatgccggctgcgacgatagctggcacgacatgaccgatgcgctatggctgaccacgccgtggactgatatttccggcgatgtggggcagatggataaaacaacggtgcgcttctcgattgctatggatgatcctatctcgctgcgcaccatcaccgacaacggctggtttggcgaggtcagcgcttcaggagagattcatgtccaggcgacgtggcgtaacattaattaa

SEQ ID NO: 100116 - DNA, 177 bp, Enterobacter aerogenes
atggatgtcgataaaaaatatcccaccatcgattttagctacggcagaaataaaacctgtgaagtggcgctggagctcagtcaggcacgcggcgcggtgtgggtaggggacgtagtatgcagcggtctctcttcatgggctgcggtacaacagacaggaaaagttaatgagagttaa

SEQ ID NO: 100117 - DNA, 531 bp, Enterobacter aerogenes
ttgccgataactacctcccgactgcatctacgccctgtaataaactcagacggagatgaccttttcagaatttatggcgaccctgccacaaatacgtttaatcctgcaggaccgtatcctgatattgattatactcgtgatgtcttggctcgatggcttaaacactgggaagattacggtttcggaaactgggctatctcgttaaaagataatcctgaaaggattgtcgggtttggcgggctaaacattcgcagttatgcagatacttctatcaataacttgggatatcgtttctctactgagtcatggggaaaaggcctggcgacagagtttgctaaccatgcggtcagttatgggtttaatgagctcaaactgcctgatatatctgccatagtaagagcaaatcacctagcgtcacagaaagtcttaacgaatgccggactcaggtatgtacgtgacattcatgatgtggaaaatgctccagccagcatgctgtttacactgacccatgccgaatggcacaagcaataa

SEQ ID NO: 100118 - DNA, 159 bp, Enterobacter aerogenes
atgaagaagcgtttttccgaagaacagatcatcagtattctccgagaggccgaagccggggtttctgcccgtgagctctgccgcaagcacgccatttccgacgccaccttttacacctggcgtaagaagtatggcactatgggatgttcagggtgttaa

SEQ ID NO: 100119 - DNA, 651 bp, Enterobacter aerogenes
atgcagccgcgttggctgccgcggccactggttgaccacgccgcccagatggtcgtcgcagaactcatcgagcgcgcttttacggttgaacttctgggtcagccgcgagaagggccagacggtggccatactgttccgatatctggtcagttcgctgtctttgattgcggttttgttcaccgcatagcagatgctgctgtaggttttaagcagcgcctggttgatacggtcctcaccgccgttggcaaacagctcgccgtccagcgagtattcgttctcgccaatctccggaaagcgtgcgccacagcccggaaagtagtaactaaaatagccatcgttttctgcagtattcttttgatctacccaactggccgcatgataaagccggccgatattggtcaacggcgggttacgcgagccgtatatctcatcagccccctctttagtacagcaggtaccgtcgaagaacaggctgatatgcaggctggccgggcagcccggttccgttttcttatccgattgatgatcggactccccgatatatccctccaggtactgcctggcgtagttaccttcggtctgcgttctgctcgccggcaggcgaccgcgctcgttgtattcggttttctgctgcgtggagttatccgctga

SEQ ID NO: 100120 - DNA, 216 bp, Enterobacter aerogenes
atgattccccacgcatggtccccaaaagcagtgctggatacccttcgttaccaatgcaatattttttttatcatacagttcctgagcggccaaaaaggcagcaccaatagcaccaccagagtctccagccgcaggagggatgaaaacattttcatagagcccactacgtcttatcgttgcattggccacgcagttaagagctacgccacctgctaa

SEQ ID NO: 100121 - DNA, 150 bp, Enterobacter aerogenes
atgtccgacaccgcagactccacgctgaatgccctgaaggcgcttattgccgcctttcagaccggcgccactccggtcgcggtcaaaacctccactgtggaagcatctggaaaaccggtattaatgtctgtagcggccaattttatttga

SEQ ID NO: 100122 - DNA, 495 bp, Enterobacter aerogenes
atgattgttttaaatccacatttagataacccgcttgaatctccgggggttattataatagatgaaattgatcttcacttgcatccacagtggcaacgccatgttatacgtaaattaaatgttgtcttccctaattgccagttcataatttctacacactctcctcagataatcagtgaagttaggcgtaatcagattattcttcttggtaagaataatgaaggtgcaacttactgttattcaccagcccagtcttatgggttaacttctaatgaagtgttaaatgagataatgagtgatgaagatgatcaacaacttactcgagcaattgaggttgaagggaaattaacagaaatattcgatcttataaatttagggaagttagatgtagcaaaagaaaaaatttctgatttggaagatgaattgcacggtgatattccagatttggtaagggctaagttagagatagacctctatggatgggataaagaatga

SEQ ID NO: 100123 - DNA, 288 bp, Enterobacter aerogenes
atgattgattttgaacaacacaaaaacattgtagaagattttgtagaacagcactacccactcgcgcatagcttgatgttggatagttatattgacccagaggcctattattcaaactatcagatgctactagaagcaatgaacactctcccggagcatccagaattctttttagagtggctccttgaagatgatgcagctttgtatattaatttgatggaacttgttgtaataaccagagctattgataacgtgtttgcgcaagtttcgtctggagggatggaataa

SEQ ID NO: 100124 - DNA, 273 bp, Enterobacter aerogenes
atgtttaaacggaagaaaccctcggagcatccaacaatcacctctggaaaatatcatactcaggatgggaatatttatattttatatgatgatggctactggcggcagaacgtcaactacctggctgctgttcctacacagtacaactgcaacacctttgaggaacagttagagcggatagccagactgattgaaaatggcaaattacgtagttcctacacgtcaggacagccttttagtatgcagggcggtagattgtatcagattaaataa

SEQ ID NO: 100125 - DNA, 666 bp, Enterobacter aerogenes
atggacgatatcattaacacgcttgtatcaatgtttgatattttatccaatttcctatcgaatctgcctgaatgggcaactgcatttataactgctctgattggtgctgtaattggtggcagatatactcttaaaggtgttgaaaaagaggctgaaattaataagcaagcatctgagagagattctttagagttaaagttatctgtactcaagggcattaaaggagagataacaacgttattaggattatatgatgttagaatgaaagaacatatagatgatatagcaccaggtaaaattttaggtattgggtttccggtaggagatgacaattttactttttatgaacaaaatgctaaggaaattgcaaagttgagtgatgaatcaagagatggcattataaatatttacacttatgcgagatctttgatccaatcatttaaaggtaataatgatttaataaatcagtatcaagagatgaatcttcttcaatgtaaatataaagatgatgaacacttggtaactgtcattaatgatcacatagagtgcatgatagattatgcgcaaggattaaaactaattgacggtgaaacaagacaagccatatctgatggtatgcagattatagacaaagaaattgatagaattacttcactgttgaagtaa

SEQ ID NO: 100126 - DNA, 219 bp, Enterobacter aerogenes
atgatcgacaccgctaacggcgtactgggcggcaacctcagcgcgctgtctaacggctacaacaccgcaggccgaaccaccgcgcaggacggctttaacttctccatcatcagcggtaccaccgacggcaccaccgcggtaaccgattacagcacgctaccggaagggatctggagcggtgacgtgagcgtgcagttcgacgccacctggaccagctga

SEQ ID NO: 100127 - DNA, 174 bp, Enterobacter aerogenes
atgcgcaagcctaaatggcaaaccgtagagcagattgtcgccgctctgcatgatggaacagcacgactgagtaatattgaaaacctttactatgcggcgatccgcaacaactatccagaacgtttagaactttttaaaaatgcactggaacagtacaaacaggagaagaaataa

SEQ ID NO: 100128 - DNA, 225 bp, Enterobacter aerogenes
atggtcaagcccttaaaggcactttttgctaacgccatgtgcatgtttaatttgatgttttggacacataaaacaaaccccgccgtagcgggtctggggttagataacggggttagggtcttcatcaacgtaagttgcacggttaatcaggaacgtcagaacgcctttcacctccacatcgtccagggcgtcaccctcgatcgcttcgccatcggaagtaattag

SEQ ID NO: 100129 - DNA, 171 bp, Enterobacter aerogenes
atgtccctgaatttgagtagacataaacacggttgccatctggtgatgtcaattctcctactggatatccccactgttgaaccatggattcaattgtttgcccacgccaagagagcatgttacgctcaaactgtgccgatgtttggcagcctgacaaaagcattgcgataa

SEQ ID NO: 100130 - DNA, 975 bp, Enterobacter aerogenes
atgacagatttaatcactcgcccacgccgcctgcgtcaatccgcctcgctgcgcgccatgtttgaagagacaacactgagtttgaacgacctggtgttgccgatctttgttgaagaagaaattgacgattacaaagccatcgaagcgatgcctggcgtcatgcgtattccggaaaaacatctggcgcgcgaaattgagcgcatcgccaacgccgggattcgttcagtgatgacctttggtatttcccaccataccgacgcgaccggtagcgatacctggaatgaaaacggtctggtggcgcgcatgacccgtatcgccaaacaggcggtgccggaaatgatcgtcatgtccgatacctgcttctgcgaatacacctcgcacggccactgcggcgtgttgtgcgagcacggcgtcgataacgatgcgactctggaaaacctcggtaagcaggcggtagtcgccgcggccgccggcgctgatttcatcgcgccatccgccgcgatggatggacaggtacaggcgatccgccgttcgctggatgccgcaggctttaccaataccgcgattatgtcttactcaaccaaattcgcctcatcgttctacggcccgttccgcgaagccgccggtaccgcgctgaagggcgatcgtaaaacttaccagatgagcccgatgaaccgtcgcgaggcaattcgcgagtcattgcttgatgaagcccagggcgcggactgcctgatggtgaaaccggccggcgcctatctggatatcctgcgtgatatccgcgagcgcagcaacctgccgctcggcgcttatcaggtcagcggcgagtacgcgatgatcaaatttgccgcgcaggctggcgctatcgacgaagagaaagtggtgctggaaagccttggcgcaattaaacgcgcgggcgcggacctgatcttcagctatttcgccctcgatctggccgagaaaaaaatcctgcgttaa

SEQ ID NO: 100131 - DNA, 1545 bp, Enterobacter aerogenes; identical to SEQ ID NO: 23311

SEQ ID NO: 100132 - DNA, 1374 bp, Enterobacter aerogenes
gtgacacagcagggaaaagatattgcctctaatgccagcgcgatcacgtcggtcaacgcttcaatcggtgcgctgcagagccagggattaaacccctggtgtgatggttcctttgaatcatacaccgcaaaccagcaactgggcagcagctcgctggcgcgcgtctcaaccgatgtttaccgcaatggccagaagtcgctcaaaatcacgcgtaacaacggcgagaacggcaacagcgacaagatgatcgggaactggcttgctgttcgcggtggcggtaagtatcggttttctctctgggcttacatggccagcgatatgtcgacaccgaacggctggaacgtgtctgtcggcctctttgctcgcggagagaatggcggcgcaaaccaatggccggaagccgtccgtatctccgagacaaacatctcgcgcggcaaatgggttctcctgacgggagtagcgaccgtcggtgccgaccggagcattgcgcagatgtggatctccaccagggggccgaacggtggagccggttattcgctgtatctggacgatatcagcattgtcgatgtgaccgacgcacaggaggcgcaggataccgccactggcgccgcgaacgccgttacccagctgactgcgaccgtgacccagcaagggaaggatatcaccgcgcaggcagggcaaatcaccagcctcggctcgcgtgtgggtgatgcagaatcgcgcatcacccgacaggacgaaaccatcgcatctaacggcctggcaatggcgaccggctttaaccagatgcgcagcatgattggcgacaacagcgcggcaatcaccacgacgaacaaaaccgttgccgacctggaaaaatcaaccactgagcaaatcaccacgctgacctcgcaggtcggggatatgtctgcgaccgttcagcagacggcatccaccgtggcggatttaaacgggaaattgggagcgcagtggggcgtgaaggtcaacacgtcttccggtggtaataactacgtggcgggtatccagttggggattgacggcagcggccagtcacagttcctggtccaggctgatacgtttggcgtttatgtgcctaacggcgatcaaaaaaatatggtcttcggtatcgacgggaacggcgcttattttcagcaggcaatggctcgtaacctgacgattaactttggtcagatttctgacagcctgcagtcaacaaactatcaaccccgctccaccggctggcgtttgccaaaaaatggggctttcgaaatgaatagcaatgtacctggtcaagggaggattcaactggatgaatcagggcttaaagtttttgatcaaaacggtgtcctgcgttttgttggtgggcggtattag

SEQ ID NO: 100133 - DNA, 474 bp, Enterobacter aerogenes
atgagcggcgccgatttaaacctctacaatcacggtccggatgccatcgtttcggtgcaggtgaatggctacggcgggccaggcgctaactcctacggcggcggcggcggcttctgctgtgtgatggtgcctgatgtctggcgcccggggctgacggcaaaaattacctggacctccgatcccaattactggatgaaatccagtgagatgccggatgattatgaaactcactatcagcgccatgggccgattattgtacctattgaacgttgggaaaagggacaggcttgcggctttgacgtgcatattttcccctgcgataaggtgcggatagtgcgttcctgcatcccgccgggacagccgggctacccggtaccccagtcgccgccagactggaaggaaagagcaaaaaatatactttataagcatgttaaggagaacatcgtatgtccgacaccgcagagtccacgctga

SEQ ID NO: 100134 - DNA, 273 bp, Enterobacter aerogenes
gtgtgggtcaattcgcgtaagggccgcatcatcacccgcgcgcaggtcagcgatcggccgaataaaggcgcggtgtacatgacctaccagtggtggatcggcgcctgtaacgagctggtgtcggagaacctgagcccgataactaaaacgccggagtacaagtactgcgcggttaacgttgaacggattgccgatcagcgcgcggcggagcagtacgtgatcgaggagtacaacaagctgaaagcccgcctgcgcgaaagcgcgatgggttaa

SEQ ID NO: 100135 - DNA, 228 bp, Enterobacter aerogenes
atgctctcgccgtcctcgtctatacagctcttttcccggatgtggcaagactttagcgcaagctctgtcccgccaatcgatttccgccacccaggggctttatcttcttgctttgcagtcagtgattttgctgccgcctcaatggggatcgccggctggcgtcatattggttttcagccagcgccaggccgcataatcgtccagcccagcagctttgggatccattag

SEQ ID NO: 100136 - DNA, 261 bp, Enterobacter aerogenes
atggcgctcagtcagattgaaccggaaaaaacggaatcaccgtttgccagtttgtctgaacgcgagttgcagattatgctgatgatcaccaagggccaaaaggtcaatgagatctcagaacagttaaatctgagtcccaagacggtgaatagctatcgttatcgaatgttcagcaaattaaacattcatggcgatgtggagctaactcacctggcaattcgccatggcctgtgcaatgcggagtcgttagcaagtcagtga

SEQ ID NO: 100137 - DNA, 240 bp, Enterobacter aerogenes
atgccacccgcaaaggtggcagcatcagaccaagccgtgcagcgttatttcatggtagacgcccgaaacaaagttgaggccgcgatcaactctctacctaatcccggagaaccagaagccatcgaactgttcgctaaagctgaaggcattctcaacggcgcgaaacgccacctcggtgatgaactgtatgaccagttccgcatcaccctggacgacatgaaaccggaatacgtgggctaa

SEQ ID NO: 100138 - DNA, 834 bp, Enterobacter aerogenes
atgagactgccattagttcttaactctgtatatcgctttctggcacagaacaccccggaaacgataaagccaactctgcgtggttggtataatgagataaataaaatattaacttatggggtcaaagatagggacatatttacagcccttgacttcgagataaactctcactgcaatctagagtgcagttattgccctgcatcatttaagaatggcagaggcaagaatcttatgcctatagatacgttcaagaaagccatagatgatttgtcaaaaataaactactccggtcgaatatctccgcacttttttggagagccattgcttgatgaaaggcttcctgacctaatgaggtatgtaagaggtaaactgccaaaatctaaaataatcattcataccaatggtatacgccttagcaaggaaaagtatgacgcctgcatacaggctggagttgatggttttttggttactaagcataccgcaactatgcctaaaaatattgttgatatagtaaacagtaaatatgcgaagcatggcacactaagagtgcgatctcttgataacattactttatttaataggggtggttcagttaagccaaaaaaagaaagaaaaatgaagaggtgttattatctatctgatgaaatatcaataactcacacgggaaatgttgtttgcactaacgattttggtgaatctcacgtttttggtaatgtgaatgaaagagatcttcttgacatatggaatagcgaggagttcaaggcagtaaggaaagatattagggctggcatttttaatcttgatatgtgcaagaagtgtgtaggaataaagtag

SEQ ID NO: 100139 - DNA, 291 bp, Enterobacter aerogenes
atgcttcagcaaccacagttttatgaagcaaccggcataagccagcatgcaatgttcgttgagacacaacgcggagtcaccgtagttgagcgttcatcatcaccgttagcaacggcggttttactcatctcatattgcggcgtgcagcaattcgccagatttcttggtggcacactcattacggaagatggggaatccatagaaggtgatgtgttcgcagatgttgagttgataggagtggtaactcacatcatcagtaaagcaggttttgatgacagcccggttatgtaa

SEQ ID NO: 100140 - DNA, 318 bp, Enterobacter aerogenes
gtgttccgccgtatcagcaaaaagcttgaggccatggggataaaaaccgtcctgcagctagctgatacggatatccgctttatccgcaaacacttcaacgtggtgcttgagagaactgtccgggagcttcgcggcgagccgtgtcttgaactggaagagtttgcgccagtgaaacaggaaattgtctgcagccggtcgttcggggagcgcattaccacctatgaacaaatgcgccaggctatctgttcatatgcggccagaggcgcagagaaacttcgtggtgagcatcagtactgtcgttatatctcccctttgtga

SEQ ID NO: 100141 - DNA, 300 bp, Enterobacter aerogenes
atgccgagtcgaaagcatttctcgtttcatctgccaggcggtctggatcccctgccctgcaaaatagagagttccccttccgtcctttgcgttgagatggtcgagaacttccatcagtttctcgctattctgccgtggcgcattgtcatcaaaaaggttcagctgcgcgacaccctggctatagaaatcaccgagtatgctccccgctttctggtaccggtgcccgtcgccccatatcgcatcaagacactttaccgcggcattgatgatatcacggctatcctgcgtgggcgtcagtaa

SEQ ID NO: 100142 - DNA, 1989 bp, Enterobacter aerogenes
atgagccaaagcattagtgatatctgggatgaagaatgcgagcggatcgcccggcttaaccatgaacaaggttttgctcactacaccgatgagctgaatagagcctgggcagacttcgaaaagggggaaaaaccggaaggactacgctctgttattcatgcttcatggctacgcagccataccgatggcatagatgcttataacttcgaatatcaattttgcgaacagggagaactgcgcagaatcatggcgcgaaattcactattgatttccatcgctcgtgagatcatgcgtaacctgcttgcctacaaccccgatgggcatattaacctgacagatgctaacggcgtgaccctgcattattgtggccaggacttgacgccgatcggtagtattctttgcgagacggtacaaggtacaaactgtactgggcggtgtcttaaagaaaacaggctggtctatttactgagctctgagaactataaagaagcgctacgcgtacgaggcaaacattgcgcggctgctcccatcagagatgaaaacggtgcaatgcttggcattctgacccttactgctaatccggattgtttccattaccatacgttaggcaccgttcaggctgccgcagaagcgatatcccagcaacttattctccgtcgtttggttaatgagcaggagtcggtgatggaatcacttaatgaaggggttttggttatcagcgagctgggattaattcgtcagttaaattgctatgcccgtaacgtattaggtattcaggaagatgtcctttatcgcgatgttgacgaagtattatgcccagaaggatgttcagtaaaagatttgccagccagcaaagatcgtaatattacgttctgccccgcatctgattctcgtatttcatgtgtgatctctgttgtcatcacgcctgaaggtggtcgggtgatttcgatgcgtgacaatcgacgcgtacgcgatatggctcatcgtgttattggtagtaacgccatctacaacttcgatatgattctcggtgagtcacgtgtgatgcaggatacacgtaataaggcccgaaccgtcgggcgaagtgatagtacagtccttctaactggcgaaagcggaacaggaaaagagctttttgctcagtcaattcataacggtagtcatcgtaattcaggaccgtttctcgcggttaattgtggtgctattccccgagatctcgtgcagagtgaattatttggctatgaggatggcgcatatacaggttctaaacggggtggcgcagcggggaaattcgagcttgctgatggtggtacactatttctggacgaaataggcgatatgccacttgaagcgcaggccagccttttgagagtcttgcaagaaggtgaagtgatgcgtattggcggaaagcgcccgatgaaggttaacgtcagaattattgcggcgaccaaccgggatctaaaaaaagatatcgaacatggttccttccgccgtgacctctattttcgtcttaatgttattagcttgcccattccgccattaagagcaagaaaagaagatctaaaagagcttgtagaatggttttgtgaaaaaatctgtcgagcactcaatcgaaaccgcgtgaaattttcagattcagctctcagtcttatggaaaactacgactggccagggaatgtgagagaactagagaacattgtcgaacgaacaattaacctcactgaaaatgctgtaataattgataaagacctacccgaggaattacagacctccatttctggcgccctggctctacatgatgcacgcacaaaaaactataaccttaaagatagcgaaaaaatgattattgaacgttgcctgatggagaaaaaaggtaatctaagacaggttgctatcgctcttaatctctcacgtggtgcactttacaataaattaaagcgttacgatattgaggcaaacgaatatcgaaaactcaatcctgagtgttga

SEQ ID NO: 100143 - DNA, 1452 bp, Enterobacter aerogenes
atgtctatacgaaagcacaacgtgccttacctcatatttatatgtgccatcgcatctatcagcgggatcatcctcggttacgatgcttccgttatttctggcgtcatagatccgcttactgaacatttgtctctctcacctgcggaaagcggatgggcagtgtcaaacgtcattctgggttgtattgcgggggcttggggggttggacgtttcaccgaccgttttggccgcaaagcaaccttgatcgtcaccgctattctgttcactatttcagctatcgggtcggcattagccaatgatcttacctggttcgttgtctaccgcatgattggcggattggcagtgggcatggcatcagctgtaacccccctctatatcgcggaagtatccccgaaagaccttcgcgggcggatgctgggaatgcagcagatgctgatggtagggggccaattagtggtttatatcgtaaattacctgattgccagaggaatggcgcatgagtgggtggtgtctaaaggctggcgttggatgctggcatctgccctcattccctgcgtgctattccttgtaatggctttctttatgccggaatcgccacgctggtatgcgatgcgcaaccagaaagaaaagtcactcaaggtactgacctcgctgtccaactcaggacatgccgagcgcttatatgctgaaattcgtacctccatcgccaccgattctgctttgcagagtacaccaacatctcatggcattctgcgggataaaaaatcgtcttacatcctgtggataggctgcgctatcgccgtattacagcaggtttccggcatcaatatcctgatgtactttgcgccctcacttctacaaaacgttaccggaaacacacaggattccctctttcagagtatttttctcggcctcgcactattggctggggtgagtattgcgctggtggcctttgaccgcgtcggacgaatcccgttgctgcgctggggggcattgggctgtgctgcattcctgttattcacctcatgggcctttatgagtgaagcaaaagggtatctcccggtcgtcggcttagtcggatttatttttgtgtttggtatgtcctggagcctcggagcctggttgctgatttctgagatcttccctaatcgcatgcgtgccgttgccatgggttatgcgttttgctccctgtggatttcgaacttcatcgttactcagagcttcccgatgatgaaccgtaatcctgtattgatggagcacttccatggggctttccctctgctgttatgcagcggattcagcattatcgctttctggtttgttggacgtttcctgccggaaaccaaaggtgtttcgctggaacatatagaaccgttaatgctttcaaaatcccgtcgttttggcggcgagcaggagatgctcgtcacgccaaaatctgtttcgcaaaaataa

SEQ ID NO: 100144 - DNA, 1008 bp, Enterobacter aerogenes
atgtcagttaaaaacattgtacgcatcggtcttattggcgcaggtcgtatgggcagctttcatggtgaaacagttgctcaacgcgtaccgggcgcaactctgattgccgttgccgatccggtaccgggtgccgccgagaaactggccgccagattgggtgcaaaaaaatcgtataccgatccacaggatctgctgaacgatcctgaaatcgatgccgttgtgatcgcatctcctgcgcgtacccacgctgaactggtcgtcgccgcagccaaagcgggcaaaggtgtattttgtgagaagcctatggctgtcaccctggaagatgcagataaagccattaatgcggctaaaacagctggagttgctctacaggtaggtttcaaccgtcgattcgtgagtggttttgctgcagcgtatgaagagataaaagcaggaaaaattggcgtgccacaactgttgcgctcaacgactcgcgatcctggtttgggcgatcctacgccaatcccacactggaccattttccttgaaacactgatccacgattttgacatcctgctgcaccttaatccgggggcgaaacccacccgcgtttatgcggttgccgatgccttagtgcgccccgattttaaagatcgtggtctgctggatactgctgttgtgaatatttgcttcgacaatggcgcgttcgccactgctgaagcaaacttccaggcagtgtatggctatgacgttcgtggtgaggtcttcggtagtaaagggatgttacaggcaggaaatatcaatgtgaacaactgcgtgcgttataccgcagacggtatatccattgacacagcgcgtcgtgataccgacctgcttcatgatgcctatgttgccgaagtgaccgacttcgtacgttgcgttgcaacaggtgccaccccgaaagcgaccggtgaagatgcgcgtaacgcattggaagtcgcgctggcatgtatcgcatcagttcaacagtttcagccgattaagctctaa

SEQ ID NO: 100145 - DNA, 780 bp, Enterobacter aerogenes
atgtctaattactcactgtcggtctgcgctgaaatggtattcctggatctgccattcattgagcgcgttgaacgcattcacgccatgggttttggcgtggagatatgggactggacccaaaaagatattgatgcgctggtgaaaaccggtgctcgctttacctcaatgacaggctacatctctggcaacctgaccgatgatgaagaaattgatcatctgctttccagcgcaagtcagtcacttgaggccgctcgccgccttggctgcccgtctctcaacttgcacggcacaggactgaacaatgttggtctgccggtgaagccagttgaaattgtaacgggtgaaatgtggctgaaagccaagaggacgctggatgcccttgccgctatgggggagaaagcaggtaaggtattcactttggaaaacctgaacacggccgttgatcatccgggaacacctttcgctaaagcagaggacacaatggccctggtgagtgcggtgaacagcccatatctgaaaatgaatctggatatttatcacgcgcagatcggtgaaggtaacctggtcgagcttatccgcaaatgtgagaaacatatcggtgaaattcagattgccgatgttcctggtcgtaaggagccgggcaccggtgagattaactataaggctgtagcccgcgcgttgaaagggattaactatcaaggtgtggtcgcaatggaaggttgggcatcgggtgattctgtcatcgcgcttgaagctttccgcgaagcgttcacgctataa

SEQ ID NO: 100146 - DNA, 897 bp, Enterobacter aerogenes
atgaacatatcaacacgtattcatgttggcgttagcccgctctcctggactaacgatgtactggaagatctcggtggtgatatcccgctggaaacctgtctggcggaagcggcagaggctggctatgaaggaattgagcttggccgaaagtttccgcgaaccattgacactctagagccagtactgaatcaggcaaagctgaagcttgcatccggttggtataatggcctgatggctgaacgcagttttgaggaggagttagctgcggtacgcgatcatgccatgttgctgaaatcaatgggcgcaaaagtcatggtatatggtgagtgcggcgcaatgcccgggctcacgccactcgatgagcctctgtcgaaatctcctgccttagggcatattgatctgcctcagtacgctgaaaaagtgaataagttggccgtctctttattggagaactatggtttacgcctggcttatcatcaccatctgatgatggttgttgaaaccgacgatgagttgaaagccttcctgaaagcgaccaatgacttagtcggtattgtcctggactgtgggcatgcaaccgtggcaggagtagatatcaactgggtgctggaaaattatggcaaccgtgtggcgcatgtccatctgaaagatgtgcgtggtgaagtgctcgataacgtcattaataataacctgagcttcaataatgcagtaagagcaggcctgtttactgtgcctggcgaggggatagttaattacgctccggttattcatttccttaaaaactcaacctacgaaggttggattatcattgaagccgaacaggatccagaaaaagcaccacctttggagacagtgaaaaaggcacgggcatgggtaacgaataaattaggtatttag

SEQ ID NO: 100147 - DNA, 657 bp, Enterobacter aerogenes
atgagtcaagcgtcagaggttgaaaaccagttaagaaaaatgatcctcagcatggatataggaccaggagaaagactgacagagcgatgggccgaggcaagttttaacgcatcgcgaacgccagttcgtgctgcactacaaaaattggaatctgaaggacttgtatgtcgtgatggtctacgctggatcgttgcacctatagacattaaggaaattgaacaactgagtatttatagggaggttctggaagtagctgctcttcgcctgtcagctaatatgttatctgaagatgatttagataatctggaagcgttgttagctactcacgagcagagtgatatggagagggacttaaacgataccggaacacaatttcacctaaatctggcaaagttatgcggcaactcctttattcttgacggtatcaaggatgctttgattcgattatcacgagctcgctggctggataaagaacctgataatcctgcatggaaagaacacttagacattatttatgctcttagagaaaaggatattgaaaaagctgcattattactttcctgccatctggcggaaagtcgcaatcgcctattggcatctatccagtcaaactggcgtagccttcgtgcaagagggattaatttaacaaccgagtaa

SEQ ID NO: 100148 - DNA, 1203 bp, Enterobacter aerogenes
atgatgcaatcatacaacagttactggcagcgtaatctgctggtctgttttatcggctccttctcaactgttttcgccatgaccctgatgcttccgtttttgccactttatgttgaagaacttggcgttcaagggcatgccgccatcgtccagtggtcgggaatggccttcagcgccacatttgttaccgccggtctgattgctccggtatgggggaagcttggcgacaggtatgggcgcaaatctatgcttgtaagagccagccttggtatggcaattactgtttcacttatgggcctggtgacaaatatctggcaacttgtcggtttgagattattagttggcctggctggtggttattcctctggcgcaactattcttatagcggtccaggcacccagagagcgtgccgcctgggcgcttgggatcgtttcatccggtgttatggcaggcaatctggttggcccacttgccggcggttggttgcctgctctgattggtattcggtccacgtttttttgcgcaggcgcgttaatatttctggcttttatcatgaccctcactctcatccgggaagaggtgaaaccgaatacagatgctgcggcgaaaaagcgagtgagttggtctcagttgcctcatcgttctgtcattgtctgcatgctttgcaccggtctgctactgatgctggccaatatgtcgatagagcccattattacagtttatgttcgtaccctcgtaagtgactcttctcaaattactaaagttgcaggatatgtaatggctgctgctgcacttggcagcattatttccgccacttggctcggaaaggtggcagacaggataggacacatacgcattatcacgctggcgctggctgcggccggtttactgctgatccctcaggcatttgtctcctccggctggcagctaatagcattgcgctttcttatggggcttgctctgggcggattactaccctgtattgcggctgtgatacgccatcacgtaccagaaggaatggttggcagcattcttggctattccgtcgcagcgcagtttgctggccagttcattgggccgctgattggcggctttgtcggcgggcatattggtatgcccgccgtcttcctgacaaccagctgcatcctgctagccggagctgcctggaatttaaaaatacataaccagtcagcaacgcgctga

SEQ ID NO: 100149 - DNA, 591 bp, Enterobacter aerogenes
atgtctaatctactcagtaacatcagtaaaaacagcgccctactggttatggattttcagacgattatccttaacaatttcctcccgcaagaaagcgctggaaacgtaatccgcaatacagcatcactgatagccgctgcgcgcgctgtaggcgtaccggtcatttatgtcagtgtcggattccgcaaaggatatcccgaggtaagcaaaaacaacactatcttctcttcgattaaagagaatggaatttttatggctgacaacgagagcacagctattcatccccatgtcgctccggcagaaaatgagaccgtcatcgttaaacgcagagtcggcgcattctcgtttaccgaacttgagatgatccttcgtgctcaaagcatcgaaaacctgatccttaccggtgtgacgaccagtggagttgtgctttctacggtcgggcaagcgtttgacctggattaccgccttatcattgtgagggattgctgcgcagatccagatcatgaaaccaatgtgtttttgcttgaaaaaattctaccacaacatgcttttgttaccagttcatctgaaatatcaaaagtctgggcataa

SEQ ID NO: 100150 - DNA, 576 bp, Enterobacter aerogenes
atggctgaggaattttcgaagaaaaagcttcttcagggagtaatatttaccttattgataactatagctactgggctaggtaacgttttgtctgcattctttatgcttgacgtaaaaaagcaggaaacggaggacaatcggcttgcagatgccagacggcatgcgactgagttgcactgtatgaagcttgagcaaagtgcttctctggcagctgagattgttttccgtgctgacagggggtaccccaacagagtaactctatctgatctaatttatggcggggaaatgcctgcaaagcgggtttatgatgaaaagatagaagaagaacagagagatctggaacataaagtgtttggtttgctcccttatcttctgcctgatgaagcacaggtaatggaaaaaataacgctgcagcatattgtggttacggggatgcgtaccagtaaggttcctgtcgaacgccgggcaccgccgtcggaaggcggctttaatttcaataatgagatgaacgaactccggagtgcaggatcgcggatgggccaaatgttcagggaaaaatgcatgagtatgaagtaa

SEQ ID NO: 100151 - DNA, 1350 bp, Enterobacter aerogenes
atggcttacttacgagatatggaagaattaattggaacaattgaagatataaatatgcaaagctatatgcgagaggctcttcgctgctacatggctgacgcacacagagcttgcattataatgtcatttataacaattcatgaaaacatatatacaaagctagatagattatccttggttaacagcactgccaagaaaatatatgatgaaattactccgctaagagagaaccaagcagtatttgaaaaagaaatggttgaccgcctatctaaagaaaatataatttccaaattagacgccagctttgtgacccttttaggcaacttaagaaataaatcggctcacccttcaggacattcaccatcggctgaggaagcaagatacattttctctgagtccatctcaaggtttttatcaaaaccaatattatcagctcatcaggtttcagatgagatattagagagcctaggcggaggtaatttattcccaacattaaaagtttcagactacgcgacaattgttcaacatgaattatcaagaatgtcgttggaaggtttaccatacctattgaataaacttatatcaaatctggactcccctaatgaaataatcaaaaaaaacgcattaagatttattttagggatgggatatgagggtgctaaagacgagacaatatcatcaataaaaaggatattaatagagagacaaatccataaaacagaacgagaaaaatgtattatcctgattatctcttgcaactataaattactggaagacttaagcccgccaacctacataagattaaatgaagttatcattaaaaataatgatcaggcagatcttgcagacccaacaaataaaccaaaaaatcctttgcagaatctcaaatcaatatcaaagctttcaccaaaaatttcaatattgcattttacaggcgccacaagctcaataataaataaattcaaatataatacagatttgtatcaaatcgtcgaaaacacctcctggatggtggatttattatttgaaacattgctgaatgaagctcgaaactatgatttcgcgaaggcaaataactttgctaaatttattgttaatgtagatgacactgtttgtaaattccttaccagcaaacaatgcttcagtctacttgcaggtatctataaagcaaatacctacggagcaaattattcagagaagatagtagccaatgaatataaatccataccattaataaaagagaaagctttagtcggtgtagggaaagaaaaggaacagtatcaggagattttaaaagaaatttcaggggatgattccctggatattgatacattcctcccatctgagtag

SEQ ID NO: 100152 - DNA, 573 bp, Enterobacter aerogenes
atggactttgaaagccaaatatcaaacgaggaagttttagacagaatctgtcaggtctacggattcactcagaaaatccagctcgctaatcatttcaatatcgcagccagcacgctgcaaaaccgctatacgcggggcaacgtctcctatgatttcgctgcattctgcgcccttgagactggcgtcaatatccaatggatcctgacagggaaaggaccacaaaaatcagatgaaaactcaaaatcgtcttacgagctccactcattcacattaagtgaaggtcgactcactaaaactggagttttgaatattgaccctgagcttttcgaaaaacctttgaaaagtgccatctgtgttagaagcgagaacaaaagctacatcgctgagaaagatgtgcttttagctgacggcctctggattgttgatgttgagggcgcaatcagcctccgtgagttaacggttctacccggtaaaaggttgcacgtggctggtggaaaagtgccgtttgagtgcgggattgatgagataaaaacgattggccgagtagtgggtgtatacagcgaggttaattga

SEQ ID NO: 100153 - DNA, 279 bp, Enterobacter aerogenes
atgggtattcgcatcgaagtcggcgacaaatgggttattaccagcgaccaatatcaattcatcctgaatgaaaagaaagtcgttaagtcaggaaataaagctggcgaggaatggctcgacactatcggctattacccaaaaatcaatcagcttatttccggcctgattcatcaccacatccacaattcagaacttcaaacactgaatgacatttcctcagaaattgagcgattggggatgttatgtgagtcaaccttttgtgccgggaaagcgatataa

SEQ ID NO: 100154 - DNA, 831 bp, Enterobacter aerogenes
atggttaagggcgcggcagacgttattcattaccatggcacacctatatggggtgatgccggtaacgttcaccgtattgcggtcaacggtgccggcgcatttgtatcgtatgcacgtcctgaccaattagctgcatctattaaatacgccctctctgttgctatagataatggagccttttcagcgtggaagcgcggccttgttattgactggcagcaattctatcaatggctgattcctcattatcatcaccccaagctgtcattttttgttatccctgatgtggttgaaggtggcgaggccgacaatgacacgcttatcgctaagctaccgcgctgtttcaaagacaaagctgtgccagtctggcatttgcatgaatcattgcatcgtctggttgagctttgtcgtgagtggccgcgcgtgtgctttggatcttcaggtgagtacacaactatcagaacccagctctggcatcgcaggatgtcagaagcgtttgaggtgatttactgcaagcataatttcacgaccaagatacacggactccgcatgttagatggtcgggtattgggtaactaccctctggcgactgcagatagtacaaaccttgcctgtaatgtgccgaaatttgaactcaaatacccggagctaacaaaagcaattcgtgaagccgactatgcgaaaaatctttctgaagatgaactgaaagccgtaattcttaaacgccgctgcgccattctcaaaaacactattgaggctgtatcccctccatcaattgcaagatggcaatcaaaagggctagctccgcttcaactggagttagctatcgtatga

SEQ ID NO: 100155 - DNA, 732 bp, Enterobacter aerogenes
atggataccgtaatagcatttttatctctggctctctttattgcttttatcgtggggttaatcaagccatcgctggttcggatgccgaaccgtaagcgctccagcgcggtttacctcggcggatgcctagcgctggccgttattggctcaatattatggccgactgaaaagagtcaacctgtggtaaaaactgacgtatcagagattaaagcggaaccgactacgccagcattcaaatatgcagataaaactcttaaagagtatcgtaacgagccaaaagaaacacggcactatatcgttaaagactacgttggcttcaaaggtgtaccagcaaacgctacaagtgctttctatgcttgtatgagcgaatatacttttactaaagatgagaccttaaagcttggtgatgttttggggtggtgtttcaacgactttgaaagggacccacaatcgctaaatagtaaaattaaccttgatacatttaagagtaatttcagcggctgggatggttcctatcgtccgttagaaaaaatgataaaagacagtatgaacgatgactcctcttataaacatgtttcaactgattatcatctgattttgaataaagacccacatgccattgtaaaaacaacatttcgtggtactaacgcttatggcggcgtggttaaacaaacagttgcagcgcgcgtaaacgtgcgaacgggtgaggttgatttgatactcgacaattaa

SEQ ID NO: 100156 - DNA, 888 bp, Enterobacter aerogenes
atgaataaaagtaaagcaatctcaaggatagaaaggattttgaaaaagttaaaggataataactttaccgatagtgatgtcgatgtgctttttgttactgcacgagaactcccctctgcgacaaaaaacattttcgaaattggtagttttgtcgctcacaatcatcagcgtgatcaaggtgtaataaatgatattatgctgagaaaccacatgttattgagcttggcatttggtcgtgataagcatgatgttaaaccagaggtaaatgagtttccgaaatacttaccgttattaataaagctacagttgaaaatgtttagtgatgagcatttcaagagtagattgggattgaaaggggggcagataagtacagcaagaaaaaaacttaacaataaaaaatcttacgaaatcaaagatgatgtatgcaagttgggcgcagctattggtttaaatgaaagaaagatgattcaagaggctttatctctattgaattgttctgacaaaattgagtttgatgttttgtttgatgaactaaaagaattgataaaaagagaagttcccaatgcagatataagtccacttgataataatagaaagaaaatagcaggtgttttgatgtgtctgttgaataatattaatttttctttgatggatggtgtgaaggcaaaaacaatccttattcttgactcaagtaaacctgcgtgtgtttacgggcagtattattttgtttgtgataaagagccatttgatgaagtgactttctctaatccagtgtttgatgcggggtatgatgtaactgatatttttgatgcgcatgtgacaaatgaagatatcgaaaatggagatattgaatttagttttgacttggaaaaaatagtggtattgtga

SEQ ID NO: 100157 - DNA, 162 bp, Enterobacter aerogenes
atgaaagaagaaataaagaaaaaaccatcatatatggttgattatgagaatatatttaaatacaagataaagcacgattcaaaaggaaaacaacccaaggggcaattaacacaaattgaaggtggcaggattttaaaatctaaagcctttaaactgcgatga

SEQ ID NO: 100158 - DNA, 795 bp, Enterobacter aerogenes
atgagtttacgccaggcctgcaggacgttatcgctgagcaggacggtctatttttatcagcccgatacccggcgtgatgaaccggtgatccatgcgctgactgaactggcagaacactatccgcgctacggttttaagaagctgttccagctgctgcgcaggcagggcaatatctggaaccacaaacgcgttcaccggatttactgtctgctgaaactgaattttcgtcgtaagggaaaacagcgactgccagtgcgtaatccagcgccactggcgacgccgcaagcgttaaaccagagctggtccatcgattttatgcacgacgccctggtctgcggcagacgattccggaccttcaatgtggtggatgattttaaccgtgaagcactggcgatagaaatcgacctgaatatcccggctcagcgagtcatccgggtgctggacaggatcgtggcaaaccgcggctacccgctgaaaatgcggatggacaacgggccagaactggtctcgctggcgctggcacaatgggccgaagaacacggcgtgatgctcgaatttatcaagccggggaagcctacacaaaatgcttttatcgaacggttcaaccggacataccggacagaaatcctggatttttacctgttcagaacactgaatgaagtacgggaaattacagagcgctggctgatggaatataacaacgagcggcctcatgaatccctgaacaacctgacgccggaagagtaccggctgatggctgaaaaaacggaactctcaaaaagtgcgtggaactaa

SEQ ID NO: 100159 - DNA, 267 bp, Enterobacter aerogenes; identical to SEQ ID NO: 98364

SEQ ID NO: 100160 - DNA, 1695 bp, Enterobacter aerogenes
atgtttcagatttcaagtgggtgtttttttgaagagaataaaatagaaaaacatgaaggtacttttgttttttactctaacgtagatattaattatcttcttgaaagtgatttgccagagtttaaagttaagaaaatagatggtggcggtatcaattgctatctggttgactatgtcctattaactgaaaagccagataaaattgaggcaggagtggtaataagggcaggtgatcaagattatatggaacaatttatacagctatgggaattttactttgattgtgtggcaaggccagaaaaagaaacagtaaagcaaatatgtgctcaattaaattttaggaaaaatcgcacaaaaatagcacttgagattgctccttatctcgttgagattgatagacgtatatcacatgaaaccgcaatgggttttagccgttttgtcaatgatgttgtgggtatagatcgcgcaagttataaatccgttatttccgcattaaaaattattagcgatacgaaagaatcattgtccaccaattttgatttaacatactcaatgcttgtatatgcacttgagtcattgtcacaaagaggtgacggatatgaatctacatggcaagactacgatcaaacaattaggagtaagttggatgagatattcttagatttatctccatctgtttcagatgaaataaaaagtgctttaattgatggaaagcaatttaagcttcttaagcgatttaaatcttttattatcaataatctaaatgacgagtttttttacgagtcaaatagatttccaatacgcagaagttttcttgagaaagccttggataatttgtataaaatgaggtcttcattcgttcatgaactaaaacctcttgatgtaatgatttctcaaacccacaatccagtagctgattgcctgattcgttttggagagccctatttcacctattcagggttgctcagattactcaggtatcttattttacattattgtaaaaataaccaaagtcaaggtgaagaaaaggttaattgggttatggaaacctcgagcatcttaatcggtgaaatgtctccggaatattggatgtggaatccagactcctttacggcaagctctgtttcaaaatggtttgttgaatatctcgagatgcttaataaaaatcaagtggttgatttgtcgagaattatgaaaaaaatcgaaaacatctttgatggctcacaaaagcaatacaaaagtggtcttattagtttttattatttgtataatttaatacattcaaaaaatgatactgattggatcgctttcgcaagtaaaagagatagttttataaaagtagatatgtactggtatgcatcttgtgcctatttatataattctttcaataatcaggcaaatataacaataaataaaaatgatttgaaagacttctctatctgttatgaaatttataatagtaaaaaatttcaaaaaaatgtaatcaatctaccagcgatgacagaagcttttttactcattttagctgcaaactcatatttcaagagtgggatgtatgaaaattataaattcaaggtaaagctagccctttcagaaatatcacataatgtgaaagttttttcctatgttaaagggcgtttagaaaattcacaattggttgaagtggccgaatgttttagattatatcgggagtag

SEQ ID NO: 100161 - DNA, 1743 bp, Enterobacter aerogenes
atgagtacatggatacaagcctatgaaaacagagaggatctgaagtcttatggtgataatggattagctttatttgccttagcgctgcactttcgaatagatgatattgatggtgttgctgctgattccattacagatggccatgatgacaaaaaatgtgacttggtttatatcaatgaagaggaggaatttgccgtccttgctcaatgttacttttcaggaaaggatagacaagaagctccagcaaacaaagctagtgaccttaatattgctttagcatggcttttgcaaagagacttaaaggaagtaccagaaagaataaactcttcagcaaaacagattagggatctaatcaggcagtctaaaataaaaacattatatgtatggtacgttcacaacttgccgctatctaaaaatgttggtcaggagttggttactgttcagcaaacagcaaacaccattttacagcatgatttcaaagatgcgaaagttcaagtacatgcggttgaagttggagctgaaaaattaactgagtggtacagcgaatctctttcacctatattggttgatgaaacttttaacataaaagtcgtcgatggaggttatgaaattaatggtggggagtggatttcattttgtaccactattcagggtaaggatttagctagagcttataaaaaacataagttaaatattttttctgcgaacgtaagagattatctaggctcaaggtcaactgattctaatattaataatgggataagaaatagcgctgaaaaatcagcaggtaatttttgggcatttaataatggtgttacaatcctggttcatgattatagctataatgaaaaaattaagaatctagaagtgaggggcatgtcaattgtcaatggcgcacaaacaactggcgctcttggatctttgtctcgcttaccggctgaaaatgttaaagtacaagcaaggttcataaaagttaaagatggagatgctgacttaattcaaaacattattcagtataacaatagtcaaaataaagttgaggcatccgattttagaagcacagataaaattcaaaaacgtttgaaagtggaatttgcatctattcccgatgctgagtatgaaggagggcgcagaggtagtgctgaaagtgttatacgtagaaagccaaaccttttaccgtcatacacagttggacaagctctaatgagttttcatggagagcctacgatagcgtataatcaacgctcggctatttggacaaatgattcatattattcaaaaatatttaatgacagtacaaaagcgtctcatatcgtttgtgctttttcattaatgaaatgtatagtcaacaaaaaaatcaatctgggtaaaaaagatgtgttatctagaaatgatttggctcaattagaatatctcagattcagaggtgcgatccctttactttgttctgcaataacagaatgtcttgaaagtttcttagggagacctgttcctgatttgtttagagtttcttttggtcatgatgtttccccatcaaatgctgagaaaatttgggagccaattgtagatatttgtttggctttgagtaatcaacttttacctgcactaattgatggtggtctaaagagccccacaaaggttagggagtgtatatctaatttctcacagttaattgccgcaacagcacagatgaatcgtcctgtttatgaattgtttgagaagaatttaaaacctgcattttga

SEQ ID NO: 100162 - DNA, 150 bp, Enterobacter aerogenes
atggcgggtttttgcttttctgcaaccggactctccatcgaactgcgttcgattattcgccgcaacgcggctcaccccttcggggccagcgcgacaagcgcgctgttcaacgcctgcggcgttagtccgagtccgggcaccactatttaa

SEQ ID NO: 100163 - DNA, 657 bp, Enterobacter aerogenes
gtgactcggattccgacagcgattcggattccgacagcgactcggattccgacagcgactcggattccgacagcgattctgactctgacagtgattccgattctgacagcgactcggattccgacagtgactcggatagcgacagcgattccgattctgacagcgactcggactctgacagcgactcggattccgacagtgactcggatagcgacagcgattccgattctgacagcgactcggactctgacagcgactcggattccgacagtgactcggatagcgacagcgattccgattctgacagcgactcggactctgacagcgactcggattccgacagtgactcggatagcgacagcgattccgattctgacagcgactcggactccgacagtgattcggactccgacagcgactcggactctgacagcgactcggactctgacagtgattccgattccgacagcgattccgactccgacagcgactcggactccgacagtgactccgattccgacagcgattcggactctgacagcgattcggattctgacagcgactcggattcggacagcgactccgactccgatagcgattcagattccgaaccgcaggcaaatgatgatacgcatacggcagctatcgataccgtag

SEQ ID NO: 100164 - DNA, 1035 bp, Enterobacter aerogenes
atggcaagtgctgatattcaccatttcatagtgcatcagattgttcgtgatagcactagagccgcgtttctcaaagagcgttttgaagaaaacgcaatcgatgaattaaccacagaggttgttagcagtctccttacattattcaataagtctggccttcaaacaggctcatttagccaagaaagtggtaagtccaagtttgagcaaacactattaagatattcaaaccaaagcgatattaaatttacattcaatgattttactcaaatgactattgatttggctagaattcttgaaggggaaatgaacaaaggtgggggtaaatcggctaagccaaattatattgttttcttccaccatactgtaaatgatgttgattatctttcagttgttactcttctggaaactaaaggatttaaactggaagacctttctttccagcatgtggaccgacttgagcttgataaattacatcttgcggcgagaattaatcttcaccattgggttgacgagatggaggaacggtatatttcatttcgtataggccgcactggggaaatgagggattattttcaggattttatcggttgtttggagtttactgaagctaaacttgagacgaaaggattaattgatgcaataaaagaatgttgttttgagttgtttaaagataatgctgctcgaacaaatgaagttcttgagttggccgaaaaatattgcaaagaatctaaagatgaagatggtaaaattagcataatagcattagggaaacatttgttccctgacaatgatgattatcttttggaaaaaacacaaagcgacaagtataaacttagtgaacgtgttagtattgataataaaagtcttaagggcttagtccgttacaggggaagtgataagaaaatgtctattagttttgatgcagatttgctacgttctaaagatattgagtacgataaagcttctggttcattgaaatttaatataattcctaaagatttaaaattgtctctagataaagagcaaattaattag

SEQ ID NO: 100165 - DNA, 1212 bp, Enterobacter aerogenes
atgattcagctcgagggcattcagaaattaattgaattatctgttggtgatatccaccatactgatggttctattgttttcgctcttccacttgaagagaatgtttttgaattcgcaaatacctgtgctcagaatgatatgattctgccatcgtatagggttctgcataaagataaagaaatggacaggtcttttgttccatgggcttctttgcccacgccaatgaaagatggttcaataattacatttagtgttactctgaacttaaagttattaaggcagcaaggcgtcagtattttttatgacgagaaagaactggttgagttaagcccggaggcgccaagtagatttattattattcagcttggtgttaatgggaataaatgtaccatatgtccagatcaatataacagaaatgaaattcttcgctattttcaggtgaggaatatatgggctttgttaagtcagcatgcagatcatgttaatggacgtgaattgatttttctgtacaaacagaaaatatcgatcactcttgagtatacaattgatgatttaggctttgagtttgacggattagcaagacttgaaaaagtcttttctgacaatctacatcctgaggccaaaaataatatattgcagaatacgctttattctttcctgtggcgtgtacctaaaggaagtgcgtttagaaagttgttatcagacttttctctgtttacactttcttttgaagagaattatagagcgttttcagtaggatttagttttgataaaataagaaaggaatacactgaaagatttagagagtatttatctaaattgaatggaattatgtatgatactttgacccgcgcattggctattcctgtgacagggcttatagggtttatagcaatgaagggagggtttaatgctacaagttgggtaataaacatatccgctttgattttgacattattctcaactgctagcattcattacttggtatgttcgcagtttaatattgttaatatcacaaggtctgaatataaagaattgtttaaggcaatcagggaagagttagaaaccttagaactagcagaattaaggagcaaagagagccaattggataaccaatcggctattacttttggtgttttgcggtgtgtttatgccatatctttgtgtaacttaattgctagtggagtcatgttcataataacaacaatatag

SEQ ID NO: 100166 - DNA, 384 bp, Enterobacter aerogenes
atgaagacacttgctgaagaaatcggagagcgcatcaaggcgctgaggaccgagaaaggaatgagccaggggcagctagcaaaattatgcggctggtctggagcgtcacgcgtcgctaactatgagtacggcaaccgtaatgttggcgttgatgatgctttgtccttagcaaaagcattaggtaccacgccagtaatgattttatttggtgaacaaagcgatcccgcgaactggttaacagacaaacaaaaaagggttctttcgctattcaatcaattacccgaagcagaacaagaacgtatgattgatacctttgagcttagacttaaagaaattgatgagtatgttgaaaagtacctccgcggaagatacaaccctacctga

SEQ ID NO: 100167 - DNA, 225 bp, Enterobacter aerogenes
atgaaccaaatttcacacttacggaaaaaagccaacatttcacagcaagccttagctaaggcggctggttggaatcagccacgtttagccaactatgagagatctttgcgcgttccgagtctagccgattctcgccacatcgttgccgccctgaatacgcttggcgttagttgcacgcttgatgatgtatttcccccagaactctcaaattcgagaggcaaataa

SEQ ID NO: 100168 - DNA, 1797 bp, Enterobacter aerogenes
atgaacgtgcaacattttgatttttttacagatagtgagttatctaatctggaacgatatcaaacttgtaaagccatggctaaaggttatgccagcacctacaagaccgaacagtcaagattaatgcaggctcgctcattctgctccaatatcgtatccgcatattgggatacgttggcaaaaaagcaaaaaagcagtattaaaatgagggaggtgccgcatacggtatacatggaagaggtattatgtgatgcgcgtgagcttgctgagcgaaccggcgcgcttattgcacgatttccggctgaagatgccggatatttgattggctccatttatacagtaatgctaccttcggcctaccgtgcggaaatgggagcttattatactcccccgcctttggtatcgcgtttattagacttggctgagcagtctggtgttgatttctctaaagcaacagtgattgaccccgcatgcggcggcggagcgtttttagcacccgcagctataagaatgttaaaaaaagagaatggttcttctcctgagtggattttgcggagaattagccgtcgattgaaggggattgagatcgatccattcgctgcttggatgagttcggttttacttgaatctgtgttaatgccgctatgtgtaaaggctaagcgtaggttgcctcaggatacaattattgttggtgatgcgctccagcaagaccatatttctggttatgaccttgtgattggaaacccgccttatgggcgtgtaacactcgatattaaaacgagagaaaaatattctcgttcactatttggccatgcgaatttatatggcttgtttactgacttagctattcgcttggttaaagatcatactggggttgttgcattccttacaccaacctcgtttctcggtggacagtatttcactgcactgcgtactcttttgactgagaaaacaactccatttgctttcgatttcgttgctgatagagatggcgtatttgacgatgttcttcaggaaacaatgttgacgacttttaaagctggagatcataaagtccgggctttggtgtcttcacttgttcctaaggggttgaataaagcaaaaatcgaaaaaataggtagtgttgaagtagagaaaggaggagcaacgtggctcttaccgaggggtaaagatgatgcgcgttttctcaaaatgcttaaaagcatgcctatgcgcttagctgaactgggttactctgtatctactggccaactagtctggaatcgctttaagtcacagttgcgtacgaccaaaggtaagaatagctatcctttagtctgggctgagtcgatcacttcagcaggttttcgttttagtgcagaccgaaagaaccatgttccctatattgatatagcaccacggcaagatttccttgtgacaacttttgaatgtgtgcttgttcaaagaacgacttcaaaagagcaggaccgaaggattttagctgcgatattgccccaaaaatttatagatgaaactggtggtgttgtggttgaaaaccatattaatattgtgtattcaaacggattgttctctgcggttagaccagaagttattgaggtattgcttaactcacatgtggtcgatcgagcgtttaggtgcataagcggaagcgtagctgtttcggcctacgaattgaattcgatcccgttgccttctctggagcaggtgatggagattcaagcgcttcttgatgccggtgttcaccgacgaattattgagaggactatcgcaggcttctatggagtgatttttgcatga

SEQ ID NO: 100169 - DNA, 1083 bp, Enterobacter aerogenes
atgaatctacctgttgttcccccattggatattattcaggaaagattacctttaatttttcctgaaggtactgaaaatcgcggatatctaatccgagagatagctgcaaaaaccatttttgtcatgttttatgtcggcgctgttgacggacttgagcgatggatcagacctagccaggtcgtaagtatgggggattcacaggctagtctcactgatgaaaccagtcgagaaagttgggtgaagatgactttctcaaaacaaaagacaagaccagcggatgcatggtatgcagaaaatacgcgtgaaccaattcgtgacgagacgataaaaaatggtttaataccatgtaatgccattgttgagcgcaaaggtatacccactacatcttctcaaccgcgttacagtttgaatcgttcttttgcagctctttttgatacgaaacttcatggtgatgaactgttgaatgcaattagtaactggcaagaaaatcatttgaacaaagcagctcttgccagattacgtttattgaagtcaggtgcagcgattgccgatgatgcaatagttgtgacttttcccaatggggaaaaaagaactttagctcctggcccatcaagcgtgatagctaaagctgtcatcgaggtttttgctcccaattttctaaagaatccaacagtactctggctgtctgagtctgggaacaaagttgttgctcaagacgaagtattagcgcatgcgttagggttgaatattgatgactccaaggctctaccggatattattttggttgatttgggagaagatcgaacaggttcggatatgcttgtcgttttcactgaagttgttgcgacagacggacctatcaacagggaaagaaaagtcactctcactcacttagctattgatgcagggttcagtgagaagaatctagcattccttacagcatttattgataggagtgcttcgtcattcagaaaggcaatccctgaactggcgtggggatcttatgcttggtttgcatcagaaccagaacatctgattgatctcagagatggttctccggtcaaaatcagccagaggatgtga

SEQ ID NO: 100170 - DNA, 1716 bp, Enterobacter aerogenes
atggccgcatacccgaacgtcaatatggcgaatcagtatgcgcgggatgtgttgaacgggaaaatactcgcctgcaagagcatccagctggcatgccagcgccattttaatgatctgaaaatttctctcgataaggattatccctaccggttcgaccgtgaactggcggaacgtgcctgccgtttcgttcaactattacctcactccagcggtgatttagctggtcaaaaactgaagctggaaccctggcaagcttttgcattcagttcgattttcggctgggttacgaaaaagaccaaaaaacgccgatttcgtgaagcgtatatccgagtggccagaaaaaacgggaaatcgtttttcgcggcaggtataggcacgtacatgttctgcgcagacggtgaaaacagtgcagaggtgtactgcggggccaccacgatggcgcaggcgaaaaaggtattcaccccagccagacagatggcagaccgccttccgtcgctccgctcaaaattcaatatttcggtatgggtagacagccttacacgaccagacggttcgctgttcgctcccatcgccggtaagcctggcgacggtgacagcccacactgcgcgattattgatgaatatcatgagcacgaaacggaccacatgtatgaagccatgacgctgggtatgggtgcccgttcgcagccgctgacgcttatcatcaccacggcgggtacatcgctggaatcgccatgctacgacaaagataaacaagtcaaggagatgctcaacgggcatgtgcctaacgaccgtctgtttggcctgatttatgagcttgatgaaggggacgactggaccgacccgaccaacttcattaaagcgaatccgaacctcgatgtgtcgatttcgtatgacgatctgctggcggagatggaggtagctaaacaggttccgcgtaaggtaaacgcctttaaaactaagcgcctcaatatctgggtatccggcaaatctgcgtattacaacatgacgcaatggcatgctgcagctgatgaatccctgtgctacgaggactttgccggagaggattattacctcggcctggaccttgcccaacgtctggatcttaatgccggtgtcggggtatttgtccgggagattgaaggtaaaaaacactattactgcatcaagccaaaattctgggtaccggaggacactgtaaggagtacggacccgaaaattgccaaaacagcggatcggtatgtgaagttcgtcgaaatgggagtgcttgaggctactgacggggcagaagcggattatcgcgaaatcctggccagcattattgaccttcaggaaattgataaggtccgtgtcagcgaaatccccattgaccctagcggggcaacggcactcagccatgagctgcaggaccatggattcgatcccatttctatccggcaggactataccaacatgtctacccctatgaaggagctggaagcggcgctcgctggcggacgtttccaccatgacggaaaccctgtcttgtcatggtgtatcagcaacgttattgggaaaaatttacccggtagcgacgatattgtccggcctacgaagggcgacaaacaatcaaaaatcgacggcgcaacagcgctatttatggctataggccgcgcaatgctgaacggtagggccagcaaccaatccgtttatgatgaggaagacgtagcgtgttaa

SEQ ID NO: 100171 - DNA, 264 bp, Enterobacter aerogenes
atggctgtgaagaaagataagcccgtagagcaggaagaaacggctgcagatgatagtcatgcgaccgcggtcgcacagacagaacgcaaatccgtcgtgttcctcggcccatatagccgctattcccgtggtgatatcgcatggtttgacagtaagcatgcggaagagctggttgagcgtcatatcgctgtgtggccgaaggatgccaaacgcgcgatggcaccaaaaccgggagatgacaactttgatactgacattggatga

SEQ ID NO: 100172 - DNA, 369 bp, Enterobacter aerogenes
gtgaaagataaagattttgacctgtccgcgcttaaatccgcgttgcttaaatcggagccaaccgtcattaaaaccgagttatttggcgccaccgtattcatccgccgcctgaccggggattacctcatcagctacgaagagaaaatgactgaaaccgcaaaagctggcgcagcgcgcgaggcatcggagcaagtcatccagatcgtcatcgatgcactggttcagccggatggaacggccattccggatgagtttaaacccacggcagccgagctgctgaaggcccatgaaaaccccgaactgctggccgcagtggaaaaagtgaagcaacacgcaatcggcaagctggaggaagcggaaaaaaactaa

SEQ ID NO: 100173 - DNA, 813 bp, Enterobacter aerogenes
gtgctggatgttcatcccagtggcttttacgcctggtttaagcaaccgtattctcagcgccaccaggtagatctgagactgacgggacagatcaaacagttctggctggagtccggttgcgtttatggttatcgcaagatccatctggacttgcgggatagcgggcaacagtgcggagtgaacagagtctggcgactgatgaatcgtgccgggataaaggctcaggtcgggtaccggagcccgcgggcacgcaaaggcgaggccagtatcgtatcgcccaacaggctccagcgacagttcaatccggatgctccggataagcgttgggtaacggacataacctacatcaggacccacgaaggctggctgtatcttgccgtggttgttgatctgttctcacgcaaaattatcggctggtcaatgcaatcccggatgacaaaggacattgtcctgaacgcactgctgatggctgtatggcggcgtaatccccaaaaacaggtgctggttcactcggaccagggcagtcagtacacaagccatgagtggcagtcgtttctgaaatcacacggcttggaggggagtatgagccgtcgcggtaactgtcacgataatgcggttgcagaaagctttttccagttgctgaaacgcgaacggataaagaaaaagatctacggaacgcgggaagaagcccgcagcgatatttttgattacatcgaaatgttttataacagtaagcgtcggcatggttcaagcaatcagatgtcaccgacagaatatgaaaaccagtattatcaacggctcggaagtgtctag

SEQ ID NO: 100174 - DNA, 297 bp, Enterobacter aerogenes
atgagcggtaaacgttatcccgaagagtttaaaattgaagcagtcaaacaggttattgatcgcggtcattctgtttccagcgttgcaacacgtctcgatatcaccacccacagcctttacgcctggataaagaagttcggtccggactcatccactaataaagaacagtcagatactcaggccgagatccgccgactccagaaggagttgaagcgggttactgacgaacgggacatattaaaaaagccgcggcgtacttcgcaaagctgtccgactgaggtacgcctttattcgtga

SEQ ID NO: 100175 - DNA, 3108 bp, Enterobacter aerogenes
atgaacatactaccaatcgggtcactggtggtctctgagcattttgagggtactggcaaaatcgtcagcgtcaatatcgattcaaatttcgcaacagttgctttttttgagtctcctgcgcaaccttatgcacgtcaaattgaagtaaaccgggataaattatcactaacaataccgcccgaagaggctgtaatttattgccttgaacctcaaagtcagcgctgggcacgcgcacgctttggaggatctagacctaatggtgatttcctggtcatttttcgtgaagaagaatatgcaacgctcccgattgataaaatctttgttctcaacaaagcctatgatactccagtaaaccctgctgactttcttgccttacaagcaaatgacgcgccgtttttttttcctcttcgacagtcctttattgaaacctacatccagcaacgcgctgcatgccgcgcgatggcgtccatttccagtagtgccgttgaactcgaaccccaccaattggctgtggtacgccgtgtgcttcaggataaaaaccccaagtatattctggccgatgaggttggtctggggaaaaccatcgaagccggaatggtcgtccgtgaacacgcgttagaagcaactggccacgtcagcatgcttattgcggttccggcaccgctcgttaaccagtggcgggaagaactgggtgaacgctttcaactgaaacaacttattattgatgcctctacggccctcgcaggtttgcgacaaaatgaggtcacagaaggcatcgtgatttgcacccattgcgatgcctgtaccctgattgaacggggattcaccccttcacttatcgcggtcgatgaggtccaccagattgcctcctggccgtggtcaggagataaagatgaacgttatgacttcaacctgatcgctaagggttgccggaaagcccactacgttctgttactcacggggacccctctgcatgggcatgaaaggaacttcttgtcgatgctgcactgtattaatcccgaagcctaccaagtggatgagacccatctgcaagactttaccgaactggtcaaaaatcgtgaaaacctcggcgggatcttctcggggttagtaccttccgtctcaaacgtcagcttacgccgtaatctggaaacactgcagcagcagttcccagaagatactgttctgatgacactctgccagcaactcatcccgcttattgggacgttctcccccaatacccaggagcgtgaagaaaggatccgggatattcgtcggcacctaggggaaaactatcgcattcatcatcgactgttgcgtaaccgccgtcaggtttcactcagcttcgatgaaacgaaaaacctcaacctaaaccttctgtttccagggctaaatggagcagcggagtgccgctggtattgcgatgggttagcgttagacgaactgattgatgagtatcgttcattatctttactaccgcagaatacgcagtgggcaatgagtgaagacacgtacctcttctggattgacgatctcctatccagcccactctgtgtcatgcaacgcgctaaagtacatttgggtgaagcggaacgcactcaggaagaacgagatctgttagaacacattgtttcaactgcaaaaaatgaacttcaggccattgataacaagcttgccatcaccctgaatgagtggctgcaaaagaattcaacaggaaaagccatcgtcttttgcgatcgtccggatcttgcccagcacttggcaataaagctcgaactgctgctggagtaccccctggagcgctatcagccggatcaacccctgatgtacctgaaacccggcagccccattcggatcctgatctgcgataaaagcggcgaagatggtctgaatctccatgggggtctgcgactggccgttcactacggtttaccgcgctcttgtagccgtattgaacagcgccttggtcgtctgaacaggtacagtgcaaacctgaaaggcgtaaaacccgtccagagtctgatcctgaaaaatcacgccgaccgcggattacgcaacgtgtgggccagtattctgaaagacagcattggcgtatttaataacaccattgccagcctccagttcgtcctcgacgattatctggaaaatgcgtggcaaaatgtctaccaagaaggtccggtggcccttgaacgtattgccagcgaattccctggcgaacagggcattctggccaacgaaacgcataaaattaacatgcaggaaaagctgctggcgatggatgacgagattgcagaggcggcgatttttgcgcaacagataagcgctgacgatcatcttgcagtagcgcagtgtaatgcgctgacaagttggatcacgcgtgcactgcgttttcgcgccaccggcaccgcagaaaaaggtatcaagtttcagttcgaactctctgaccgcagcacagggacgttggtcgattttaaaacctttctcaccacctgcatgctcagcttcgataaagaagggggtaacccaccgtcaacgcatctgatgagcgctgaacgcattccggcgatcgacggaacaaccgtttatccgctgcgttatgggcagccatttgtcgatacgatctggcaactgttaaaccaagatgcccggggcagttccatggcggtactgcgggtgctcccaaagccattgaatgagcccaattacttcttccagtctacctggcttgtcacccatcgccagacgcaggacacctacgcccaacgccgtatcgcagacgagttgtacccgccgcgtattgtgcaacactggctgtcctctaagggtacaccggtgacgaatccgcagttgctggaactgctcaatagcgagtacgccaaacatgaaacatcgcagaaattctatgcagatatgaatctgcgccctaatctctggcaagaaattgaagagcttgtctcaccggacacctggaaagagatggtggaacgagtctatgccagtgaccgggaacaacaacaggcaaccttcggcgaacaagccagactccagttaatggccgtcaaagccgtggtggtgtgcagcagaaatctactggaggaaatcgtctga

SEQ ID NO: 100176 - DNA, 2481 bp, Enterobacter aerogenes
atggaagaggaatggtcacgcctgcagcaggcgctaaccacctgttttagtcaaggggtcacctttaaggacggtatcgaaaatcagtttctgaacagactgattcagatcatcaccgatgcctcggcaggtcatggtgacatttttgccggctacgccgatgcgttacgtgccgctcacgcaagtggtattagcgcgccgtggctacccctgccgccggaactgaccgacgctccggcgcctgagtggggcatgacaaagtcgcctgccgcgcaacaaattcaactggctgaagatgcggacctggcgctgaccagagccacctatcagcgtaagatccgcaggaacttgctgcgccccgagaccgatccggcactgaagcgcctgttacccgaggagccctggctgactcactatcagggattcggtcaacaggccgccatccggacgctgctaacgtctgataataactgtacattgctggtgaatctgcccaccagttgcggtaaaagtctgctcacccaactccaggcgctcagcgcaccgacaaacaccctcacgctggtgatcgtccccaccgtcgccctcgcaattgagcaggctgacgacatgcaaaaactgcttcgcggcaccgaccaagatcatggtggaagttatgcttggatcggaggacaagatcagccctcgcgtcaggcaattaaggaaagaatcaaagcggggacacagcgtgtgctcttctgttccccggaatccgttcgctcttctttggttccggtgctgtttgagctttccagactgaatatgattggcgcgatcgtcatcgacgaagcgcatttgatcgatcaatggggcgcagagttccgccctgactttcagctgattgcccctatgattcgctcactgaaagccctaggaaaatgccgttttcgtacgctgctactttcggcgacttacagcaaaagcacccgggacattctggtcgagcagttccatgatgaaaacagcgaactgattgaagtgtcagctaatttcctacgcccggagccggaatattttgtgcatcatgaggcaaatgaaaacgcgcatcgtcagcgggtcgaacagcttctgatgaccttaccccgcccgctgattttgtattgcactacccgtacagatgcggaaatgtggtctgcccgtctgaacgaactgggctactggcgaaccggcatgttccacggtcaaattgacacaaacaatcgcaagaaattgatttcaaaatggaaaaatgaccagctcgatatcatggtcgctacctctgcctttggggtagggatgaataaaaaggaaatccgcagcatcattcatgctgccattccggaaaatatcgaccgctattaccaggactgcgggcgtgctgggcgtgacggcagatcctgccaggtgcatctggtatggcataaggcgcaaatgaaaacggcaaaatcgctggccgttgagacgctgattggcgtagaaaaaggttttgcccgctggaaagcaatgtttgacgatcgtaagaaaagcccgatcgctgactacatgatttcactgaacaccaagcccgttcatattgatcaccaaggcgataaaaacgaagcctggaaccgtcggacattgctgttaatgcaaagagccggactcatcaaactggtctttgctgatccgaaaattcctgacgacctgcgagataatctggatgacaacaacacgcaactgattgaatggttcgaaagctactataaccacgttcatatccgtcactgtgacgatgcgcattattcagaagcgcactggaacacccatgtggagaagatccgccagtccgagttgaataaccgccgggcagcctttacggtaatggaaatgtggttggaggatcctggcaaaccactgtgtaaaattctgcagaaattctatgaatatcagagccatcctcccgagttaacctgtggaggttgtccgggatgtcgtcagaaagggaaaggagcgttttcgcccaccgtgggcacagatgtacaaattttacgctccgagccgaagaaaaaagcactcttcgtaggtgcggaaaagaaagtttattacaacgaaaatatgaagttacattcgttgttgatggaacttcgtgtgacgttgcggtcgctgatcacctctggcgaatacgtgtttattcgtgcagacaggccagtgttcctgcaactagagaacaacctggattcgctttcgcatttctggagcgcacagaaaatgacagcacctgcatcggatggaccagagattgtgatcatccctaacacggccaatgcgttcccagacctacccatgacgcgctttgagcgaattattattgcacctgagcatctcgccgatcctcagttcccacatcgaacatggtgtgcaagcgccgctaatgcgctgtcgctggacacttttatcaggcaactacaacatgtcaataattaa

SEQ ID NO: 100177 - DNA, 876 bp, Enterobacter aerogenes; identical to SEQ ID NO: 81884

SEQ ID NO: 100178 - DNA, 3207 bp, Enterobacter aerogenes
atgagcatgatggagtactggccatccaggaaaaatatcgtccaatgcattcgcaatgaagcagaagaattagaggatcatgtgcttctggccgtgcatgaaccgatgctactgacccgacgcgacgtcaatgaaaatcataaaatattacgtgacgaagacctgttccagcagttacttcatacggagcgcgccatcccactgattggccgctcggggatggggaaatcacatctggtgcgctggttagactgccggttcaacatgtacctggcggaaaacgaccagagcgagcaatgggaaattgtccggatacccaaaaactccagtctacgacaggtgcttttacgcatcctgaaaaacttgacgggggaatttttcgacaacgcacgcatgcgcgttaatgaagtaacagaacagtatccggcgaaagatctggcagatctactgttgaccatgatggcccatcagttgcaggacatgcaaaaagcggtcatggaagaaggtcaaacgctgctggcacaaggtaaagacattccagcagaccgactcgcctatatggaagccatcattgaagaggtggaaaacggtatctgtgatctgatcaccgaccccaacttcaaacagaatcttctgaagccgggccactgtattttcaaacttgccagtcggatgagtagtggtctggaagaaggagaagaagatcatgataaatatgaacttcttccggaagatctctattttgtctttgagcctgacgatctgtccgcgcgtgcacgccgctatcttaaccattctcaactgcatgagtcagaccaagtggaggcgcgtacccgtgcagcgcgcgtgctcaatgaagccatgcatacctcgctgaaatcactcttcaagcgcctgttcaccttcaatggaggatcttttcaggagctttttcaggaaatccgcaaggagtttctgcgacttaatcgccgtctggtgattctggtagaagatatggcggcgatctccgccattgaagatgtcctgatcgacagcctgatcgaagaagcggcacctggcggcgtgcaaattctctgccctgtccactcagtgattgcagtcaccgacaattatcccggctataaacgccgccaggaaacgttaatcacgcgtgctggctacgagtgggtcatcgagaacgtcgataaagacaataacgaagatcgtattgtctcgctctgtggtcgctatctgaacgccgcacgctttggatcagaggagttaaaaaacagtcctgagcaaggtaagccccagtggccacctgtctggcacagtgatgagatccccaatgcactagaagattttggttattctgccaataagaaattcccgctcttcccgtataaccgcaatgccattttggcattggcggataagcattgccgcgacagcagcggcgagttgatttttaacccgcgtacaatcattaaccgcatcctgttagatattctgcgcgattgcagaatagaagcggaaaaaacacagttcccgccagcaaatttcgctggaattcatgccgttcccgagatcgaagacaagatttcacagatagttgtcaaccgggttggcagttcggtgacgcttgccgccatctggggatatggcattgattcatttgatgaactacgcgaaaaactgccgggcagcgttgcgagtgcctttggcctcgatgaactagcagcgcaactgaatggcaaaggtcccaccatggagtcggcggaaccagcaacaaagaacgcacacgaaacggcgggcaaaataggcagtacgccggcgggtaaaaagattgacaatccggaattcaaaccgaaagaagaggcaaaatacactgccaaatccgaactaccctttatcagggcggtccgtgcatgggtgaatgacaatgtcattctgccgcaggatgttgcccgtgatttgcgtgcggcactgaacgcctgttatgaaattcatgcacagccagagttgttcggtatgtcttctcggccaccgctgaaagaaggtcgttttacgttgatttcactgccaaaagcggcgtctgacccctcaagcattattacgaacttttactctgagcaggacctgaccgatccttcccgacgggtagatgtgtataacgctgcggtagccctgttacgtatccagtattacgccggtttaaagcaaggctttaattatccagaggcgcaggaagactacactcgctatcaaaacttcatccagtggtgggtgccgcaggctacggaaagcgccattaatcacttccgggcgcgtaacttacaggatgcgcttaaaaagcatctgcaaaaagctctgctgcttggcctggtgacgggtaaagaagaaccggcggagatcgtcaataccctatgcctcacccagaaaggtgtcgggagaaccgaagggaaaagtaccggtcgaacgctgacgacctctccttccgagatctgtttcagagggattgaggcgaccctgcatccgcacgccagcgccagagtcgccgaagccagggcgcaggcgctcgtaggatgggatgatgccagaaaagcgtggcttgaacaggttgccatcactgagcaaggctcaggcttgggcagcagtcgtgcgctggatgccgatgtaatatattcctcgctgaaaacagtgttaaaacagccgcttggtgcggaaattgaacgtgcggcgctctccgtcaaacaggaacttgccagcacgctaaaaaatgttcatctctttgccaacattaaagatagcgacgatttcctcagccaactgaacgactggcagacgtttattgagactgtgcggaccgagcactatcccacaggcagcgctcagtacaaaccatcttcgtggctgctgggtgaaattgaagccctcagaaccgacgccgaggagagtctggcgactttaattgcgttactttccattgaaaaacagaaagatagtgcgaaattgtggctggagatctgtcgacttgacggtgactacgtttcaagaatcagcagcgtacttgcgcaatggcaactggtacaacccaagatcgcgttcacactccagcagatgaacgccaaaggggatatccagcaactgactcttgctctgaataaagtgaatgaccgtctgaaaacacttgtgagcgatatcatcgcctctggagccgatcaatga

SEQ ID NO: 100179 - DNA, 849 bp, Enterobacter aerogenes
atgaccaccttgcgccaacaactggctgaaatgcaaaaagaactcgatcttagcgttcaggctggtaaggcctcacaaatcatcgataaatgtaatctggtgtgcagcaaaactaacaccattgccgataagtttgcattgcttaaacagcaatatccagcccagcaacaactcccgcggggcattgcggttacctggaatgacgagcagcgtagcgaactgatcgctgccgcgaacagcgtcaaaagtctcaagttacagtggggacgctggctgaaaaaccagtcggtaaacaatcccggcgaggaagaaaaccttgtagatcaggaagagtcgccacagaactctctagatgagacgctggccgcttcagaggaacctaccgcttacgacatcatccagaatgattccttgacccattgcgtcagccaactcggcaccctacacaaggacctgagcaaagaactaaaagatgcctgggatgcatggttggaagagttacatcagcaggttcatgtcgatgacaagacactgaatttccaaaaaaatgcgaacaaatttgacgatatcgcctccgactatgagcgtcgacgtcaggatttcgaaaacttaacgcagtgccaaccagttagcggtgaaaagattcaccaaatcaaagcgctcgccgaaaaactgtattccctgcgcggcatgatgaaaacagactggcctgacgtggtgcaagcatttttcaatagcattaatggcccgcagagtctccgcccgacgttaagtgccctgacgcccgaggtgcttgagtggttaagggatgaagagatgctggatgagttcgtgatcacaaggaaatag

SEQ ID NO: 100180 - DNA, 4437 bp, Enterobacter aerogenes
atgtctacggctgatttgtcccacttgcaccaggcgctggacctgctcgaagagcgggaagcggaactgctggtctggggggatacggatggcgcatttacccatgccgatatcatctcactctttacccggcacctgccctacgaagatgcagagtcgttactggcagaactgcagaatgctgccatgctcttcagcgtcccgaccagcaaaggggggacgcgctaccgcacgcgtatggcggaatcggtctacctgttccgccaccagcgtcaatggttccgcgatcaaccgcttcagcgagcccggacgcttgtcgccgactaccgtttcgtccgtcgcccgcgcaactatccgaagcgggaacttccggcgcaaacggtgctgagcaaatgggtcgacgtcccgtggatgaacgagattaaacgcaaggcgctttcccgactgatcggcgacttttccattgccggctttcaggaacgctcaaccgaacgtattttgcgcgcctggcactttcatagtcatcatgctcacgcgaaagaagccaccgggaccattgtctgtgccggtacggggagtggtaaaacgctggcgttctatctcccggcactcacctcgctcctcaatgatattcagcgcgacaacgcacagcgggtcaggacgctggcactgtatccgcgtaaagaactgcttaaagatcagttcatggaaacctggggcaaatgtcgtaaactcgacagtcaggccctagcactggcaggacgcaagatccgtattggttcttttttcggtgacaccccgttcaaccatcaatacgcaacgaaagataaagacaaggatatgccctttgatttactccgttgcaccacgccgaaatgtccggggcaaatgcactggaaagcagaagatatcaaagcgaaaagagagattcttcgttgtagccactgcgatcacagcgtagacagtgacgaagtgatcctaacccgcgtctcgctgatgaaaaacccgcctgacatcctgtttactaccaccgaaatgctcaatcagcacctcgggaataaccaaacgaatcacctatttggcgttggcatcggcgtaacaccgccgccggtagtcctgctggatgaagtacacacctatgtggggaataccggtgcgcagacagcctatctgctgcgacgctggatgcaacttgcacgcagtcgcccccattttgtcgggctgtcggcaacgctaagtgacgccgaacgtttcttcgccgatctggtaggcgcgcataaaaaacatgtggctcttatcgaaccgaagctccacgaaatggaagatgaaggggctgaatatctgctggcattacgcggtgatccggtctcgcaaaccgccctgctgtctactactatccagaccagcatgctcgcccggcgtattctggatacgaaaaggaaaaaatcacgcgggacatgggggcaaaaaaccttcgtcttcaccgacgatctggatatcaataaccgactttatcatcaactgtgtgacgccgaaggctggcggtcacgtggtcaaaacttatacgttgcgaaaccgccgctggccgctcagcgtctggaaacaccgcaaaacagccatacgctgactctggcaggacagaactggcgtatcgcgcaggatattggtcacccacttgacgaaaatgaccgggccatcgttgcccgaacgtccagtcaggacgtcggggtcgatcctagagcggaagtggttattgcaaccgcgtcgctggaggtgggctttaacgacccctcagttggcatggttattcagcataaagcgccacgtaacgttgcctcctatttgcagcgtaaagggcgtgccggtcgttcaagaactatgcgtccgtggatggtcgcagtcctgtccgaatttggccgcgaccgcgtcgtttatcaacgctatgaagagctcattaatccagagataaaaggacagtcgttgccgatgggcaacattcatatccagaaaatgcaggcggcaatggcgacacttgactggctgagcatgaagatccccggaagtaatatctggtcattgctgaataaaccgcagacaaagcgagagtctcttgaccatcttgatcgtatgttccacctgattaccgccgtgatcgaacaacatgcgtggcagcaggagttggaaaagtatctgttctacgcgctgcgcatcactgacgagcaacttcagcgtgtactgtggtcgccgccccgttcgatcatgatggagttgctgccgacattaaaacgacaactcaccacccaatggtcgcggatgggccaaccggaggcagaccgatcgacgggacgttccccgctgccggcctttattccttcagcgctattcagtgaactcaatctgccggaaatggagatccatctcgagcggaagttcaagaaacgtgaacatttgccctttattcagggtctgaaagagtttgcgccggggcgcatttccaagcgctatgccgtttactccgacaatgaagcagactggcttatcccgaacaactttgttccggcgatgaattgcgtttcggatgttgattttgaaattgagcaggctttcggcgatacctggcagcccgagtgtatcattgagtatgaaggtcagccccctattagggtcattcgcccgatgcaggtgcttacgcgcgcgctgcgattcgagcaaaatctcaccgagaaaagcaactcgcaactgtactggcatacccggtttaacccagacgatcaggccgatccgctccccattcctgccggcccgtggacggacaccctccgctccattacgttctttacccaccagaacatgacacctctcgacgtcacgcgttacgccacccacgcaacagcctcattacgcaataaaaccaagcaacaggcgcatgtgaacttcaggtgggtcgacaatggcgagcctgtcggggttggcgtgcggcagtgggtggatggcgcccggctcagatttacgctgccgcccactctgctgcaacgcctccggcatgacccggccattcagcgcgcactgcgaacgctctatttccagcatcggatcaaacatgaaccacgcttcgaatatgacacgttcaccgctgactggatctacgagtgctacctagcggcggttacgcgggaattggccacacagtcgtctctggcagactctatcgcggaattaaaaaccccggacggcctacgtcgactgactgatatcgcggacacactcttccaggcagagaatatctttgaaaatagcgaggatggtgaagacgacgccgaaagccaggaactgcagcaacatttgcgcaacctgtttaaagagaccgacattctggaaatggtggacaggcacagcgcgatcctgactcaggatctcagtgatgatgtcgattttcaggactggctacagcatctgctgacaacgacccttgccggagcggtcaaacaaaccagccacctgttgctgccggatgtcgatgaacgcggtctggtggtggataccgaactcaacgacgaagtactggacatctggctgaccgaatcagaacccggcggctgtggcatcattacccgtctggaagacgtttttcatcaggatccggtctccgtactgaatctgtttatgcgtagttttgccgccagcgattacgagcagatcgactacgacctgttcgaaatgctttcgcggctcccctcttccagcgagctccaggaggccttaaatgcgatacgtaaggccagcagccatccgcagcgccgtgaggctaacgcccacctcagagcgctgttaaaggcgcagggatttgcactcagtcacagttttatgtcggtgctgcacacacgggtactacgtccgggcagccaggcatcacatgatgcgcagatgcttgcatatctcaacgcatggcgggaactggaagacaaagccggatacgaaatcgctctgaatatttttgcccatacccaagcgacgcaagaactgcctgacgccagtgtgattaaagtttttgagcgcttttgcaaaattcagggaatgctctggcagcgcggcaatgccatccgtcagtcggttctcagctattacaatccgtttaagtccggtaacaacctgactgaacgactgctgctaagctcactgtttcaacagacggcgtgcagcatcagcatcagcgagaacgactggttagcgcagttacatcacgccattacccaacacggctttgcagaactgcatatcccgcgcgaggcccgccatcgtattgtggaagtgatctctctggtgcaggtgaccccgattgagtactttggtttgcatctttatccccgcgaatccgccgtggattatcagggtggcaatctagtgttacgtattgaactggccgaagcgctgctgtaa

SEQ ID NO: 100181 - DNA, 531 bp, Enterobacter aerogenes
atggaagaacaacgacaaattttcctacatggcccactgggccagcgacatttgcgagaaattctaagcgcgcagtttagtggcttgatcctctacccagaaccgatctggctgatctcaccgtggatgagcgactttgacgtgattgataaccggggcggtcagtggagttttcttgatccttcatggggggcccggatggtcagcttccaggaattgctcgccaccgccgtcaacaatggctgtccgctacgcatcgtgacacgtgaagacacgcgcagcgtggtctttatcgagcgactgttgacgcgcttatcgcccgatcacgacatgcaatacctatatcacgagaacctgcacgccaaggggttgctgaccaaacatttctttctgaaaggatccatgaattacacctggagcggcgcaaacctgaacgatgagcatctgctgttttcaactaataatacggtgatttcagatgcgttgattgaatttagcggccagtacacctttggagacacccatgactga

SEQ ID NO: 100182 - DNA, 2184 bp, Enterobacter aerogenes
atgactgatactcctcaatgggtgcgtgacttctttggcaacggaaatttactgaagctggacaggttgctagaaaacgttgaaaacgcctaccctgcggacttaaaaaccgtcttactgccgctctacgagagcgcgactgacgctcagtggccgatcattctgccctggtgcgatgctcatcgctgggtattttttgccgcggcagaaacggatcgcaccacgctggagctcagcaatgtgttgaatgccaggctggggtctgccgatgttattgccgatagaagggtgactttcgtccccgcacagggagcgacatcgctgtctgaaacggctctgctgacgcactgtccggccggatttatccggatcgaattactgcccacaaagcagaaagataaaccagcaaaagagcgggtcttcgccgcgctcaaagacgttatcgccctgtttcgtgataggccatcaatcgtacgcacggtcaaacgtccctttgggcggatcttgagtgatttcattctggcgaatagccaaaaagacgaagccacaagcgacgctttactacaggaactgaagaacaacggcgcgctttcgcgacgcaaccttatgctgcttgaactccagcaggcgggtaagttagagaagtgggacacgctgctgaatcacgattcgcttgctgatttggttcggggacgcattcccacaactctgatgcggatgctgctgaaagcataccagcagcgcttttttacacccgacatccacgggtatccgcaggcctccccggcggatcttcgcccgcaatgtctggcgctacaccctctgtttacgcagatgccttttttatcccaggatgaggctgactttgcggcgtggaaaacctgggccaccggcgtgatgcttattggcgaagtcgacctgctcaacgcgttaccagaacgcctaaaaaccgactggttgagtggattgcacacctgggccagtcggccgttctacgttgtgagtccgtcagcagcgacagcgacggcgtcgctcccggatacgctgcaacagcttgccgcatatctgcaaacctccctgaccgcaacgcaagaggagattaccggctacgcacaaacgctccacacgcttgatcagcagttgatagagcaggcgatggcggtaccactgctgaaaacactcatcgaggagatccgccatctgaccaatccgcaaatcgtgggctgggatatctgtttctcccgactatgtcagtcagaagtcgacagcaacagcctggtgcaactggtcgcgctggaaagtgaaaactggcccgccgactcgttccatgaagcgacgatgctccagttactatcaagtcaggttccaccagacgcgttcccgatcctgcgtaacgtgatgcctgcctttattgaatggcttgaacgtcatcagttcagtctgagtagtacgacgtggctaaagtggctggatgttcttgcgatggaacaaagcgtcagtcaggcggatatcaagctggccacaatggtgacggaccgcttcctacaaggctctgttagccaggaagcgtatcaacagtccggtgccatgctggaactgatcgtcgaacgcgccagttcattccgcaacctgccagcgctgggcgagttgatcgaactcttccttgatgctccggtgcaggatcgggcgacgctcacctcgctgtggctcagcgttcagtcttttgtgagcggaatatgggcgcgattagatccgactactcgtacagtgatgcgcaacttggcgactgacgtgctaggggaaggtgcagagcgcgtatttccggctgagcaggatagctgtacggcagatgcagaagatgaattgccggacttatccggagccagagtggcgatttatagcctgacagaaggcgcggtaagacgcgcgaaacggatgctggaaacgctgttccccgggatcagagtggagatcagccatgcgcacactgcaaccgacaagttgattaatcaagcaaaacaggctgattacttcatcttttctgcaggcagcgccactcatcaggccttttacgcggtctcagcacagcgcagagatttaatctaccctacaggtaaaggtgccgggtcaatgctgaacgcgtttattgcgcacgttcagcaggtctctgcagtagtggcataa

SEQ ID NO: 100183 - DNA, 1251 bp, Enterobacter aerogenes
gtgagtaacacaacaaccgctgacaccgcgccggcgagcgatgtcagggataaggtcgcttcccagccaaatcaatttattaaacgcggcaccccggcgtttatccgcgtcaccctggcgctattttccgccggactggccaccttcgccctgctctattgcgtgcagcccattctgccggtgctgtcaggcgagttcggcgtaagcccggccagcagcagtatttcattatcgatttccaccgcgatgctcgccatcggcctgctatttaccggcccgctgtcggatgccattggccgtaaaccggtaatggtcaccgccttactgttggcggcgtgttgctcattattatcaacgatgatgaccagctggcacggtattctgatcatgcgcgcgttgatcggcctgtcgctcagcggcgtagccgccgtagggatgacttatctcagcgaggagatccacccaagcgtggtggcgttttcaatggggctttatatcagcggtaactcgataggtggcatgagcggccgcctgctcaccggggtctttaccgatttcttcggctggcgcgtggcgctggcggtgataagcgccttcgccctcgctgcggcaatcatgttctggcgtattcttcccgagtcgcgccacttccgccctatttcgttgaaaccgaaaacgctgctgattaacttccatctgcactggcgcgatcgcggcctgccgctgttgttcctcgaaggcttcctgctgatgggcgcatttgtgaccctgtttaactatattggctaccgtttgatgatgtcgccatggtcgctgaatcaggcggtggttggcctgctgtcggttgcttacctgaccgggacctggagttcgccaaaagccggcgcgctgacagtgcgttatggccgcggtccagtaatgttgttctttattgcggtgatgctgtttggcctgctgatgacgctattctcgccgctgtggctgattttcatcggcatgctgctgttctccgccggcttttttgccgcgcactcggtcgccagcagttggatcggaccacgggcgcgtcgcgcgcgcggccaggcatcttcgttatacctgttcagctactatcttggctcaagtattgcggggacgctcggtggagtcttctggcatcattacggctggaatggcgtcggcggctttatcgccctgctgttaatggccgcgctgctgaccggcgcctgtttgcacaaccgcctgaaataa

SEQ ID NO: 100184 - DNA, 1416 bp, Enterobacter aerogenes
atgttacttcctgtagttatggctggtggtaccggcagtcgtctctggccgatgtcccgcgagctttatccaaaacagttcctccgcctgtttgggcagaactctatgttgcaggaaaccatcacccgactctcgggccttgaaatctatgaaccgatggtcatctgtaacgaagaacaccgctttctggtggccgaacagttgcgtcagctcaacaagctgtcgaacaacattattctcgagccggtcgggcgcaacaccgccccggccatcgccctggcggcccttcaggccacccgccacggagatgatccgttgatgctggtgctcgctgccgaccatatcatcaataaccagccggtcttccacgacgccattcgcgtcgccgagcagtatgccgatgcaggccatctggtcaccttcggtatcgtgccgaacgccccggaaaccggttatggctacatccagcgcggcgtggcgctctccgacagcgcccacaccccgtaccaggtggcccgcttcgtggagaaaccggatcgcgagcgtgctgaagcctaccttgcctccggggagtactactggaacagcggcatgtttatgttccgcgccaaaaaatatctctccgagctggccaaattccgcccggatatcctggaagcctgccaggccgcggtgaatgccgccgataacggcagtgacttcatcagtatcccgcatgacattttctgcgagtgcccggacgagtccgtggactacgcggtgatggagaaaaccgccgacgcggtggtggtcggtctcgatgccgactggagcgacgtcggctcctggtccgccctgtgggaggtcagcccgaaagacgagcagggcaatgtcctcagtggcgacgcgtgggtgcacaacagcgaaaactgctacatcaacagcgacgagaagctggtggctgccattggcgtggagaatctggtgattgtcagcaccaaggacgcggtgctggtgatgaaccgcgagcgttcccaggatgtgaagaaggcggtcgagttcctcaagcagaaccagcgcagcgagtataagcgtcaccgcgagatttaccgcccctggggccgctgtgacgtggtggtccagactccgcgcttcaacgtcaaccgcatcaccgttaaaccgggaggcgccttctcgatgcagatgcatcaccaccgcgccgagcactgggtgatcctcgccggtaccgggcaggtgacggttaacggcaagcagtttctgctgaccgagaaccagtccacctttattcccattggcgctgagcacagcctggaaaacccgggccgtattccactggaagtgctggagatccagtcggggtcttacctcggcgaggacgacattattcgtattaaagaccagtatggtcgttgctaa

SEQ ID NO: 100185 - DNA, 360 bp, Enterobacter aerogenes
atgcttaatttatttactcgttatttctcggtcggtattttaaatacgcttatacattgggttgtattttacttattgattattccaggcactacccaggcgatagccaatcttttggcattctgtgtggcggtaaccttctccttcttcgttaatgctgcctggaccttcaaggccagggccacatcacttcgttacctgttgtatgttgtttttatgggcgcagtagcgatgttgaccggtatgactgctgacagccttcagatcccacctcttgccacccttgtcattttttcggctatcagtttggtatgtggcttcctctattcaaaatttgtcgttttcagggaattgaaatga

SEQ ID NO: 100186 - DNA, 918 bp, Enterobacter aerogenes
atgaaaatatctctggttgttcccgtccttaatgaagaggacacgatccctcttttttataaagaagtgcggtcgaaacttgagaactgggaaacggaaataatatttgtaaatgacggcagtagtgatgcaaccgaaaaaattgtcagtgccctgagtctctccgacccgttagtcaagttactgtcttttacgcggaattttggtaaagagccggctctatttgccggtctggagcatgccaaaggcgacgttgtcatccctatcgatgttgatctgcaggatcctattgaggtgatcccgcagttgcttaaaaagtaccagcagggcgcagaaattgtgttggcgaagcgaattgatcgccatactgacggctatttaaaacgcaagacggcggaatggttctatcgtttacataacaaaattagttcaccgaaaattgaagagaacgtcggggatttccgcctgatgtcacgttcagtcgtggataatatcctacgcttacaggaaagaaacctgttcatgaaaggggtgctatcctgggtcggcggttcggttgatatcgttgagtacgcgcgtgctgagcgaatagccgggaaaaccaaattcaatggctggaagttgtggaatctggcattggaggggatcacttcattttcaacgtttcctctccgagtatggacgtatattggcgtcattgtcgccggattgtcgtttttgtacggtgtctttatgatcgttgatacgcttatttttggtaatcgggttagtggttatccatctataatggtatctatactttttcttggcggtatccagcttattgggattggtgtgttaggtgagtatattggtagaatatatttagaaacgaaaaaccgaccgagatatttattgaaggataaggaaagcaaatga

SEQ ID NO: 100187 - DNA, 1452 bp, Enterobacter aerogenes
atgataggttggaaaaagcattggaaaatttatttattttccttactcacagtattctattttttctatgttttcagaaatgcgattatttctgatccggcttcatttttccttgaggcaaaggatattgcggcgggtaactgggcattagttggctggaatttgtccactgtcaatttttactttactgagatgataccatttgccatagctattaagctattcggcccgcatgtttccttgttgtggctgatcccggcggcctactatgctctggtgatggtactatccttctctattgccaaacgtaacaagtttggaatggctgtgcttttcatcatggcattgccctgtacctttgcggtctttacgactattgatgcctgtatccatataggggcattaattatcgctttaataacaataaatagtatgcaaaagcagcctggcgcgattgcgattgctcttttagcaatcctcaacgcgatggcgatttttagcgacagtttgtatttttattttatgacagtacctttactggtttcactacttgcctggcctgtgttgttcaaagagcgtgttaaatacaaatggttattaatgacgatattatctgttgtcattgcctttgttatgaataaaatattgtcggcaatcccgcatttttatatccagggctatactccaccggaatttgtggcaatcgataagttctggtcaaatgtatattacatgtactatggattagttcatctatttggggcagatttctacgggaaaccgattggtgatgtttcgacactcaaaaactttttccgttttatttgtactttatcggttcttgtgttcggcattttttattctttgcgtactaaatcagcacatattattgaccggttgctgatcgtatcaattatggtgctagccgtagcctttgtatttagtaacatgccggtggacatacgctcagtcaggtatttagtgccattggtttttatgctgttaattttcattgctcgcaatgtggtgattaatcggcaatcggtattattagtccttatcccatcttttctgatttttttggtcaatctgagcgactggaaaacggaataccgggatagctcctatgtgaaagttgccaaatacattgacagtcatgacttaggttctgggttcggcagtttctggttgaccacttctgtttccatacattcaaagaatgcgataagcatagccccgacgattgtcgaagaacagcaaaaacggttacgaccttatcattggttgtctaatgagcagtggtacacaatcagagcaaggtactatattgcaagttctgatgaggaagttgcggcaatgagccaggtttttggcaaagactatcggttagaaatagtgtctggtatcagactgatgatttaccctgatgcacgaatttttacctctgaatag

SEQ ID NO: 100188 - DNA, 1362 bp, Enterobacter aerogenes; identical to SEQ ID NO: 83360

SEQ ID NO: 100189 - DNA, 939 bp, Enterobacter aerogenes
atggcgacgataacggtttctccggttcattttgaggactacagtggtatccagttcgagcgccttgtttttgcataccacctgcgcgcgggttggcatgatctgatttggcacggtcaatcaggaggtgatcaagggcgagatatctcgggtattgaaccatttgatgaccagccagcacgtaagaccatcatccaatgcgcgaaccgagacacgttgacactggcaaaagccaagagcgacatgagtaagtcgattaaagcaactggcagtgtcccagacgtctttaagttcgtctctcgtggtgcggtctcggatgctggcagaacgcgcatcgagcaagcagcagcttccctaggcgtcaggcatgtaacgatatggtcgggcgtagagttcgaagaaaacttgcgtcttcgtgctgaatatctgctgcaccgttttgtccagggcgtcgagtttcctgatgttgaagctgatattcaaaaattcacggatgattttcccgacctttccgacgccgatgttctgcaactgatggcttccgtatttgaccggccagcatttcgcacaccgtttcaacaagaaagttctctccctgcttttcagaaggcaatcgaagataccattggcgcactaaatacaggtttgtggagaacgcgtgagggcgtcgagatcaggcgcattccttcgatccaccatctcaaaaatcaacgcatccagacagtgatgggaaaagtggttcgtcaggtcgaccaactgcggcgcatcttcgtaactcggcttaaggaaggggaaatcagaccttgtggatgtggtcagcccgattgccccacgtttacgctcacgcaacgcgtggctgacgagctagacgacgcgagacagagaatcctcacgacgtttcaatcagtgtatacttccttcagtgtgagccttagttag

SEQ ID NO: 100190 - DNA, 483 bp, Enterobacter aerogenes
atgatggcactgaccccggaacaaattcactacctcaaccaatatgcaccaggcgaagctgtgtcacatgcattgtccgagctactattcattgatcatgatcttctcggtatcgatgctaacgaacggtcgattacctttcgctttgcgatgtacctccagcaatgtttccccggttggactgtagattgcgaatacaaccgggacagcattgaacctaaacggctcagacatttggaactttatccagacagcgaagacgttgaggcaaagacagtatttccagatgtgatcgtgcatcgccgaggtacacgacagaatcatttggtcttggagttcaaaaaatcaacgagtcgcgtcgatagagagatcgatctactaaaacttcgaggttataagcagcagcttggttacgagcacgctctgtttgtggaggtcggcaccgaagggcaatcgatcatcacggcgctcgagtgggtctga

SEQ ID NO: 100191 - DNA, 804 bp, Enterobacter aerogenes
atgatacgtattccatcattcaactctcagcaccttgaggccgcctgtcgcgtccttgctgataccgaacgtggcttgagtgggtcgcagatcgagcgactgctacaagaaattaaagttgcggacacatcgccaggaatgacaaagtggaaacgtctgtttaatgcgctcgcaggtgcgcagaaccagtatcaggtcggcaaccatcttattatgttcattaaccgtgcgatgaacccggttaattacgcccgtgatccatcggtgtttgcctggcgacgtgatgaactcaatgttgtcctggctttttccggtttttatatccgtgaggatggtaaggtcgcgagcgctgctaaagtaacgactctggattctgctcgagcccgcgccgggcgacttaaggctgcactcgaaagccgtgctgtgcatgcggaagttttgaactattgccgtgccgaacttctggacgaaaactattttcatgccgtcttcgaggcgacgaagggggttgcggaacgtattcgtcagttgtccgggttgagcggtgatggtgctgacttggtgaacaaggcatttaccggacaacaacctgttctgactttgggatcgctcaccaccgactcagaaaagagcgaacagaaaggttttgcgaatctactgattggtctattcggtgctgtgcgcaatccactagcccatgcgcctaagaagaattggcccatgtctgaactggatgcgctggacatccttacgttggtttcgcttattcatcgcaagctggatggcacgcagaaacaactatag

SEQ ID NO: 100192 - DNA, 753 bp, Enterobacter aerogenes
atgaatgcaactaaagggcttgtcgattttcactgtcaccttgatctctaccctgatcattattcagcagtcagagatgcagagaaagctggaatatttacattggcagttacgacaacaccgcgcgcatggcctcgcaatcacgagattgcaaagcgtacgaagtatgtccgagcagcattagggttacatccccaattggtagccaaccatgaaaatgaactagaactatgggatcattacctatcggagacacgctatgttggtgaagttggactggatgctggtcctcgctttttcaagtcactcgatgcgcaaaagcgagtatttcaacatatattgcaacgttgcgctcaggctggcgataagatcattacagtccatagcgtcagagcggtcaaaattgtactagacttcattgaagcatatttacccttagggcgtgggaaaattgttctccactggttcactggaacaaagaacgaggcgaagcgagcattagagttaggatgctatttttctattaatatggaaatgattagcaatgccagacatattcctatgatacagtctattccaattgagcgagtgctaacagaaaccgatggtccattcacacgtattgataataggccttcacaaccagctgatatagaaaatactgtagaagaactagcccatttatatgggctatccacgagtgatatggtctacgtcattcggaataatttgcggaccctaatcagttattga

SEQ ID NO: 100193 - DNA, 1368 bp, Enterobacter aerogenes
atgatgcgacaactcctagttggtcatttcggttatgacgattcatttgaccctgtagcaggcttagatgaacagataacttccctacagctcgtcgccagcaaacaaacgttggattatggaattggtcatgcactgtccagccttaacaatatcggcatattcccaacagaaatgggcattgacctgttggttttagcagcccatgtccatgctgctgacacacgaatctcgcgtgttgagcaatcgcaggattcgtggacacgcgagataagattgatagtacctgtgagtaatccctctcgttggtattcagcagcgccaaccctcaaaaattctcttgattttttaaccggcgatcgctggacggtcgattttaggccacgccccgagcgatttaatactgtcgtcaaagaagcaccaccaaccctgattgctcacccatttgattcagtcagtttattctcaggtggacttgatagtttaattggagctatcgactcgttagagagtggaactacaccgcttctggttagtcatttcggagagggggcaacaagtgatgcacaaactaagctgtttgccggtttaaaaaaacattacgtcaaatcatctttagggagattgcgagttggtatgtcctttgaggaaggacttgtggaaggcgtaagttcagagaatagtactcgaggcagatctttcttgttttttgctctcggtgttttcgcaggaaccggactaggaaaccatttcgttttgcgcgtccctgaaaatggattgattgctctaaatgtaccgttggatccactacgattgggatcaaacagtactcgcacgacgcacccatattatatggcgagatggaatgaactactttccatacttggcatcaatggcgaaattcaaaatccgtattggaacaaaactaaaggggagatggcttcgtcttgccaaaatccttctcttttaaaaagcctgatatcagattcactatcgtgctcatcaccggccaaggcccgttggttggggcatggcattgaacagtgtggctattgtttgccatgcctgatccgccgagcagcattaatggcagcatggggacctgatagtgatccaacggtgtatacagtggcagatcttcatgctcaccccttggacacgcgccaagcaactggagtacaggtcagatcatttcaatatgcaattgctcgtctgaaagataatccgcaactagcaagtatcttgattcacaagcctggctcgcttgcggatgaagcaatgcatttagaccagctagctggtgtatatcagcgcggacttgctgaagttgcgcgacttatcgacggtgtttcgacaagaccagcttga

SEQ ID NO: 100194 - DNA, 876 bp, Enterobacter aerogenes
atgggaacatcaacagcttatggagggcctggcggcgggactccacttattccatcatggttggataacgcccccccggcatccccgcaaggcaatggcccaggacaagacgaccagcagccaatagatcgtcctgaacccctgactccaccaaatcgcccaccaataccaggtacagctgatccgcaacgtttctcaaacgcgcgcaataacttcacacgatttgcagggtctggtggttcagatcgagcaagcctcgggcgggccatatcgaagtatgtttcaacgtcatcaggtggtgctaggcaggcagcacaacgtatgggagcttccagaggggcgggggcacggctcctcggtttcctagcggaggtacaaacaaggggtgtcaacgaagcgctacgctcactgaatttagaatcgctagcaggccgtccaatcactgaaattttcattgggctagctgatttcatctgcccaggagcaggtactgttgatgagggcattgcccgtgaagcatacatcgagactatcgtagaacttgctaacgaaggtctcactgatttgaatacatttacaccagatcaaatgcaaaccgttttcgaactatatgctactcacgcgatcgaagcacgcatttgtaatgacattggaaccaaagcggtgacgatgccaataaatgcgcatacagcacatcttgttgagcagcaggtgcgagatttcatccggggtggagtaagcgatgcactcgcacgcgctcaaattgggacaaatcatcttactccagagcaaattcaaggattcgtggatacgatctatgagtctgcgtttagaattttacaggctcttggcgatgcagaggctaataaacaatga

SEQ ID NO: 100195 - DNA, 1935 bp, Enterobacter aerogenes
atgattctaactgacaacgaaacaaaaatcgatctgctaaacaatgaggccattgcctccaccattattggattgcttcgagagcagctcaatcacccagtaacaattggtgttcatggtgattggggtgcaggtaagtcgagcgtactcgaaatgattgagtcgggcttctccgacaaagatgatgttttatgcttaaagttcaatggttggcgtttccaaggatttgaagatgcaaagatagccttaattgaaggcatcgtctcaggtctggtagagaaacgtcctgcattgaaaaaagttgaaggagctattaaagacgtattccgtagtatcgactggctaaaggttgccaagcgagccggcggtctggcattaaccgcatttaccggtgttccgacacctgagcaaattggctccatcatcaactccctgcaaggtttggctgaagatcccgtcaaacttatgacgaaagaaaatatctctaatactatcaatgaaataaaggcggtgacgaaagagggagaaacaaaaaatgtaccgatggaagtggaaacatttcgcaaagcatttgatcaactactgaaagatgctggtatcaagcaacttgtggtattggttgatgatcttgatcgttgtctacctgatacggccattgaaactcttgaagcgattcgtctatttgtatttacctcgcggacagcatttgttgttgctgctgacgaggctatgattgagtactcagtgcgtaagcacttccctgacctgcctgacagcactgggccacgagactatgcccgtaattatcttgaaaaactcattcaggtcccgttccggatccctgctttaggcgaaacagagacgagaatttatgtcacattacttcttgctggtgctgaaataggtgagaatgacccagactatgaaaagttaatcatcgttgcgcgggaaaagttgaaacgcccgtggacaagtggtggattggacgctgccacggtaaaaataactctcggctcgcaagccgataaagcaaataatgcactaattctgagtgatcagatcggaccaattttggctagcggaacaaaaggtaatcctcgccaaatcaagcgttttcttaataccctcttgctacgtgaccgcaccgcaacagcgcgaggttttggcgatgatatcaaactgccagtactagcaaaactcatgcttgctgagcgatttattccaagattgttcgaacagatcgcgtttgttgcggcgatacattcagatggacactgcaaagatcttgaagcattagagacgtttcttacgatttccaataaaaacgatgataaaccaaaagaaaaaaaagccgcagaagtattattgccacctgatagtacggttttgactgaatggaaatcttcagaaacgataagtgactgggctcggctcccaccgaagttatcaggtctcgacttacgtccctacttgtttgtaacaaaagataaaaaagattattttggtccggtatcagttttgggccacttagccgaggtggtcgagaaattgttcggcggcaaaatggcggttcaaagttacgaatcagagttgaagcaacttgtgcaacctgaagccgaaaaggtcttcgaggcagttcgtagcaaaataatgagcacagctacttttgatatcaaaccggcaggaattgatggtttgagcgttcttgtaaaggcacaaccaaaattacagagccagctaatggattttctggaggcattgccaaatgataagtgtggtccttgggctgtaagtggttggcagagtgctataaaggataccgaatgtttagcgcgtttgactgtactattggggaattggagcaaactaactactaataccagcctcaaagtcgcagccgaagcagcgcttaaaaatcacaaaggaatacattaa

SEQ ID NO: 100196 - DNA, 1812 bp, Enterobacter aerogenes
gtggaacaagaatttattcatgaagaggcagttctccgtgtcggtgaagtatgtgaggtgtcaggaagaacaataagcatattggtcgataaaaataaaaaccttagcgatctttttttccgtggaaaagtacttaagaacgtatccgttggcggatttatcgaaatcaagaaaggattcatgagcctaatcggtaaaatagaggcagaaaagatacttgaggagaaaaatccattaggaagcggtgctgagtccatacgttttcgccgctacctgactgtctctttgtcgggttacgttgatcggaacggtcattttactgtcggtacaagggaacttcccttaattggaaacgaagcatttatagtgaccgaagagataattcagctcattcatcagatagtgagagcacaaacttgtgctatcacattcgcccgtactgatcttgaagatatcgatattaccctacctgttagcggtttattaaattctcacattgctattttcggtaataccggtagtggaaagtcaaacactctggcatctctgtacaaacacggttatgccgcattgtctgaaatgctaaaagagagctttcaaagcaagtgtaagtttatattgtttgatttcaatggtgaatatggtgccgatgaatgcataacctcggagaaaattgtctataaccttagcacttataatgatcaaggggataaaatccctatgccggaaggtgtattacttgaacatgagatcctttctgtccttactgatgcaacagacaaaacccagaaaccatttttaaggcgagtacttgaactcaaatcggcagttcatcgctctgatgcccctattgatttttttagaaatatactcaagaaaaagatcagggaaactttgtgtggtagcgataagacacgttgtgatgcccttcttgatctttttcgaccaatttttaacgatcatgagcatatgacatccgatctagagtttcatttcggtagaaaagtttggtttaacaacacaggtcgcttttttgactctcctgaagatacggagcattcaaacctgttcagactcgcagaatcctatgaatttccaaatgatgttatagaatccttgcttggattcatgtatttgcagctaatcctcgaattcttatccggtcgctcaaatcctgaacacatagcaccagtagtaaatagaatgagtgcaaacagaaaagatattagaaaagtctttgataccaatgggaatagagatttttggggcaacagtaattttgtagtcatcaacctgaatatggtcaatctgaccatgaaaaaaacacttccattattactcgctaaatgggcctatgctgataaaaaagcaggtgacccctactcaactctcagtctcatcattgatgaagcacataacatcctgtctaatacatcttttcgtgaaaccgagagctggaaagattatcgacttgaaacttttgaagaaatcatcaaggaagggagaaaattcggtgtatttgtaaccctatcgagtcaaagaccgaatgatatttcctccactattatttctcaggcgcataattatttcatccataggttgataaaccagaatgatttatacgctattgagaagtcagtttcttatattgaccgtctcaccgaggaatcaattcccaccctttctactggcacctgcatattcagcggtgtggtatgtccaatgccgctgaaacttcgcatcaatgaattggagatacatcatagcccccacagcagtaccattacttttgaagaaatttcactactatga

SEQ ID NO: 100197 - DNA, 1041 bp, Enterobacter aerogenes
gtggcaatgcaacgagcatactacggtcaggatcgggatcgagagtattttgagcgtgtttttcagtcagcaaacatcaactttcttatcggctccggagcgtcactaccagctatccgcatactaggagatatcgaagcgcaactagaagagcacgtgcgttcaggagatgacttagcctattttcagcaagcaggcgattttctaacctcagtttgggaagctaatgacgttctactcgatagaactcagcaaggtataccgcatagtcaacccacgttagataacgtaactgtcactcgcacctattactccagtttcctacactctcttgaaaagattcttacccaaagaagaactggcctattacctaggagaataaatctctttaccacaaattatgatctgtttatcgaagatgctgccgtcaaaagctataacgttatcttaaatgatgggtttagtcggcgaggaaatttgtatggtgcacatttatttgatccagccagcttctaccatacgactcatgctactggaaacctttataactatagcgttgagctaccgacaataaacctgattaagcttcatggttctttatcatggcttaaatataaaaatgatttttactaccaagtacccccattgagacctgtagcttttgctacccatgaagaactaagaaattgggtgctatcacatgcactcattcttcccagaaaggataaatttcgcgaaactcttcttgaaaatatctattacgatcttcttagaagttattctaatgaattagacaaggaaggagcattgcttatagtttttggtttctcatttgcagatgaacacatagagacgttaacaaaaaaagcgctaagaaacatgtctcttaaagttataatattttcctataatgaaatttctcgaatcgcatttatggaaaaattcagagactactctaatgtggaaatagtttacactccaggtaaagaattagatttcactaaggtaaacgaaattataaattgttttctgaggagataa

SEQ ID NO: 100198 - DNA, 588 bp, Enterobacter aerogenes; identical to SEQ ID NO: 83361

SEQ ID NO: 100199 - DNA, 213 bp, Enterobacter aerogenes
atgtttgttttgctacaggagacaatcatgacatcacatcagttattacgcttaaaaaaggttgaagaaaaaaccggcttgaaacgttcacaaatctatctgtatatgaaagagggtacatttcctcgttcaataaaaatcggaccagccagtgtggcctggctggaatcagaaattgacgaatggatcaatattaaattgtcccggcgctaa

SEQ ID NO: 100200 - DNA, 711 bp, Enterobacter aerogenes
atgcatccagctagagggacattgattcatcgtttatgtctgctagaaaaaaatagctttattaatggatgggactcaattttcagtactgagggcagatacgtccactccacacaaaatattattgatacatcacttattgggtttgaatgtattttaataaagcaatttctcgcatgctcattgaatataccattaccaattattgggaaaaacacggtaaattatggcatcactgttactatgtccaatgaagtttttcagctgtttgaaaaaacaacctggaagtgtagaattgaacatcaaataaaaaacctaccaacagatctggcgtttgatattatggagagaatttcttcagagggaacgataaatcaaaatacaaagcaagaatatttccccctctataatttgcctcaggattcctgctttgttattcgttactcagagattgagaaactaattagcacccaggttacagagaaatccctcccctcttcaactagaatatccacacccttgtcaaggttattttggctcgcttgtaggcacaatgatgttatcagtccattaataaaacaaccctataaattattgacaatttttgaagaatgggcggcagctgatggtatcactgaccgtctaagcggtgatactttaaaaacagcactagagcgtggctcccctccgtcctcatccttattaaattga

SEQ ID NO: 100201 - DNA, 168 bp, Enterobacter aerogenes
atgttgaaaagcagcgagatcataaacggttcgcttccgaaacctgactgggtaaccatacaagaagccgttaacataattaatacagagagcaacgaaagaatcaaagagagtgatatttaccgttatgcattatataataaaattaatctcgccatatacttttaa

SEQ ID NO: 100202 - DNA, 477 bp, Enterobacter aerogenes; identical to SEQ ID NO: 83363

SEQ ID NO: 100203 - DNA, 675 bp, Enterobacter aerogenes; identical to SEQ ID NO: 83364

SEQ ID NO: 100204 - DNA, 1275 bp, Enterobacter aerogenes
atggccttcggcgatacgcagcttaaccagctgatgagtgaagccaccgcgcattcaccttctctggcacaggcagaagcccgggtgcgtgaagccacggccagaaccggtgtcgcccgttcccggttatacccgtcaatggacgccagcgcgtccattgataaagagaagctcagctacaactacatctaccctaaaacagccgtgccgcacggatggaatgatatggggcaggccagcctcaactttagctgggaactggatttctggggtaaaaaccgggatgcgctgcgtgccgcgacatccgaagccagcgctgctgaggcagatgccgccgccgcgaaactgatgctgacgacgatgctcgcggacgcttatatccgtctgcagtaccagtatgacagtcgtgacattgcggcccgacaactgcgtaaccggacggataccgtcaggctggtgcagttacgccatgctcagggacttgattccagagtctccgtggaagaaagcggtgcccggctggatgtcgccagagcggcgctggctgaagccgatgagcaaatcaaattaacccaaaacggcatcgcggctttactgggccgggggccggacagagggctggatatcctcagaccccggttgcagatgcgccgccctgtcgggttacctgatgcgctgaacgcaaacctgctcggacgcaatccggaagtggtggccgcacggtggcgggttgaagccgccgccagcaatatcggtgttgccagagcgcagttttacccgaacgtgaacctgatggccttcgtcggataccagtcactggggctgaataacctgttcagctcgggctctgatatcgggagcgtcggacctgccatcagcttacccctttttgaaggcgggcgtttacgcgccaactataaaggtgcgagagcggaatatgaatatgcggtggcgtcgtataacgaggcgctgacacaggcattacgtgaaactgctgatgttacacggagccttgctgctctggtgggcaggtcagaagcaaccgcatctgctttgtcccacagcgaggaagcttatcatctggcaaaagcccggtatcagggggggctggccgattatcaggaagttctcatttctgaagatgcgttactccaggctgagctggcgaatacagccatgcattcccggggttatgtcttggatgtgtcactcgtcaaggcccttgggggcggatttgaatccagttcaacatttgatgcgcaggtgaaaccgtaa

SEQ ID NO: 100205 - DNA, 1200 bp, Enterobacter aerogenes; identical to SEQ ID NO: 83366

SEQ ID NO: 100206 - DNA, 1533 bp, Enterobacter aerogenes
atgtctggttcagcatttccacctctgtccggattcaaactggttgttgcggcaatcgtgctctcgctcgggaattttatggtggtactcgataccaccattactaacgtcgcgatgcccacaatatccggttacctgggcgtgtcgacaacagaaggaatctggatcatcaccgcctatgcggtggctgaagccatcacggtgccgctgaccggctggctggcgatgcagttcggtcaggtgcgcgtattccttttttctgttgttgcatttgtgattttttctgtctgctgcggtctttcctggtcactaccgagcctggccattttccgtgtgctgcaggggcttgccggtggcccgctgatcccgctttcttccacgttgctgcttgcagccttcccgaagaaacaggccaacattgccgtggcgctctggggaatgatgacggtagtagcgcctatattcggtccgatactgggtgggcttatctcggataactggagctggcagtgggtattttacatcaatatcggctttggtctgattgtggggtttgggacctggtgggtgctgaaggggaaagaaacacatatcagccgttcccggctggacagcgtggggctgggtctgctcgtcatctttgtggcagcctttcagatcatgctggataaaggacgtgaactggactggttttcctcggatattatcattgtctgcgccattgtggccgctattgccctgatctcgctgattatctgggagctcaccgctgagcaaccggtgctggatctgagcgtatttaagtcacgtaactgggtggtatctaccgtcacgctctgtctgatgttcggtattttcttcgggaatatcgtgctgacccccctctggttacagcaatggatgggatacacggcaacctgggccgggtatgcgacgggccccatggggatcctggccgtcctgagctcgcccataattggtcgtctgctgccgaaggtcgatccccgtctgctggtgagctatggcatgggggtactggcggtctcctttgtgatgcgtgccctgctgacgtcgcaggctgactttatgtcagttgccgttcccatgttcgttctgggggccggagttcccgcctgccttatcacgctcacctcgctgggcgtgtccgaactgccgccggagaaagtggcagccggttccgggctgcagaacttcctgcgtgtcatgtgcatggcggtaggctcttccctgacccagacctactgggaacatatgacaaaatttaaccgagcggagctggtgacggcaatcaatcctgacgtgccagggattgtcagcaacacgctgggcgcggccggtattccgacagacacgtcagcggctctgttttcgagaatgatcgacagtcaggccatcatgctggcaacgaacgatttctatcagtcggccaccgttctgatgctggggtccataggcattatctggctaatcaaaaaaccgaaagggccgcttcagaagatgtcgggccattaa

SEQ ID NO: 100207 - DNA, 927 bp, Enterobacter aerogenes; identical to SEQ ID NO: 83368

SEQ ID NO: 100208 - DNA, 1998 bp, Enterobacter aerogenes; identical to SEQ ID NO: 83369

SEQ ID NO: 100209 - DNA, 618 bp, Enterobacter aerogenes; identical to SEQ ID NO: 83370

SEQ ID NO: 100210 - DNA, 324 bp, Enterobacter aerogenes; identical to SEQ ID NO: 83371

SEQ ID NO: 100211 - DNA, 1269 bp, Enterobacter aerogenes; identical to SEQ ID NO: 83373

SEQ ID NO: 100212 - DNA, 132 bp, Enterobacter aerogenes
atgtccaccgccagtgtctccatctgcccctgtaccgacggcagggccagcgccagcgcctccttgatggcgtggacgtccggcgcgcagttgagcttcgcggcaatcaccgccagctggaccgggtcgtga

SEQ ID NO: 100213 - DNA, 906 bp, Enterobacter aerogenes
ttgcagatcgtaaaatatgacgatgcctgcgacccgaaacaagcggtggctgttgcgaacaaagtggtgaatgacggcattaaatacgttatcggtcacctgtgttcctcatccacccagccggcatctgacatctatgaagacgaaggcatcctgatgattaccccggcggcaaccgcgccggagctgacggcgcgcggctataagctgattctgcgcaccaccggtctcgactccgatcagggaccgacggcggctaaatatattctcggcacggtgaagccgcagcgcatcgctgtggttcatgacaaacagcaatatggcgaagggctagcgcgctcagttcaggaaaacctgaagaaaggcggcgccaacgtggtgttctttgacgggatcaccgccggtgagaaagatttctctaccctcgtggcgcgcctgaagaaagaaaatatcgacttcgtctactacggcggttatcacccggaaatggggcagatcctgcgccaggcgcgcgcagccggtctgaaaacccagtttatgggcccggaaggcgtggctaacgtttccctgtctaacatcgccggcgagtcggcagaaggcctgctggtcaccaaaccgaagaactacgatcaggttccggcaaacaaaccgattgtggatgctatcaaagcgaagaaacaggatccgagcggcgccttcgtgtggaccacctatgcggcactgcagtcgctgcaggcggggttaaatcagtctgaagatccggcggaaatcgcgaaatacctgaaaggggcgaaggtggataccgtcatggggccgctgtcgtgggatgagaaaggcgacctgaaagggttcgagttcggcgtgtttacctggcatgctaacggtacggcaaccgacgccaaataa

SEQ ID NO: 100214 - DNA, 198 bp, Enterobacter aerogenes
atgaatatgaagggtaaagcgttactggcaggatgtattgctttaattatgagcggttccgcgctggcggaagacattaaaattgccgtcgtgggagcgatgtccggcccggttgcccagtatggcgaccaggagtttaccggcgcggagcaggcggtagctgatatcaacgccaagggcggtatcaaaggcaattaa

SEQ ID NO: 100215 - DNA, 558 bp, Enterobacter aerogenes; identical to SEQ ID NO: 98957

SEQ ID NO: 100216 - DNA, 207 bp, Enterobacter aerogenes
atggcgcaggtttctcgcggtgtttcactctcttttacgctgctggccgggttggtgctgagcgcctgtaccagccagcaggcgcctaagttgaaagaaggcgagaagccggtggatgttgccgccgtggtgcggcaaaaaatgcccgccagcgtcaaagaccgcgaggcctgggcgcaggcgattgccaaaacctttgacagctag

SEQ ID NO: 100217 - DNA, 864 bp, Enterobacter aerogenes
gtgctggcggtcgcgcagcaggaatcaaactatcaggccgatccggcggtgccgggcctgaataaaatcgcctggcaggaaattgaccgccgggcggaaaaaatgcatatcccggtatttctggtgcataccgcgctgaaaatcacctcaccaaacggtaaaagttacagcgatcgcctggataacgtcaaaacggaaaaacagctgagcgcgatttttgatgacttcattggcatggtgccgatgggccagaagctgttcggctctctcaacccggtgcataccggcgggccaatgcaggtaagcatcgcctttgcccagcagcacaccgatggttatccgtggaaaatggacggcaccgtgcgccaggaggttttcagtctacgtggcgggttgtggttcggcacctatcatctgctcaactacccggctaactacagcgtgccgctgtaccgctttgctgatttcaatgccggttggtatgcgagccgtaatgccgccttccagaatgcggtggttaaagccaccggcgttaagctggcgctggatggcgatcttattcgctatgacagcgatgaacccggaacgactgagctggcggtgcgccgtttagccgggcagctggggatgagcgatggcgatatccatcgtcaactgaagaagggggatagcctggcgtttgaagagagcgatttgtataagaaaatattcaaaatcgccgagaaaaaggccgggaaaacacttccgcgcgagatgttgccagggatccaactggaaagcccgaaaatcacccgcaatctcaccaccgcgtggtttgctaagcgggtcgacgatcgccgcgccagctgtatggcgcgtcgttaa

SEQ ID NO: 100218 - DNA, 1053 bp, Enterobacter aerogenes
atgcatgccgatgtcggcggtgactgtaaacccaccgaactcggtaaggtacagaccgatgccgccagcctgctgtcaaaggttgtgctgcacgatatgtatgccgccgcctttgatgccggggcgccgctgagcgtacctgaggaggtgatgcctggcggggctaaagagaaaacctatcggataatgcaaggtgacgtattaaaacaattcaaaatctccgcccaggccatcgccctgtttaacgcctggcagcaggccggggcgcagcaggcgggggcgaagagcgaaacgccggccatcaacgaagcagaggtggtggccatcgccgtggcccaggggcgggatccggtcgccgcgctgaaggcagctcacgacaaggcggatggcgataaggcgaaagccgccgccgccgcgaagccgccggagaacggcccgatgggcaaactgccggatccggtgtatgtgccgctgaaggccaaagcgctggaggtgatgctggcggaccagctgagctggatcaccgcctggcgcaccgagcgctttgccagcccgcaatacgccgataagtattatcagcgtaagcctttttatcagcaggcgctgaatgagtcgtccggcgcgctgccgtcggcgggggcgcccgcggaaagcaaagggccgcgtgaagtgccgtttatcgataaggatcggcttgaccgcgcggcgtggggctatgactttgcccataccggtatcgtggcgctgctggcccaggtgctgctggatgtgatccccaccacgcaaaccaaccagcttggcggtccgctggtggcggcgcaggagtcggaatatatccagatcaagaaaagcggcgatgcccggcgggcggcgctgatgggctcgccgacgatgctggatttttacgataactacgtgcatgacacgctggccaaatataatcacgacccgctgcactcctcgttttcacacggttattttgcgtcgcggacgatttacgataacgatgacgatacgtgggattcggtgaaacaatttggccagcgattatag

SEQ ID NO: 100219 - DNA, 318 bp, Enterobacter aerogenes; identical to SEQ ID NO: 97717

SEQ ID NO: 100220 - DNA, 3684 bp, Enterobacter aerogenes; identical to SEQ ID NO: 90984

SEQ ID NO: 100221 - DNA, 1053 bp, Enterobacter aerogenes
atggctaacattagtgacgaattggcggccagcattcagaagtgcttcgaccgcacttatgttgatttagcgaaccaacagcaatatttgttcggggcaggcaatgtgacaatcactaagccggacggaacgacggccaccgtcaagtcgtgggcgcagttcctgagcgaatacgtcacacgacagcagaatatcgacacggcgctgacggcggccaacaaggatcaggccaaatataccgccaccaatacgtggacgaagtcgcaaaccttcaacgccgtgaacacatttagagagcttgtcacattcgagaagcaggtgaatatcggagggaaggcgacaatcagaaatggccttgagctgttttttgatactccttacattgattttcatcatgggaatagtgaggccgattttacacacaggatcatcactgaagacggagcgctgactatctctcccggactgaggatcaggaatggcggcctgggtgtgtacgcaggaactatcacaaactatcacggcagctatgcccagtcgtatgtcgcaatgttgcagaatgatccgcccaatgcctcgacgggggatataattgcatccccggctatgacatggcggttcaataaccgaggtgctgacaataatggtgattcaggggcgtgctcaatctggtatgaggagcatgttggcgtagcgcataagttagtgattcaggttcgcgggtttaatgctccggtacaatatactgcattccttccagacggaaggattcagaacagcacgaaagggttcgtccagtttcagggaacatccgacgctcgccttaagcacaacattgaaccgaccgacggacaactgtcagtcgaacgcatccgggcgcttgagcttgtcacgttcgtctataacgacgatgagcatgaaaggacgcgccgggggattatcgcgcagcaggcgcaggacgttgatccgcagtacgtcaagaacagcaaaatggtgtacatgaagacggggaaaagatcgaaactgaatttcttcaactggacaacaacgtga

SEQ ID NO: 100222 - DNA, 426 bp, Enterobacter aerogenes
atgcttctggccatcgaactctatggggtctttgataatggcaccgcgctcttcaagccacgccgtaaattcatcttcaatggcctgaatatccaggggcggttcttcgatcactttattggggtcaaaaatccactctttcagccggctcaggttggcccccggctgtgcataccacaccttttcttccttcacgtagtccagagcattactgccatcagccagtttgccggccgcacgtattgcacgttggcgatcgtcaaagggaatactcagacgggttctttcagttgcaatttcagatttcgccatactgtctacccctgtagttatgtgttatcgctgagagcgccggtaccaccacggccgcccggtaagttttttcccgcggataacccggagaatgacctggtacagcaccggtaa

SEQ ID NO: 100223 - DNA, 600 bp, Enterobacter aerogenes; identical to SEQ ID NO: 84127

SEQ ID NO: 100224 - DNA, 747 bp, Enterobacter aerogenes
atggggatcactggtgagcagcttaaatcctggggagaaatggcagcatacgccgccggggtgactctgttcgctggctctatctggaagttgggcggggcctttaaatggttgttgaccatgctcaacccgctaaccaaattgctgggggtcatgaaagggatcgccgctattggtggcattgaagccgctacaactggcggatctggtggggaaggtaaagacaagccaaacaaaccgggccggggtccgaaagttggcaaggtaggcggcgcggcggctctctctggcggtcctgttggctggggcattgcgatcggttcggtaggtggggattatgcctgggataaagtcatggacgctaacgacgccatgtatggacaggacaccaccgccggaggcaatctgaagaaagatagcccgctgggtaaactgtgggatttcatccacagcccagaccttccgactaatccagactttgccaaaccaacagataaaacagggtgggtaagctcttactccaatccgggttatgttcctcctgcgccgacgattacagcgccacagcttaaagttgatatggcaggtaatccactgatgacgccgccagcgtggctaaaccagccgcttaacgtgaacgtcaatgtgaaagtgcaggatgggcaggttagggatctggtccgctctgaagttgagaccaacaaccagcaggctttcaacatgctgatgcagggcgggccgaactaa

SEQ ID NO: 100225 - DNA, 1065 bp, Enterobacter aerogenes; identical to SEQ ID NO: 97049

SEQ ID NO: 100226 - DNA, 570 bp, Enterobacter aerogenes; identical to SEQ ID NO: 91951

SEQ ID NO: 100227 - DNA, 150 bp, Enterobacter aerogenes; identical to SEQ ID NO: 97630

SEQ ID NO: 100228 - DNA, 2445 bp, Enterobacter aerogenes
atgaaagctcatattaaagtcgacttaccacagcaacttattgattataaaccagtgactggaggcccgaaaaagggtaaaagccctgtaaatagaaatgcccactttgcaaaagtgaggcatagtttagagactgctgtaaatatatataatgaaagaaagaaaacagtggaaatgttattaggtaaaggaaatgaacctcaaaaggtcgtaataacattcctcgaaaatccagaaatcaaagatcggattgttttaaagagtttggatgcgaacggcatgagaataatgtctgttaatactattgatggtatgacaatggcaaatgtttctgtgcccgttgagggtttttctaaacttgataaaatattgcaagaatatgcaactgaaaataccaaaaaaggtaatccaaagaatcagccattcatagaatccatatctaatatcgaatatggtaatttccgagctttatggtttagtcaagacgaatttccaaaagatatctataaagtccaggatgttgaattatggttagactcaagtgatttagatgaaagtttacttgtagaaaaatttgaaaaaatatgtggtcagttgggaataatcgttaagcagggcactcttacttttaaagataggattgtgaaaattgtctgtgcttctatgcatgacttaatgttagttcaacaacttactgagctaatttcagaaattagaccatcgaaagctgtgagtgtggattttcttgatttgaaaccagctgaagcctttcagtggattaatggtttatcctatagagaattaaaaacattaattccaatttgtatacttgatactggtattaactcacaacacccactgcttaataactttgtaaatgaaaatgccttaatcgtagtagagcctcattgggcgaatggcgatttaaaaggccatggaactggtattgctggactggcattgtttggtgatcttaaacacgcaatacaatctaatgaattaccgataagtgggattattgagtcagctaaaattttacctgacacaggtataaatgaacctcaactttatggtgctattacaactgacgccatatataatatagaggccagacagccttctgaacgtcgaatatatacgatggctgtttcctccccaaatactttaagaggaatgccgacgagttggtcagcatcagtcgacagacttgcgtcaggtagtcctgacgatccagaaaaaagattgtttatattatcagcaggtaatcttcctcctaatctaatttctgattaccctgaagcaaatattacttattcaattgaagatcccgctaactcatataatgctctaacaattggatattgggcaagcgaagacaatattataacgcccggatatgatgttatagctgaattaactgatctaggtccttcatctacaacatcaagaatatggaaaaatacctcaccttataagcctgatgtcgtttttgagggaggtaattttggttatgataaagatctcaattttacggcaaatttagaagagcttagtttattaacgctctctcatgatttcactcgcggagaatattttagtagtttttctgaaacaagcgcggctacaggtatggctgcatttttcatttctaaactatggagtcaatatccaaattattggccagaaacgattcgggcattagttgttcatagtgctacatggccaagaaaattacttgaaagacatgccccattgcgtacaaaacagaatgttgaatcccttttaagaatgtcaggttatggctgtccaaatttagctaaagcagtatcaagtggcgatcagtctgttaatttgatagttgaagatacaattcagccttacacagttgatggcaccttaaataaaatgattctttactctttgccatggccttcttctgaattagaaaaaattggtggagaggatgttaagttaagagtaacgttatcttattttgtcgagcctaatcccggcgagagaggttgggataataaatataaatatggctcttttggtttaagatttgattttaatagtccaggcgaagagtcaggagagtttgtttcaagaataaacaaaaaattcaaagatgataatcaagaatttgatgctggtgaaagtgattctagccaatggttattaggaccaaccctaaggaacagaggttctattcatagcgatatttggagtggaacagcattagaattagctgacaaaaaattcatagctatttatcctgtaagtggatggtggaaggaacttaaaaaagaaaatagacaatctagtattgcaagatttagcttaattatttctattgaaactaaagaaaacaatttagaaatacacaacgaaattagtcagttattaagagtagatacagaaatagagaacgtaattgaactttaa

SEQ ID NO: 100229 - DNA, 984 bp, Enterobacter aerogenes
atggctagtgctaatcaactaaaatcgttagtaaaaaattttatcgcacgcgatgatcggaagtttttgactgtagtactacagattgcagcccatgaagctaagattggccatggaaaatttgccgatgagctgagattgcttgtagaaaaagcaaaattacaagctaacgaaggaaacaactatccccgagtgctttcgtcaagcactgcggtaataaatcattcatctaatgatcttttcactgtttctcatccgaccaataagatttctgatgtcattctttcaaatgacgttagaaataaaatacttcgttttttagaagaaaataaaaacgcatctaaaattagacagtatgggcttgtcccaagaagacatttgcttttatatggtccccctggcaccggtaaaaccttaacagcaagtgttattgcacatgaattacacttccctctttttactgtaagaatggattctctaatcacgaagtttatgggagaaacttcatctaaattacgcagtatttttgaatacatcaatatgaatagaggtgtctacttgttcgacgagttcgatactattggctctaaaagaagcatgcataatgatgtaggagagattcgccgtgtcttaaatacatttttacagttgttggatgaacatcactccgatagtttgattattagtgcaacgaatcataaagaaatccttgatagtgctttatatcgtcgatttgatgatgtgattgaatattctttgcctgagaaagagaatttaattaaattaattaaatcaaaatatcattcttttgaaataaacgtcaaagagtgggaaagtttgttgaatagtgctgagggattaagttattcagaggtttcaaaaagttgtgatgatgcgataaagttcgccattattaataacttaaagaatatagaacaatctgatcttcaaaaggttctagaagagagaaaggcatataaataa

SEQ ID NO: 100230 - DNA, 813 bp, Enterobacter aerogenes
atgacagaacaacaattgaccgaaaaccagattcaggccgcaaccggacatgtagtgacactcctcgccagggcaaagaaaccacttcaggatgcggattggctcatgcggttgcctgcagatgaaatcgcccgccagacggaaacactgacaaaaggcctttcttccgactggcagtccaggataattgacctttaccaaaaaatgcaggcctgggtggaggccagacaggccgaagatacagctattgagaacctcagggctctgcgtcagcatcaggccgaaactgaacaggcgagcaaagacaatcgggtgcagttcaggaaattgcttagccagaacggcggtatcgtgaccccagagatgaaagctcttcgggctgagtatctggaacaacaggaaacagccgccgaactggccggtctgatcactgaaaaagaagagcagttgccggtactggctaacgtgacaggtcgtaaggcaaacgcctacgtaaactgccatcatggcatcacggaagagcgtattgatgagcttctgcgtgacttttttattttcaacggtgctgaattgagcagcctgctcaggatgaagtacagacaatttgaacgggatagctcagcgcatttaccggggattattgaaggtacaaatgatgcagatacactatatcgtgaatttatcctgaatctcatgctgaaatggacgagtgaaatattgccgctgagattccgggacgacgtgatgagcctggccggttcagcgccggtatcaggctcacatgatgacaggaaaaaaagaaaactgttttga

SEQ ID NO: 100231 - DNA, 273 bp, Enterobacter aerogenes
atggcgctgaaatgtcctgaatgcggcactatggcccatgccagaaccagttcttatgaagcaccttccgttaaacgctcatggtatcagtgccagaatcttgaatgttcctgcacatttacagcgctggaaagcgttgacacgataattatgaagccgcataaacccgtgccatctcaacctgagtcgcaggatgattcccccgctcgtaagtcgcagacgctgggccgctacggctcggcctgtacccttaaagaccgtcatgcacaataa

SEQ ID NO: 100232 - DNA, 762 bp, Enterobacter aerogenes
atgaacaacatcgtagaaaataacaacctttccacttttccggctgtaacgcagcgggcactggaaatcatgaacacagccagaaacgcatggattgatgcatgccgtaagcagaaagcggcggcggataatactgcggcaatccgccagcgtcgcgctgaaatggaagcaacaacgaacgcactgagtgaggagtggcgtacgctgtttcgtgaaagccagggcgtagtctcaaaggaaatgaaaaaactacgcgcggaaattgcgctggggcgtgaaacgcttgaggattttgacgatctgctggcggctcaggaatgcgagaatgcacttttgccgcaggaggctgcggaattagccggaaagtacatccacgcgcacgatgcccttgtgggtattcgcgcaaaacaaatctgggaggattttatgcagttgcatggtaaggccctaatccagacactgagcctgctgaaatccacaatgggccgggaagccagcgcagttgtcggtgtggtgcattcagttaatgacccggacacattgctgaaagactttattcataaaaatatcaccaaaccggctctcactaacgatgtgatgccggaccaggaccctgtgtttaaactggcgggcgtagccccggattatgcggcccgtctggatttcagtaagcaactatcccctgcagctcttcataagatgaagatacgtcaggaacagaagttgctgcaaaaaaacaatagtgtatcggagggtttgtaa

SEQ ID NO: 100233 - DNA, 2673 bp, Enterobacter aerogenes
atgacaacacagacggttacgcagatttcagccgcagcacgggggaaatggcccgttattctgcagatgctgcgtattgatatacctgaaaacggcaggcacggtccatgtccgaactgtgggggcaaggatcgttttcgcctcgatgaccttgacgggcgtgggacgtggatttgcagccagtgcggcaatggtgacggtctggatctggttaagctcatgaccggttacggcgtcagaaaggctgcgcaggaggtggcgcaggtgcttattgcgtcggatgtgcaggaactgcccgttaagcccgccaggcaaaaagctcctaaacgcgacatgagtcttactgtggcggcgcttatgaaagagagccgcacgggagaaagcccctatctgaccggaaaagggttcgccggatacccggcctctctcaccggtagcgcgcagcatatcagcggtaaggattttcctgccggttccctgctgttaccgctcacgaccaacgccggagccgtgaccggtgcgcagcttatcgccccggcgggtgaaaaaagcatactgcccggcagcacgatgaaaggcgcgtttgtggcgctcagcccgttaccgtctgaaccgccggtacaggtggtgattgccgaaggttacgccacggcgctgacggtaagccagctcacctccggatgcgttgtggcggccatatcggcgggcaacctgcctaacgtggcgcagtcgctgcgggcacgctggcctgaggtcaaaattatcatcgccggtgataacgattttcatgacgggggcgaaaatcccggcagatcctttgctgagcgggcggcaaaagccgttggcggctggatgacgctgccaccgggagagattaaggccgactggaatgatttccatcgggagcacggtattacccgtgcccgtgaagcctttcgcaacggtctggtgctgtgcggggagggccgcacgcagctgccgcacgggttccgtctaacccaggaatatctctggtatgaaaaacaggtacagcgcaacggtgagacggagatccagaacgttaaaatatgcaacccgctgcgcgtaactgcaatcacctgcgatgctgatggcggtaacttcgggcgactgctggagtgggaagatacgtggggagagcgccgccgttgggcgatgccgatggaaatgctcagtggcagcggtgaggagctgcgccgggtactgctggttaacgggttgtcttatatcagcaccactggtgaggcccgcgcccgcctgatggaatatatctctctgtgtaaaccagaacgccgcgtgacctgcgtcagccggactggctggcatggtcaggtttacgtcctgcaggatgaggtcagcggtgaaggtgcagagggtgtcattctccagaccacttccgtgcaggggcgcgatttccgtgtgtcaggtacaacggaggaatggcgggaacacgtttcccgctactgcaccggcaactcccgcgtggcgtttgccgtgagtctggcctttgctgcacccctgttacggctggttggtatggacggcggcggctaccacctaaagggggaatcgacggacggtaagaccaccaccatgaaagcggcaacttccgtatgcggggggcctgactactggcagacgtggcgggcaaccggcaacgcgctggagggatgcgccagccgccgcaacgatgccgccatgatgctcgatgagatccgggaggtggacggacgcgaggcaggcaatatcgcctacatgctggcaaacggtcagggcaagggccgtgccggtacggacggtgagctgcgcacccgtaagcagtggcggctgctgttcttttcaaccggcgagctgtcactgactgaacatgcggcaaaagccggtgagcgtacttttgccgggatggaagtcaggatgatccagatccccagcgattccggaaaatttggcgtatttgaggagctgcacggcttcgacagcggcaaggcactggcagaacatctggaatgggctacgtccagctactacggttcgccgttccgggagtggctgaaagccctgaccgctgaccttaacgggctgacggcacaggcaaagtcactgatgaaggaatataccgccgccctgaccccgaaagatgcgggcaatcaggtgggccgggcagtgaaccgctttgcactggtggcgatggcgggcgagctggcaacccgcctgggtatcaccggctggcctgagggggaagccctgcgggcaacccgcgtctgcctgaacgcatggctgaaagatcgcgggcacaccgccaaccaggaagatattgccgcactggagcaggtacgcagtttctttaccgcgaatcagtacagccgctttgcggactggcacgacgagcgcaaccgccccggcaatatggtgggctggcgcagggtggagaaagggagtaccgcgcagggcacggaagccatcaccacgttctacgtcatgccgtccggctggaaagaaatctgccggggatttgacccgcgcaaggtggcgcgtttatgcgcggatcgtggatatctgctgccttctgccgacggaaagctccagacaaccgttcgccctccagagatgaatccccgcaggctctatgtcttcaacagcgaggtgccgggttaa

SEQ ID NO: 100234 - DNA, 384 bp, Enterobacter aerogenes
atgaaccagccgcaggtttccatttttccggcagaaatgaccaccgcgctgtaccgtcgggcgattgcttcggcatggcgtaagaaaacgctgaacgaaaccggcagcgatcagtatggtccgcacagcctgacggttgagcgtattgaaatggccattgccctgcatatcgagtgcgcactgatcaacgagtacggcgaagcacagggcgccgctgtcgcgctggcactgctgaccgacatgctggagccgtcactgctgacagcgccgccggtactgaccgtgcgcggctgtgaagtgatggcggagctgtaccgcacgcttccggcggcctttgatgatttctgcagcacgggtgtggcgctgtatcagggggaagtatga

SEQ ID NO: 100235 - DNA, 288 bp, Enterobacter aerogenes
atgatgaatatttcaaacgggcacaacggtgctcagggccacgctttgcctgaaaaacacaataccggtgctttttcctatgggttgtcagaggacggtttcggaaagctgacccgcgcaagaaatgcctgcgacatgctccagcttctcttttctgaatacccgtgtcagggcggaacgctggatgcaggctgtgcgccaggcatcgccgcgctgatggagtacctgagggcagatttgacggatatcgcgcagagctgcgcattgattgaaggaggcatccaatga

SEQ ID NO: 100236 - DNA, 360 bp, Enterobacter aerogenes
atgcgtagttatccgcagcccggcgaacgctggcagcatgaacgtggctggaccgtcacgattatcagattaattgaagcctcgccctccgtggcgctggttaaccctgagttcagctgtgaagtgctgattcgtcatgacagcgacaataatctttcttcatgccctttggcatggtttgagcagcattatactcgcctgtttgatgcgccacttttcaaaccttcgccagctccggcaggcggtagtggctccggcccgctgacactgcatccgtctgtggcatttacccgctggcgggggcgcagcatacggcgttctgctgaacctgacgacaaccactattcaaagtttctctga

SEQ ID NO: 100237 - DNA, 177 bp, Enterobacter aerogenes
atggctaaacagaagtgtacctggttatttgccgcgatcaaccgcagtcagctcaatgcacgccctcagatgttaaggatcacggcagataccgaacgttcagcccgactcaggcttgctcctgactacgtgttgagctttgccgggcgtattccgtgtggaggtaaccatgcgtag

SEQ ID NO: 100238 - DNA, 825 bp, Enterobacter aerogenes
atgaattttttaaaaatcaataatactgattctctgctcagagattactaccaattagatgaagcttcagaaaaaattggttgtaatgaaaaggatatactttggtttgctaaagaacgagatatagagttatgcatggaatttcatgatgatgagtatgatgtttcatgttgtttgaagatcgatggtcaaatggatgagttcttatctaatctgaaatctttaccgcgagacagaaatggcaatattatgttgtcagatttaagttctataagaattcctgatgaaaataatttaattgataaaaatggctttattcgatgcttcatatccggcttatgggctgttgattatgagtataaaaatctgttagttaaacatgaagggcagccggattcctggcctctgcactttttagtagcgggcacgcctaatgtaaattataaggcaatgctttatgttaattatgatgaaaaagaaaattattatctctttgaggttttgtggattacaaaagtacaaattcaaaaattcattgacttggtattatgcgagcaaaagcggataaaaaacgccaacaaatataaatcacaatctgaggcgcaaaaacaaaagcatgcagttcctcgagctgaaatactcatggctattatttcactctatcatcgtgatatgaggttaagaagagagagtccagcagctatagctgattatctttttcaacacgccagtgagttctggcctaagaccggagagccgcctttgagctatgatactgttgttggtttgcttcgtagctgtatgaaaaatataaaatttaactga

SEQ ID NO: 100239 - DNA, 1191 bp, Enterobacter aerogenes
atgatgctgaatgcccgcaaggttgaagctgcgaaaggaaaagagaagagctacaagctgtctgatggaggtggactttaccttcaggttgaacctaatggctcgcgttactggcgtatgaagtaccgttttgctggtaaagagaagcgcttgtcctttggtgtttatccaacagtcacacttgctgatgccagacaaaaacgagaagacgcaaagaaacttctagcagcaggtgaagatcctggcgaagtgaaaaaagcaaaaaagcaggctttaaacgcagcgattgagacacttaacccattcagagacgtggcgttagagtggcacaaaatgaaatctcccaaatggtctgagggctatgcttcagatatcattgaagcatttgagaaagatattttcccgcatattggacatagacctatagccgatattcatcccctagaactgcttgaagttctgaggttgatagaagcacgaggagctatggagaaagcgaagaaagtccgtcagcgatgcggtgaagttttccggtatgccatcgtaacgggtagggcaatctacaatccagcaccggatcttgccagtgcgatgcaaggacatgaagcagtccactatccattcctcaaagccaatgagctgccggagttctttactgcccttaacgcttattcaggaagtccaattgtattgttgggagcacaattgcttatcctgacaggcctaagaactggagaactaagggcaggtgagtggcgtgaggtggactttgataatgcggtgtgggagatcccaaaggaacgtatgaaaatgcgtaggagccatattgtcccgttgccaaaacaagcattatcccatctcaaaagtttgaaagacctaacagggaactacccgctgatgttccctggacgcaacgatcctagcaaatctatgagtgaagcaagcattaatcaggtttttaaacgtattggatatgcagggcgtgttacggggcatggtttcaggcatacgatgagtacgatactacatgagaaaggatttaacagcgcttggattgaaacccagcttgctcatttggacaaaaattctattcgtggaatttataaccatgcccaatatctcgaagggcgaagagaaatgatgcaatggtatgctaattatttatctgagctaggtggtactcttaaatga

SEQ ID NO: 100240 - DNA, 1782 bp, Enterobacter aerogenes
atgaataatgataataattcaacaaatgaacatctgaaatcgtacatttcgtattataataatttaaaaaaccctaaatatgcagtactggtcaagggggagtggggcgtaggtaaaactcatctcattaatagcatattgaaagatgatgaaaaattttacataagcttatttggattaactacagtccaggaagtccatgctgctgtatttatgaaaatgtacccaaacaggtcaaaaaccagaaactttttcaacttatttgggaattctagcgcgaaaacttatgatatcacattaagttttggccctttaattggaaatatagcaaatgcactaatcaaagagaaagtagacaattcaaaaccaattatatttgatgatttagaaagatgcagtattaaaactgaagatttatttggcgcgataaataaatacgttgaacatcatgaatgtaaagttattgtaattgcccacgatgaaaaattaggtgaaggtttaacagataaaaaggaaaaaatattcggccaagttattaaagttacaccaaatatcaatgatgcctttgaacactttatagaaacaagcaagatgccttcggctttcgaacccatcaaagatatagtttataaatcttttcttgcatctgagtgcaaatcattgagagtactagattatgtaatcaaagattgcacaagattatttacatgcattgcggaacgtttagataaaaacagcacagtattaacggaactttttgtattatttaccgcgctggatattaattatcgactaggaaaactaggggagaaggaattaaaattaagaaactctgtgatatattatgtcaataaaaacaaggaaacagatgacatatttgatgaaataaatgagaattataaaaagcatgatgttttcttacatataaacagcgatatactttcaaatgaaatattaatcaacacaataattaatggcatctacgaaaaagaaaaaatcattgaatgcataagcaaaagccgacattttattgaaactaaagccaaaggaccatggtatacaatcatgaaccttgactcaattgaaacgattcaaattgacaaggcaataaatattttatattcaaaattcaacaacctagaaataactgaaatgggcgaaattctccactcggttaatttgctgttcatgttatcggatataaaacatattgataaaagtttagatgatgtctattcatttttcttagattacgtaaaaaaacttcaatcaaataataaattccatccagcagaaattttcccagaatacggatctatgatggattcttctgatggctatggcttttggattaaagattcatacaaacattattcatccaaactatataaaattttagagtatcatgaacaaatcgcgttgaaaaagaaatatcctttatttttagcagagcttaagcgtaaccttacagaagatacttcaaaattttgcgaacagatatcgaggtatgggaacaaagaaactaatacatatggatatataagtatccttgcgggtttcaagccacatgaatttgtagatatgtggctcagtactgaaatgaaaaattggcataacataagatcagctttagtcagtcgttataagggaggatcattacgaaatgaattacaagatgaaggcccttggttaaaatctataaaaatgaatattcgtcatcgtgcatctaaggcaaacggtatcgatagattgagattgtctaggctcctaatggaactgtag

SEQ ID NO: 100241 - DNA, 582 bp, Enterobacter aerogenes
atgagcaaattttcattcgagcagatcggacacagtagcgacgtcttagatcgagtcgtggacgcctacggcttcacctcaaaacttcaactagcagaccattttgatatggcttcaagcagcctatctgcacgtttcaaaaggggaatatttcctgctgatatggtggtcagatgcgtagcggaaaccggcgcatctctggaatggctcgctactggtcaaggtagaaagttcgacgatgaagaactggatattttgaaaatgcctcgtcgtaaaatcgtggacggactgatttatgacgctgggatgtacatgctggataaagtctcttttttaccgggcgtccctttgcctacctcccccatatgtgtgctggaaggtaataatcagttcatcgttgatacctcattcacagaagtttatgacgatcagtggcttgtagagattgagggtaaaacgagtatccgtacccttacacgcattccaattaagaaagtaagagttagcggcgtaggtatggcttttgattgtggtatcgacgacataaccgtgatagggcgtgttgtcctgacgattaaataa

SEQ ID NO: 100242 - DNA, 222 bp, Enterobacter aerogenes
atgcgtcccaacattacaatcgtgatccctgatccatacattcctcttgaagagtattgccgccgtactggcatgtcccgtagtaccgctgagaacttgatttcatacggaaaattgccaataaaaccaaaaggagcgcagaaaaaggggctggttgaagtgaacatggccgccttaaccgtgatggcattaagcgaatgtgatgtttcgcttaacgcgtaa

SEQ ID NO: 100243 - DNA, 504 bp, Enterobacter aerogenes
atgtttgattatcagacttctaaacatgctcgctttgatgctgcttgccgagcgtttgcgctggcgcataacctggaagaagttgcagcggctgtgggtatgcgcccacaaatgctgcgcaataaactgaatccggtgcaaccgcaccgcctgacgtgcgatgaattgctggcaattactgaccacacagaagatgcccgcctgctggatgggcttctgagtcagattaattgcctgccgtcagtgccagtgaacaatgccacgccggggaatatgcagttttgtgccctgaccgccaccgccagtgtcggtgtgatcgctggggaagccgtatcaacggagtgcatgacctccgcccgccgaactcaaatccttgatcgcgcccgcgatgccatccgcagcctttccgtgctggcttatacagttgaaagccgtattcagtccgcgccggtgctggctgctgctgtcgatatcgtgacaactaacgtcacaggaatgatgtga

SEQ ID NO: 100244 - DNA, 195 bp, Enterobacter aerogenes
atgaaagcctttgttacctatttgaagcaccagtcaccacctatgcagctggccagcggttcaactggctggattgagctgccagatggtcagcgcaggaatcccagccacgtatataaatttacggcgcatcaaccgcgccgccgttggtggcatcgcctgatgggattagtccgggggcagtatggccattaa

SEQ ID NO: 100245 - DNA, 429 bp, Enterobacter aerogenes
atggccattaatcaggaacagcaaaagctggggctggcgcagctgcgcaacatacgccgcaaatatttcagtaacagcagtgaagccgcagattggtgggacaagttaacgccggagtggcgcggggttgtcctccatgccgcgggcgtctcttccggttccggggagtttaaagccagtcttagcaagtgttgctggcgtgaacttttcgaacgtctggactatcgcgccatgatccacttgcgccagggcatatccagggcgcgtctgacttttgagggattcggatcgttgcgggactctgatttttcagcccgtacagcacatgacagaccgattaaaaaagcgcatccgattaatagccgcaacggggtgcagatgattattgcgcctcatatcgtaagcaaaatgcagcaggagaatcactaa

SEQ ID NO: 100246 - DNA, 402 bp, Enterobacter aerogenes
atgtccattatttcagtagacgctaaagagctggggcgcgagctggccgcatggggcgtaccacacaattacgccattctctttgtggaaaaaagcactgtaaaaaataatcgtgttgccctgcatccgtttttctttaatgacactgagcatatgaccagcaagcgccactggctggcagtcaatgcagcttactggtgctgtgtataccgtgaggcagaaagccagttacagcaggtggaagcgctggccagcatccgttccatgtattacgttgcaggatcgttgggtgccggtgaaatcaaggcgctgatacaggagtggtggcgcaatacttatgagctgcataaggttcctgcgcctagttataccgccgtacctattaccttttctttccactaa

SEQ ID NO: 100247 - DNA, 234 bp, Enterobacter aerogenes
atgaatatgacacgtaaccatttgcccgtaattaattccggtaacgagctgcttgccatgctggccaaagcaactgccgaaggtaaagctgttgccgccgatttgtgttccacccgtctggataagctggccacccacgccgcaaatgaaggtttaagtgcggctgagattgtcgaactgatccgggaagaggccgaggcaatttgcagtaaaggtggtgcagcatggcagtaa

SEQ ID NO: 100248 - DNA, 861 bp, Enterobacter aerogenes
atggcagtaaaaacaccgctgaaatgggtgggcagtaaagcccgccttatgccgcacctgcgtgatcatcttccggaaggcaagcgcctggttgagccgttcgcaggttcatgcgctgtcatgatgaatacggattatgacgaatatctgattggtgacattaaccccgatctggtcaatctgtataaggccatggcctatcataccgatgcgtttcttgttgagctggaaacgctattttctgccggttcgctgggtgaagaagaagatcgggcggttttttattattcggtgcgggattctttcaatttattcaagggtagtgctgatgcgggcagcgtaacagctgctgcaagttttatgtatctgaaccgtcacggctttaatggcttgtgccgctataaccggcgtgggcagttcaatgtcccattcgggaagtacaagaaaaactatttcccaataaaagaaatccgcgcatttgctgaaaaggcaaagcgggcgacgtttatcaccgcacattactccgaaacactggcgctggttcgtaccggtgatgtggtgtattgcgatccgccatacctgacggaatcaggaaattttacctcatacaccgaaagcggcttttcacccctggatcaggggcggctgtctcgcaagttgcacaaactggcagtaaagggagtgccggtagtagcgtctaatgccgatttgcctatggttcgctatctgtacgcgctgtttgatgtagcggaagtgaatgcgccgcgcagtgttggtgcagcagctacaagccagaaagtggctaaagagctgatccttaaatcgccacttaagcttgtacttagtaagggggcggcgtga

SEQ ID NO: 100249 - DNA, 249 bp, Enterobacter aerogenes
atggttttcggtgaatcattgtggctgtgggtttattacattatttacgttgctgtcgcgttgattgccgtttttctttatacgcgcactctgacaagggacaacggcgaatatgagccagatatgatggatttcatcattgttcatatctgggcagcgatatggccagttgcatggtctatcgagctggctatatggcttgtgcgtaagtaccaaaaaatatggcgcagactggcggttagatcgtga

SEQ ID NO: 100250 - DNA, 1968 bp, Enterobacter aerogenes
atgttcgcgccaggaacgccagatgatgcgacgattacagagcgccgtttgtgggcagttaatccgcaggattacgagtggcgttcacagtaccttcacgagatacccgactggctagccgggtattttggcaaccgttacgaaaagctgtttgctgaccgtgacggccgccgccgtgctaatacatttctgcgcaaaacaattggcgggaatgtattgccacgtctgcggaaagtggctgcgcgttatcagttagccgctgatgtaaacgatctccattttggaaagtcattgcagcgcttgccgtcgttagaccgtgcagatctcaaaaagctgtctggccagatatcaggctggattgcccagatgttttatgacttcaccgacacgctgaagggcaaaccaaaggacgaaagggagatgcgccagcgaacgctggaggcttatcgtaacctttgttcgctttccctcatgctgaacaatcagccgccttactgggcagagcacgaagccaaagatggccaactggaaacacgaaaagcggagtccggcattttgcgtcttatggctccggaatggtggtatcagcgtctgaagcgtgcccgtgatctgcaacgtgaacatttggccattgccgttggccaggtgcagaaatctgccagcgcctacgtatcacgtaaaacattgggggaatggatagaccagaagaaacgtaatctggagtttttcaaaaagtttgatctgatggatgaagagggtaatcgcattgcgctggacagtatggttcaccgtagcgttgctaacccggccattcgtcgctgtgaactgatggtgcgtatgcgtgggtttgaagatatcgccaatgaacaggggttggctggcgagttttacactattacagcaccatctcgttatcacgcggtacacagtaaaggcggctttgtgtctcagtggaacggtttaaatccacgggacacgcagcgttatttatgcagcgtctgggcaaaagctcgtgcagcgatctcacgtgccggtattcatatttttggttttcgcgtggtggagccgcatcacgatgggacaccgcactggcatatgttgctgtttatgcgtccgcaagacgttgaggcggtgcgcgatattctttgctatcaagccagaattgctgattccgaagagcttcagacacccaacgcgcttaaggcgcgttttcacgttgaacctatcgatcacgctaaagggtcggcaacgggttacatcgctaaatacatttcaaaaaatatcgacgggtttgcgctcgatggcgagcaggatgaagaaaccggggaaaacctgcgtgatatggccaaatccgtatcggcatgggcatcccgctggcggattcgtcagtttcagcaaattggtggtgctccagttactgtatggcgggagttgcgccgcctgggcgatcaacgtctcacagatagtcggatggatgcggtgctggcagcggcagatgttggggattgggctgcctatacccaactgcaggggggcgcactggttgcgcgtcgtgatctggttgttcgcctagcctatgaaatcactgagcagggaaacgagtacgcagaagatattcagcgtgtacagggtatctattcgcctttaatcccggattcagaagtttgcacccgtttggtgaagtggcagaaggttgcgaagttggccgaagcgtcagcggaggcgggtttttctggcggcagcgccgccccttggagttctgtcaataactgtacggagggaggaacccgaagaaggttaaaaactgaattaactggccgggggcttgccggcacggatgaagaaatagccattctgatgcgtggcggcggtttgagttttggcaatagctcgctgatttaccgtaatggcaggttgcaggaaaaccgtatgaaaccggaagatgaaatctggccaggctggaggtga

SEQ ID NO: 100251 - DNA, 207 bp, Enterobacter aerogenes
atggatattttggaggcgtccgcaaagctggagcgcatcgaactactggctaaaatagcgcatgtctgcgatgtaaacgcaaaggaaaaaactatcgctcttgagtggataggggaagttgcggaagagttgagggaaataactaggggcaagaaaacaagcccctctagcgagagcgattcacgcagcaggtgccgctttcagtaa

SEQ ID NO: 100252 - DNA, 270 bp, Enterobacter aerogenes
atgagagtcctgaagattgaatgcccggaatgcggctcaaaggctgtaattcgaaagacgaaccggaaacaccggcagattgctgatatttattgcgcctgcgcagatgtggagtgtgggcacacttttgtaatgaatttgacgttttcccacactcttagccccagcgcgaaaacgggtgatgctttagtacaaacattgctaaaaaatctgtcacccgatcagaagcagatggcgctggacttactgaaagcggcacctgctgcgtga

SEQ ID NO: 100253 - DNA, 1050 bp, Enterobacter aerogenes
atgacgaaaaaacgatataacgcccggaataagcgcggcgacaaagcaaaaaaaatgagcatcatttctttcggcaaaccggaaccagtactgaccaccggcacggattaccgggatatctggtacgacaatgctgccgaccattttacccagcctattgatcggctggcgctggcacagctgattaacctgaacggccagcacggcggcattattcatgcccgtaaaaatatggtgacggcagattatctgggcggtggtctgacggatgatgaactggaagcggccgcatttgattatctgacgtttggtgatgtggccattgcgaaaatacgcaacggctggggtgacgttatcggcctggaacctcttcccggcctttatctgcgccgtcgcaaagtccgtgatgatgatcgtaatgtgcccggtgattacgtggtactgcaggaaggtgaaccgctggtattccctgaagaagatatcatttttatcaagatgtatgacccgcagcagcacatttacggtctgccggactatatcggcggcattcattccgccctgctgaacagtgaagcggtgatttttcgccgccgctactaccacaatggggcacatactggcggcatcctgtatacccgtgaccccagcatgacggatgaaatggaagaggagattgaacagcagctgcgtgacagcaaagggatcgggaacttctccaccattctggtgaatatccctggcggcgatggtgacgccattaaatttatcgaaatgggggatatttctgcaaaggatgaatttgccagcgtaaaaaatatcagtgcgcaggacattctgaacgctcaccgcttcccggccgggctggcaggtattgtgccgcagaataccgcaggactgggcgaccctgaaaaagtggaacgcacctacaaaaagaatgaagttcgccccattcagcgacgcatggccaaagcagtgaataatgatccggaaattccggcgcatctgcatcttaaattcgcagatgaatcaacggataaggatgcagcatga

SEQ ID NO: 100254 - DNA, 1776 bp, Enterobacter aerogenes
atggctaaatactctgaagaattaaaaggcgtagtacgggcgctgtatttgcgtcgctatacgccaaaagaaattgcatctgaattaaatctgccgaatgcgcggatcgtttactactgggcggagaaatacagctgggctgatttactcagccatgaaagtactgaagaggcgattgaacgccgttaccagttgctggccgggcgcgataataaaaccgatctcgacctgaaagagatggatttacttattgctcatgccactaagctgcgggcgcaaagtaataaacataaagaaaagatgctggcaaaccgggggaacgggcaagcagctgcggcgcaagacagcgacgatggcgaaccccgcagaaaacgcaggtacaagaaaaacgatatttcatcgcttacccaggaggattttgacacctgggcggaggaacatcttttcggctaccagaaacacctgcgccagaatattggtcaggcggtgcgcaatatcctgaaaagccgtcagatcggggcaacctggtactttgcttatgaggcatttgaaaacgcggtcatgaccggcgatccgcaaattttcctgtcagcatccaaagcccaggcggaagttttccggtcatatatcgtcaatatcgccgagcagtattttggcatcacacttaccggcaatccgatccgtctaagcaacggtgcggaattacgtttcctttccaccaacaaaaacactgcccagtcctacagtggccacctgtactgtgacgaatatttctgggtaccgaactttgccaggctgaacgaagtggccagcgcaatggccacacacgataaatggcgcaccacctacttttccacgccatccgccaaaacgcaccaggcttacccgttctggactggcgaggaatggaaacagggcagtaaaaaacgcgcggctatcaaattcccgtcatttgatgaaatgcgcaacggtggccgactctgccccgatggccagtggcgctatatcattacgatggaagatgcgatcgccggtggctttaatctggccagcatcgagaaactacggaaccgctacaacgaaaccacattcaacatgttgtatatgtgcgttttcgtggatagccaggattccgttttcagcttttccgacctggaagcctgcggcgtggaaattgagacgtggcaggatcacgaccccaacgccgcccggccatttggcaatcgcccggtatggggtggttttgacccggcacgcagcggcgatttgtcctgcttcgtcattattgccccacctgaactggccgcagaaaaattccgcgtactggcagtctttaactggaagggtatgaacttccgctggcaggccaagcagatagaaagcctgtttaaaaaatataacttcacttatctgggtgttgatgtcaccggcataggccagggcgtttttgacaatatccagcactttgccatgcgcgtggccgtgcctatccgctatgacctgaacaccaaaaaccagctggtactgaaagccgcggatgtggtcgaaagccagcggatcgagtgggataaaaacctgaaagagatcccggccagtttcatggccatccgacgcaccacaacgcagagcgggaacgccatgacctttgtcgcagaccgcagccctgaaaccggccatgcagaatcgttctgggcgatcacacacgccctgcataacgaaccgcttaactatgaaaacaaaccaaaatcccgctggggaatgaagaaggcagcatga

SEQ ID NO: 100255 - DNA, 804 bp, Enterobacter aerogenes
gtgtcgcatttaaaaactgactggctgtgtgttgctacagaaggggataccgtagacggcagggagattaaaaggcagtggattatcgatatgggggaaacctacaactataaccactatgtcgctttaatctggccagaacatgaagatgattgcggtaattttggtgaagtactggaagccacctggcacgatggcgacgatgggttagcgcggctgtatgtcagcctgtgcccgaatatgcgccttatctttgccaaccatgaagaccagcttttgttcttttcaattgagccggaagagaactggcgcggcagtgggcgtacttacctgaaagggctggcggtgacagataccccggccagcgttggcaccacacggctgcgctttagtagtcggcgcaaaaaattaacgaaacagggttattacagttgcgtaatttcccgcgacggtaaaattaaacaggaagaaagaatgaagaactggcagaaattatttggcattaaaccgaaatttgaagaagagaatccaggcgataatccggcaccggatgatgataaattacaggcgctggccaatgctcttaatgagctggaaggtcgtgtggccaaaattgaaaatcagctgggtgacgtaaaagacgatgttgataccattgcagaagtagtggatacagaagagttttctgttattcgtgacaatgcaaaggatatcgttaaacgcttcagtgatttgggtggtaagtccagccgttctcaggggcgtaatatcaaggataagccgggcagctttaaattcctgtaa

SEQ ID NO: 100256 - DNA, 1023 bp, Enterobacter aerogenes
atgcaccttaataaccgtgcgcgggatttactggataaatactcggcggggatggcgcagcaattaggcgcaccggatactcgtcgttatttttccctgaatgacccgcaggaaaatgatttacgtctcgccatgctggaatccgtggaattcctgaacatgatcacctgtctggacgttgaccagctgagtggccaggttatttccgttggtaattccagactgcataccgggcgtagtgctaccgggcgttttgtgcagcaggtaggcgtggatggtaatgactattcactggttgaaacagacagctgtgccgcactgcgctgggatctgctttctgtctgggcgaacgccggaaaagaagaaaatgaatttttcaatctggtgcaggcatttaccacccaggcttttgcgctagatatgttgcgcattggttttaatggccagagccgcgctaaaaccaccgatccagaagctaaccccaatggcgaggatgtgaacatcggctggcatgagcgcatgaaaacgcttttgggtggcaaccagattatgacagataaggtcgtgctggatgaggccggggattacaagtcactggatgcaatggcttccgatctgattaacgccaaaattcctgcgcagtttcgtaatgatccgcgccttgtcgtgctggttggtgctgacttggtggcggcggaacaataccgactgtatcaggctgctgaccgtccgacagagaagattgcagcgcagatgctgggtagcactattgcaggccgtaaagcgattattccgccgtttatgcctggtaagcgcatggtggtgacaccgctttctaacctgcatatctatacccagcgcaatacacgtcagcgtaaagcccggtttgaagatgatcgcaaacagtttgaaaacagttacctgcgtaacgagggttatgcgattgaagtgccggagctgtatgcggcgatcgatgagtccgccgtcactatcggtgaagtgaccgagcctgtggagggttaa

SEQ ID NO: 100257 - DNA, 702 bp, Enterobacter aerogenes
atggcactttctcctgcacagcggcacagccagcgtattgccatgcaacagcgcctgaaacagagccaggcggtggacagcagcgaaagtatgcacatcctgattgctgcgctggaaaaggacgtggcgcaggccagaagcattcagtttattccagatcgtgttgcgtttaagcgcgatgtgttgctgccgcgctggatgcccaccgttgaagcctatctggccagcgggcaggtctatgcaaacccggtactggcatggtgcgttatctggctgtttgacgtgggcgatctggataaggcgctggactgggcagatatcgctatcagccagcagcaggccacaccagaccgtctgcgcagcaacttccccacatttgtggcggataccatgctggcctgggcggaagagtctgccgggcgtggggaaagtattgagccgtatttttcacgcacatttgaccgtgtggctaacacctggcgcttacatgagcaggtgacagccaaatggttcaagtttgccgggctggagctgttgcgcggggaggatggccagaagacggcggcaggcgtggatgatgtggccacgctggaaaaggccgatcaactactggctattgcggagcgacattatttcagggttggcgtgaaaacagcccggcagaccatcgccgcacgtctgcgcaaattgacgcaggtttaa

SEQ ID NO: 100258 - DNA, 453 bp, Enterobacter aerogenes
atgtttagtggcaagccgctggattatcaggatgaaccgctgaccaataacggcttctggccggatctgaatctgaaagattttcaggcgcagcggtcactgcctgctgatatcgatgcggataccatcgcgcaggcgctgattgctgccgtcgcagaggtcaatgcagagctggggcgggttgaagctggctggcaggcaaagggatatgcccaggccacggaagtaccgggggtaagcatgggcgggctgaacagcctgtgcgcccagtacacaaaggctgtttttgccagggcaaaggcagatttactgggggagtttgccaccatcgggcggcgtgatacgcatccggggcaggaaagcctggaaacgcgtgccgggctattggcggaagcatcggtggtgatccgccgtatgaaaggacttaaacgggcaacggtgaaaaaagtatga

SEQ ID NO: 100259 - DNA, 507 bp, Enterobacter aerogenes
atgagccagacgcaactggaaaacctgaccgctttctttcaggcgaatgtcccgccgcgggcgatgcagtcctttgatagcgtgcttgatgaaatggaattcattcccgctgccagggatttagggctggggcagtaccggcaggccgttatccgttatgacgcggtactgagctgggcgcgtttcccgtaccgactttgcccgccgcagctgctgatgtcactgctggcagcatggctggacgaggcggatcgggaactgcttgacgaaatcggggtaacggaagccgatccgcagtgggatgtatctgtggaggatgaagaaaccgccaccgtagtgctgagcgtaccaatggcggaagaactggtgattaagcaggatgaaaacggcgctattccatggcgtggtgagcgctggtcactggttaatcctgaaatctggacggcgatccacgccagcgtttatggcgtggatgaagccggtgcgcctatcggggtggaagagtga

SEQ ID NO: 100260 - DNA, 708 bp, Enterobacter aerogenes
gtgatcgcgggtggcgagctgaataaagcgcaactggcggcgctgcgcgaggcactggcagcaatggagctgccgccgaagaagcggcagcggttgttgtggcgtatggccaaatacggcgttatcgccgccgcaaaacgccatgtgcgcaatcaggaatcaccggagggaagcgcctggccgggaaggaaaacacgccgtaaagggaagatgctgcgcaatatgccaaaactgctgcatatccgggaaatgccagaaatgcaggctgtgcggatttatctgcaggggggaggctaccggaacggggatacaccggtacccgcaggcaccgtgggttactcgcagcaaaatgggatgcgtgttcgtgtcagtcgtgccagccagccacggcaggacgggggcgcaaagatggccacggcggcgcaggcaaagaaattacgcgccctggggtaccgggtgcgtcgggggaagcgctggaaaaagccaaccctgggcgaaatcaccacatccatgccttacagccaggcggggttgctgatacgaaaactcagcggaaaagcggtgaaaacgagctggacaattgatctgcctgcccgtgtgtttctgggtatgggggaggatgaatttaacaaggcgctggcacggcagctgcaggccattggctttggctgggatgtgaatgcgcaggatatcagggggagaacatga

SEQ ID NO: 100261 - DNA, 1128 bp, Enterobacter aerogenes
atgacctggccaaatgtaggagtgaaccagctgaatcagctgcagggggaaaccagtgaggtggaacgctgcgtgctgtttgtcggcaagggcgcggtaaatgtgggtaagacgctggcggttaatactcagagcgattttgatgcgctgctgggtgaggatgacagcccgcttaaaagcgatgtaacagctgcgatgcgaaacgcagggcagaactggtggggatttgtgcatgtgctgccgtccgatgcggagccggatgcatgggtgaaagccgttatggctgcgcaggtatcgtgttccgtggaaggggtggtgttatcggatgatgtttccaccgcaagcgtcattaatcaggctattaccttacgtgccgatctgatcgcgaagtatggccgctgggtatggttcctgcttgctgtacagggaatgcaggagaaggaaagccaggcggattatctggtacgcgctgccacgttgcaggatggtattgcggaaaaagcggtgcagctggttccgcgcctgtttggccatgagcctggcgtacttgctggacggttgtgtaatcgtgccgtgaccatcgctgacagtccggcgcgagtgcagaccggtgcactgcttgatctgggtagcgatgatttgccggtggatggcaccggtaaggtgctggagctggccacgcttcaggcgctggaaatgcagcgctacagcgtgccgatgtggtacccggactatgacggtttttactgggcagatgggcgcaccctggacgtggaaggaggggattaccagtccattgaaacgctgcgcattgccgataaggccgcacgccgtatccgtctcctggctatcagtaaaatcggggatcgctcgctgaacagcacgccgggcagtatccaggcgcaccagtcgcttttcatgaaaccactgcgcgagatgtccaccgccgcgagtattaatggtgtggcgtttcctggcgaagtgaagccgccgcaggatggcgatgtggccattgtgtggaagagcaagaaagcggtggatatttacattgtggtgcgcacgtatgaagtgccgctgcagattacgatcaatctgatgctggatgccagcctggagactgccgcatga

SEQ ID NO: 100262 - DNA, 456 bp, Enterobacter aerogenes
atgagtaagcgtatttcggggatgtcctttgatgtctatctggatggtgatctgatccatatcgagaaaatttcactggatatcaccgataacagcgccgccgcgcagacgcgtggtgtgccggatggccatgtggacggtgatgtgtcggctgagggtgaaattgaagtcagttccaaagtgatgaaggtgctgaccgcaaaagcccgtgccgctggttcatggcggggcatcccggctgtggattttcttttctacgcgaaagccggcagcgaggaaatgaaggtggaaacgttcggcaataagctgcaggtcagcaacctgctggatattgatccaaaaggtggcacggtggccacgcacaaaatcaagtacttcgtgaccagtccgaagtttatcaacatcaacggcgttccatatctggagccggaagcgacggaaaacctgatcggataa

SEQ ID NO: 100263 - DNA, 294 bp, Enterobacter aerogenes
atgcaggactatgaaaaggggtttatcgccctggcggtgatgggggcgctgattgcgctgggcaagatgcttaacagcggggaaccaataaccctgcgcctggttgcggggcgtgtcattgtcggcagtgccctgtcagtggcagcaggcgtggcgttgtactttgttccggatatccacccactggcactggccgggtttggttccgcactgggtattctcggcctgaatggcgttgaagcctggctgcgtcgcaagggaattgattttttaggtaaggggggcaggaagtga

SEQ ID NO: 100264 - DNA, 342 bp, Enterobacter aerogenes
gtgacactgagcgaaaagcaacaacgatttacgtcgatgattgcgttgttaatccagtatgcaaatgcaaacggtatgcagttgacctttggtgaagcgtatcgcacgcctgaacaagcggcgctgaacgcaaggaaaggtagcggtatttccaatagcctccatacccagcggctggctgtagattttaatctgtttgtgaagggcgagtataaaacccgtacggaagattacctgccgctgggggaatactgggaaaagctgggcggtagctggggcggacgcttcaggtctaacccggacggcaaccatttcagcctggaacataacggggtgcgctga

SEQ ID NO: 100265 - DNA, 333 bp, Enterobacter aerogenes
atggacaagctgacggtgggtgtggtgatgctggccatgatggcgtttgcctgcggctggaaggttgccagctggcagcgtgacagtgttgatctggctatccgtaaaacagccactgccaccggcacgcaactggccagtgtggccagcgcatccgggcgaaagctggaagaaaagctggaggctttaaagaatgcgccaccgcgagaaattcgcacggaagtggttaagccggtgtttactaacgtgtgcctgtctgctgattttgtcagcatgtacaacgatgccaccgccagcacagaacgtgcgttatcaggaaaacctgaaaactaa

SEQ ID NO: 100266 - DNA, 210 bp, Enterobacter aerogenes
atgccaccgccagcacagaacgtgcgttatcaggaaaacctgaaaactaaatgcgccgtgcagctgccgcgcctgaagggcacgcagggtaaagacgcagcagaactgttaaccctttatctggaaatgtacggccagtgtgcggcacgtcataaccagttaattgatgaaatcaatttacgagagaatatattaaatggaacaaattaa

SEQ ID NO: 100267 - DNA, 258 bp, Enterobacter aerogenes
atggaacaaattaaattagttgtctgtggtacgcctgttatttttgagcccaatcaaacggcatacaacaaattcattaacgaaatggcaatggataataaagttgcacccgcacataactacctgacccgtattgtggcggcagaaagtaaagacgcgctggaagatattctgaagcgtccgggggcggcaattcagctggccggaaaagtaaatgagatttatgcgcctgagctggaaattgaagtaaaaaactga

SEQ ID NO: 100268 - DNA, 1968 bp, Enterobacter aerogenes
atgaaacagttagattttacattaagcctgattgataaattatcgcgcccgttaaaacaggtgcaaaacaatgtcaccggctttgctgaaaaatcaaatgcggcattcacgcgtattggtggcggtgtgctggcgctggcgggtgccgggatggccatcaaaggcgcattatcaccggcaattgaaatgtatgacgcgctgaccgatgccgcggcaaaaggcatcggtagttctgtcctgaaaaccgtgcagcgggatgcgctggcattcagcacgacctacggcgccagcgcggtggagtttgtgcaatccaccgaaagcattaacgcatccattgccgggctgaccggcaatgagctgccgaaggtgacaaaagtcgctaatacactggcgtttgccctgaaatccactgctgccgatacggcagaatttatggggcaaatgtatggcaacttctcagctgaggcggagcgcctgggcaaagtccagtttgccgagcagctggcggggaagatggtgtatatgcgcaagacctttggcacggaaatggccactatcaaggatttgatggaaggggcacgcggcgtggggactaactacggcgtggggctggatgagcagctggccgtgctggggcagttaagccgcacactgggaacggaagccagcagcgcttatgaaggttttatgacgggtgccattgatggtgctaaaaagctggggctgtcgttcactgatgccaccggcaaaatgttgtccatgccggaaatgttgatcaagctgcagggcaaatacggcaaaagcctggaagggaacctgaaagcgcaggcggaactggatgccgcttttggtgacagttccgccgtggtgaaacagttgtatggcaatgtggcgttgttacagcgaaatattacggagttgggcggggcagatggcctgcgacgtacccaggaaatggccacaaaaatggtaaaaccctgggatcgcttcgtggccatcctgcaggcaatcaagacggtcattggcctgacgctgatcccggtactgtatcccctactgaaccgcctggcggatatggggcagacttttgcccgctggatgcagatgtttcccaatatcgcccgtgtcgttgggtatgcctcgatggcgttgttgagttttgcagtcgtgggcgcaacggtaaacatcgttatgggtgtatcccaatttatcatgctggggctggcggggatctggcgtgtcctgtcctccgtcacaacaatttacacagctactttgtggctggcacagaaagcggtggttgtctggaatgcttctctggccgcattgcgggggattttgctggcggtaagaatggccgcagtattatctggtgcggctattaacttcatgagctggccgatcctgcttgtcattggagccattgccctgctggccgcaggctgttatctgctgattaagcactgggatacggtaaaagctgccgtgatgaataccgaagcctttaaggttgtggctggggtggttacatggctggcgggtatctttgccagcgcctggcaatttatcaaagatggctggaatagttttattgcacttctgaccggattttcaccgacgcaggcgcttggcggtatggcaagcggtattatctcaatgtttgataatgtctggcaggttattaaaggcggttttcttaaatcatggaactggattgtagggaagttaaataaaattcccggtgtggatatttctatggctgcagaaagcccgccgccgttaacgactaatacgttatctactggtggcgagttaaaaggtattgagcgcggcggcattagtaaatccattaacagtaataccaggtcggtaacggataacagcaagaaaattggcacggtaaatatttatccgaaagaaacgctttcaccgggtaaattaatggaatggcaggagcttaacggatga

SEQ ID NO: 100269 - DNA, 330 bp, Enterobacter aerogenes
atgagtgaaagcctttatatcgatttactgatccagaatggtgattttgttctgaatgtcggcaatgagcctgaactatgtaataaccggcaaagtattgggcaggatattgttcattccattctggaaagtgggctggcaacccgattaattgcagagcgaagcccgacaatgcgagccgatatttttacccagcttgaattactggtggaagaagatgaacgcattgtgcctggtaccgtggaaatcagtgaagaaagcccgaagcgattatgggtgacggccagcacttatgattttggcagtattgcttaccaggtggatgtatga

SEQ ID NO: 100270 - DNA, 1185 bp, Enterobacter aerogenes
atgacggaaaagccgcaggttgattttgaagaagtactgaaagacagcggaatgccggtcacagaagaagaggtgcaggcacgctttaacgccatcgtgactgatgaaggtctgatcactaacacatcccgtatgtcacctttctggcggttagttaccgcgatagtgactgcgccagtcatgtggctgaaagatgcgcttattgcggttgtgcttaccaatatgtacgtggcgacggctggcggcaagatgctgcgtctgctggcatgggcggtcaatgtgactgcaaaaccagccaccgctgccgagggggtgatccgcttcttcaaaaccgatgcaaaggctaccaccaccgtaaaggcaggcacgctggtacagactgagcgtattaatggtcgggtatatgtgttggccacggtggccgatgtggtgatcccctccggtgtggccagcgccctggtggcagtcaaagcaaccggaacgggcggtgcgtataacctggcaccggggtattaccggattttgccagtagccgtggatggtatcagtcaggtggccagtgaagaagactggctgacgaagccgggagccgatgaagaaagcgatgatgaactgcgcgagcgctgccgcaaccagttcaacctggtgggtaattatcacactgatgcggtgtaccgttcgatgattgcacaggttgccgggctgagtattgaccgcattttctttgagcatgaggcgccacgtgggccaggtacggcaaacagctatctgttgctggataccggtgtggcctccgcgccgtttattgatgctgtgaatgactatatcaacacgcaaggccaccacggccacggtgacgatatgcagtgttttgccatgccggagacacgccacgatctggcggtaagcgtatatgtaccgagcgtcagcaatatgacaaacgacgaagtgaacgcgctgaaatcgggcgtggaaaacctgatccgctgtgcgttccgtgaaaacgcggattttgatgtgaaaaaaacgtggccatattcccgtttctctttttcccagttagggagggaattacacagggctttcccgcagacggattcgatcgagttttcgttacgggacattaccagcgggcttgatgttccgcgcctgaattcgctgacagtgagtctgcatgatgactga

SEQ ID NO: 100271 - DNA, 591 bp, Enterobacter aerogenes
atgatgactgattttatgaagaaactggccgcgctggcgctgcctttctggatgagtaaaggagagccggcaaagctgctgaatgcgttgcgtcgtttctgggcagaggtatacagctggataacctggccgctggcgcagtttgatccgctgacctgcagtgaaccgatgctaaacctgatggcgtatgaccgtgatattccgcgcctgaatggtgagccgttgagcctgtttcgtaagcgcgtggcgtatgcgtttgtgaatgccgcggatgccggttcagtggaggggttcattaacatttttgaacggctggggattggatacgtagagctgctggagcgtcagccaggcattgactgggatgtgattctggtgcgcgtatcagacagtcagattgcagataacacgcagctgatgatccagattatccggcagtacgggcgaacctgtcgccggtatcagtttgaggtgattacgtctgacagcttgtgcattcgggcgggttgggatcagggtgaatatgtggtgtacccggcgcggattgccggagcgtctgccagtaatacatttttcaatgcgagcatgtaa

SEQ ID NO: 100272 - DNA, 2313 bp, Enterobacter aerogenes
atgtcgcaaaccgttatcacgctggcgtttgaacagtggaaagcacagcagggggaaacgggtgaagtcgtcctgctggatgagtttgtctttgccaacgtaccggggcttgatccggcaaaacctattgaccgcaaagaaaatataccaccggcaggccagatagtgcatcgccaggctgtctcgcgcaaaggcgtggtgaatgaaaacgccgtggtgcattccgttgtgctgggcgcggatgtgggtgatttttcgtttaactggattggtctgattaacagggcaagcggtaccctggccatgattgtacatgcgccagtacagcagaagctgaagacaaaagaagggcagcaggggaacgtattaacccgttcttttctgatggagtacaacggtgcgcaggctgaaacggcaattaatacgccagcggagacctggcagattgacttcaccgccagaatggccggaatggacgagcgccagcgcctggaaaatactgatatttatggcgatgctgctttctttggtgatggctggctggttggtaaatccggcaatcagtattttgtgaccaaagggacaggttatgttgccgggctgcgtgcagatctcgccgcgaatcaaaatattacagttgctgcaaagcccgttaaggtctggctggatgtgtgctggacgggtgggtttaccagcgcctgggaagtgcagaccaaagtcacggtggcggcgagtctgacagactatgagcagaacggtgtcagacatcatgtatttgcgctggccagtattgatgccagtggcaacatcacagatttacgccctaaaggttcactggttgagcgtgtggccgtgaaatcggttgataacgttaagccggatgcaaagggtaatgtggatacgatgcggggcgatgccattcaaccggtgattaaacttccgccagtggccagtggtaatagctcttatattaaaattgccaccatcaaagattgtggatcgagttccggctttttccaggtcattgtgtccggtaccgggaactatggcaggccagggcagagtattgaagaaataacagtaagctgccgggggattgccgccatgacggcggcaaacgtagataattatatcaaccacaaatctggcaataatggttctgattcccagttaagggttgttgttgccccgaacggaaaagccggggaatttaatgtatacattaatgcctccagtgggtggtggtctggcgtcataatgcgggtggaatccatggctggcggcggagtctatattaccggcgcggtactggatcgtaagatgggggcgaatgcctggacaacgaacaagccagccaatagttttatggccacacgctttaatatgctgacgagtggtgataccggcaccagtggtactaaaattccgttactgagtacagctaatacgtggtcggaaatccagacatttaaaaaagatattaatgttggcgctgttggggatacgtctgttatttccatggggggagcctcacagattatccgtgataatggcaagaaaggattaataatcaccagtgcatccggcgcattagccggtaatggtgcaggattgtatttgcgtccaaaaggtagcactgatagctcaatggaattagtcgggaatgctactggctggagtgtggataaatttaccgccacgacatttacggtaaatggtgcaaccagtttaaagggcggtgtcacggtaacgaatggggcaatagtttacggtgaaacgaattcggtaatgaatcgcaccgggacttatccaaacggaacattcgttaatggcggtctggtacgttcttttatatttggacgtggtgcctatggtgatacccgcggtgcgtttaccagcttatatattcaggaattggttggctcatacaatcaggctgtacttaacctgaatgggttcgggaatgataatagctggatattcagaaatgacggttcatttcattcgccagggcctgtctacgttggtaatgcgtggatggccgctgatggcaacatctgggggacgcgatggaaaacgggcggcgcttggctgtgggatgcaattacggagcagattaatggagttgtacgagatgtgcgcatggggagccccggaactatcattctgaagcgcaatggctggaactatgttccgggtgggtgcgcgtttaccgggtggtatgtcgaaggtgatgcgccggttgatgacactatccagtacaaaccgatccagatactggttaacggttcatggcgaacaattgcagggtaa

SEQ ID NO: 100273 - DNA, 504 bp, Enterobacter aerogenes
atgaaattaaaaaaactaacaccatatattccagaaaaaaaagaagccgagaatattctgtatctcaaagattcggatggtaatgactggtacgagtcacaggaaaaatttagcacaatacgattaaaaatcgctttcacggatgatggtattatccgcagtgcggattacgatgtttccgcattatggccggttaatatgtctgtagctgaagtggcaaaaaattccgttcctgaaggttttaatattaatggtggctggaaatataacgggcgctctattgttgcggcaccggtcgattatgaggctgaattaaataagttaatttccgaagcggaatctgttattaaaattctggatcgtgcggttcgtcttgatatcgcaacgaacgaagaaaaaaacagcctggctgaatgggaaaaatacagcgtattactgagccgggttaaacctgaggatttacctgaagccggattgccggagaagcctgcatatgtggcgtaa

SEQ ID NO: 100274 - DNA, 726 bp, Enterobacter aerogenes
atgtggcgtaaggcgaaactggcttttactgatgcaactggggcgattaattgttctattgtctccgcgcatccatggatttacgggctggggcagcagaccgaaaacggcgcatatcttagcccggtaaatgctgtttctttcctggcagaaaagctggctggagcgggcggcgatgcggaagtggtcattatgatggtgacaggccagacacatgacagtttcatgagtagccttaatcaactggttgacgtgttcccgtcaccggcctttacgcaggttaaacggctggcgcagtcggccgcacagctggccacggagaaaatgcaaatccctgccggtattagtaacggtctgccggtggcggtgccattgtcggtgccaaccagccgggcagctatggctgcggcggcggttaaaaaagcccaggaagcggcagggcagacgctggatatggattcactgcaaaagcaactggattccttcatgcaactgcgtgatgaaatgatgggagatattgccagcgggctgaatgaactgcaggggaaaagtgccagagcgtgggtatttacggccagcggaaatctgggcacgacactgctggaaatggtgaaagatatcccgcaaccgtcagctgtgcatactgctgcaatgatgctggttggcaataatctggacggcataaaaggaatgatacatgacatcgatcccgacactggcgcttaa

SEQ ID NO: 100275 - DNA, 552 bp, Enterobacter aerogenes
atgacatcgatcccgacactggcgcttaacggagaagccatcccgctgaaaaacatgcgcgtcaccctgacgcagcaattccaggataaagaccagagcggccagaccagtgccacgactaaatcagagcaggggatgaaaggcaaggaactgcgcgtatcaggcgaaattccgtttaaaagtcctgaggtgctgaagcgcattttcgcattggccagcgccaccggcagcgacggacagcggcaaaagtaccgcgttgcacatgaaatggcgcgggcggtaaattttcgtgaagcgacatttaccggcacgctggatgcgccgcagcaggacgggaaaatgtcatggctggtgacgtttaccctgacggaacatgtcagcgtgcaggaaaagcgggaggccagagcaaccagcaaaaccacagccaaaaaacagacgcccggtaatgccgggaagggcggcggcggtggacaggatgccgctgaggatgaagcaaaaatgacgtggtttgagcgcaaagtgctgaagcctgttaatgatgcgttggggtaa

SEQ ID NO: 100276 - DNA, 1680 bp, Enterobacter aerogenes
atgaaaccagttaaacggctttatctttccggggatgaaattcacctggcggatgccagcctggtgctggagcttaacagctgcggccgcggatttattacggcagagacgacgcaggattacaccgggaaactggtgcgccttgatgtgggatacagcgatttgatcctgaggtggtttactggttacgtggagcgctcgcaacccgctgaaaatggctttcagcgtctgtttgtccgggagcttgtcggcgtctttgataaattgtggccatgttcatttcaacatcctactttgcgcaccgtggccagctggctggaagaaaacagcgggatcgccgtaagcgtaccggatgccggttattccgataagccgatcccccactttacccacagcggcagcgggtatcagctgctgaacaatctgggcaaagcgtttggtatcactgattacatctggtaccagttgccggatggtggtctttatgtcggcggggcggaactggcattgtttgcgggtaagcccgtgacaatcccggctgaattcagccagggcgctgccggtggtaattccatgacattgccggtcattcagagcctgcggcctggtgtggaaatgaacggggagcgcataacccgcgtgcatctggaaaatgacacaatggctgtcacctggacgccacgcaataaagctaccggcgaacctttgcagaaaacgccattacagcgccagattgaaagccattatccggaactggctgcaggtcttcatctgccaaaattcgccagggtgcttgcccctacggaagaagtcagcagcgggaattttgccgatccgttccgtccgcgatatgccgtgaatgtgcagctgcttgatgctgagggcaacccggacaaacagacccccgcgtattcagccgtgccgctgccggtaccgatggccggaaatgatgccggtatgtaccagtttccgcctgaaggtaccctggtggaagtgggattcacaggtggcagaccggataagccatttatccgccagacggtgccggagggtaacagcctgccggatataaaaccgggtgagcagctgcagcagcagcgtgcggaagtatcacagcgtgttacgcaggccggtgactgggtgagacagaccgatcaggccattgatgaaacgtccatgaccagggttattaaagccgatgcggaaaaccgtgagctggtcagccgtgatacgacaattaaagccacggatagcacccgtgtgctgggtaccaccacgctgatggccggtgccattcagcaggtgagcgccggtgattatagccaggcggtgaaagggaactggctggccagtgtcagtggtaatgctgaaagcagaattgccggtaatcatacagtgcaagctggcggggatctgactgagcagatcgggaaaatccgcaaaagtgtggtggcgattcagcagcagataattgcgccggtggtgtggattggttccggcagtatcaacgtggcacagttgatgctggatacccttgacgtattgaaggagctggcggaacagacggccagccatacccacagtaacacgggtgcccccacgaatgctggcgctatccgtggcgctggccagaaagccgatcagcttaacggtaaatactcgccggtgattggccagtaa

SEQ ID NO: 100277 - DNA, 339 bp, Enterobacter aerogenes
atgcggaaagtttctatcaacggcgcggtttttatcttcatagccagaggcgaaaagcttaaggattcggactggctcccttccagcggactaccggacagtaagtatgttatatggccgcgcagggaagggtgggacgtgcgttatttggtgtttggcgctgagggggcggaatggctaccgataacaaaaacgctgtttgccgatgaggcggaagcatggcaagcagcatataagcactggatgaatcgaagtaaaaaaaccgcgccgccgataaaacatgacgattaccagtcagagtttcccttcagtcaccttgagtccaacaatttcttttga

SEQ ID NO: 100278 - DNA, 1491 bp, Enterobacter aerogenes
atggctcactcccggcacattaaggcagcactcaaggcaatccatgcggataaccctacagcctcctacgaggatatgagtagacacctgagggatatagctgagtgggagctatcgctaggacgctcagacctcttcgagccggacatgagagacatctatcgggaccagtacggagaacttggcgagagtcttaccgacgcactggctagtgaaccgctgagtatcgaccagcatcgttacatcaatgaggccctgaaggtactcaaggcttgcatgaggcgtatcgaagcgggagacagtcagtcactgatagattgcgtcgatcgttttgatggtattgatcggcaagatgaccaaacctctgtgtccctatctgttagcgcccctgaggtaaaaccagttgtcgcaccaagcgctagcactactagcaacgtcactgtagcgagcctctttaagcaatacgaagcggagaacgcccagaactggaagccagccactttaagggagaaccaatcgtctcgcgctgcgttaatcgaaatctttgactatctgggtctcaatgctgacgccaatacgataacacgcgctgatgtacttagagtccgtgatgtcctccagcagttaccaaagaaccgcaagcagcgcttcaaggatgccccgttggctgacttgctgggccgtgaagagaaaacagattgtctggatgtagtcaccattaataataaatatctcattaagatggcggctgtctttaagtgggctgtacgtaatgacctgattaaaaagaacatgactgaggggttggaactaaaggttccccagcgtaaagcctcagaggcccgtaacgctttctctacggagcaggtagggcaactgctggtcgccgctaaggcatactctcagaagacctcaggcaagccttatcactattacgttacggtgctggcggctatcactggtgcgcgactcaatgaagtggcgcaacttcaggtaaaagacgttagggtcactgaggccgggaccgtttatattcatatcaatgaagatgacagtagcctacccggtaagagcattaagaacgcccatagcgatcgctgtgtccctctggtagatggtgcctatggttttgtgttggctgactttatggacctgttagaagcccgtaggaacgctgggagtgaagatgctatggtattcgatggtctgcgtctcatgaagaacggctacggtgagcaggtgagcaagtggtttaacagaacgctgttacctaaggttctggctgaccgtgacggcttagctttccactcgtttagacatacggtcgccactcagttaaaacagcatggcgtcgagttggcttacgctcaggctattatggggcatagctcagggtctattacctatgaccgctacgctaaagaggttgaagtagaccgactagttaatgtaatggctgatgtttacaaggagattgtagcaaatggctga

SEQ ID NO: 100279 - DNA, 639 bp, Enterobacter aerogenes
atggctgagtattatccgcctgtatttagggctccgactttcaattgtccttattgcaatgtttactcaaagcacgagtggctacccttaaaggggactcgggtgggaattgctcttgatctatttactaatatgcatgtgtctgtgtgtttgtgctgctcagaagaggcatattggtgtgatgaacggttgataattccggcagcaactaatgtcgaaatgccaaatccagacatgccggaagactgtaagtcggacttcatggaagccagaagcatcgtcaacttgtctcctaaaggtgccgccgcgctcctacgcttgtgcttacagaaactcatggtccatctaggcgaaccgggagagaacataaacaaagacatcaagtctctcgttgagaaaggtcttcctccccgtatccaacaagctgctgacatttgtcgtatcgttggtaatcaggccgtgcatcccggagagattagccttgatgatgaccctcagttaacacatggtctctttaagttattgaatatcattgttgatgaccgcatcaccagacctaaagaaatcgaagcgatgttccagagcatgcccgaaggtccacggcaaggtattgaaaagcgggacggcaaagttggttga

SEQ ID NO: 100280 - DNA, 726 bp, Enterobacter aerogenes
atgaacattataaatgaatctggtgatatcacctccgtagttcttccagtggtcatcaatggctactcgtgggaatgcaatcaggaccgcatgtggaatctgaatgagctacataaagctctggacctcccgaagagtaaagagcccggtcagtggcgtactgaggttcgtgcatatcttgaccataatgcaaatttgcatcttgctcatggtggggccaatccgggcacttgggcgaccgaggaggcagctattgcatatgctatgtgggtctcgactgatttctacctgatggttatcagggcgtttatcgctctccgtaacaattcagtcgttaaggcctccaatctcgcaaagcagaacgcaaagatggaacctataagtaccgcagagtttgccaagttggattccttcggctggtccctcacggacaccatgaagaaggcgcaggtgacaaatcctaagctggtcatgaaggtcctcaagtccgggaagttccataacccgttcttttgtaggggaccacttcgcgatctgtcagattccggtatccggcctaacgtcaagggtaagcagagcggctactggaagactccagaaggcgacggtcggtataaccacgatggcgttaaggcacttcgtaagggctttgagtggttcgtggagaatcattctgagctggcccgacaggttgccatgctccctaagacctcccgcaaagcctga

SEQ ID NO: 100281 - DNA, 201 bp, Enterobacter aerogenes
atgagcaccactaacaccatgaacaagattgaccctcggacacctgaaggccggaaagccctccgattgatgaccgttgatacgagtgtactcatcgccgccttgggtcttccacctaaggaaaaccgtccgtattacgctaaagctaccctttgcatcatggcggttaacgctgggatgacccctaaagatttcttgtag

SEQ ID NO: 100282 - DNA, 411 bp, Enterobacter aerogenes
atggctatcgcatatcgcaaactgaacgttgaacttagcgacgacaaagagaccgtattgattcacggtcaagagatggcaaccaagtatttctgtgaggttgtcgtaacgaccatgctgaactctctcggctcccctggtggcaagaccgacgcgattcttaacgaactgcatgccgctggcctgaacgctggcgactatggcgcttattcccgttggtgggtccagagtaacgcagaggctcgtgctgaggctgaacgtcgtcgtaaagaagtccagcagtaccaagagcgttgggaggcgatgaccgctacccctgctcagattgccgctgagaaagccgagaaggctaaacgtgctgaggcgattaccaagcgcttctcccgtaaaggtgctgctttcggcctgtaa

SEQ ID NO: 100283 - DNA, 1164 bp, Enterobacter aerogenes
atggctgatttaaacattaaccgtatggacggcaacccgtctaaagtaaacactactgctgacctgcgcacccacttaacgggcgctgatggccgcaagctgcctaactctgtgttcggtaccgatgtgacccgtactgagactgttagccaagctgatggtcgtggtgagattctgcacgttggctacacggaccgctccggtcgtcctcaggccttcggtaacgatgtgcatgattacgtccaagcgctggagtcctctttgggccgcaccctgaatgatggtcaattaatgaatgacctgaacgacgccgtgttcccttgtgagcaccgcccgtttgcaaccctgccgactcctatcatccgtgagaccctgacgaaccgtaatgttcgctttatgtctaacggcgtgtacaaccctgatgtgaacgctccgactgctgaggtcaaaggtggtcactctctgatggttcacccgtcaatctctgacccggactccaaagagactggcgtgttagcctctgcgattacccatgtgtctgacttcgctatgatgggcggttggactggcaatagcctgatggcttcatctgccgacttggtagaccagtacctgcgcaacctgacctcctctgtggttgacgttctggtagacgctcctgaccttcagtcgcagcacgtaggcgaattgacaggcactcctcgtgagcaggcagatgacattctggacaccgtagcaattaacctgccgctgtatctgggtagctccctgtcggactacactctgctggtccctgagaagtacgaggcgattctaaaccgagcggcccaaaaggctggcttgtccgagattagcgaactggtcggtaccgctgtagctccttacactggtgatgaccgtggcgtcttcatgctgcctaagaaatacgcaatgctgtctttccgttctactcgtgaaggcgactttgtgaaagttaccgttactcgtgacgctaaccgcgctggttatgacgtcgagttagtcggtgtggttgacgtaatggcaactggtaccgttcaggttaagactggtgagttcaacactgagaaggctgcaagctatccgctgattcatcgtctggtattcgctagcgcagctagtgctgctgatgcaccagaagcctaa

SEQ ID NO: 100284 - DNA, 636 bp, Enterobacter aerogenes
gtgccgctatccgggaaccctccccggtggcgcttacgcttaccggggctaccgaccgaataccgaaccgtagcccggataaggcgctatgtgccgctatccgggaaccctccccggtggcgcttacgcttaccggggctaccgaccgaataccgaaccgtagcccggataaggcgctatgtgccgctatccgggaaccctccccggtggcgcttacgcttaccggggctaccgaccgaataccgaaccgtagcccggataaggcgctatgtgccgctatccgggaaccctccccggtggcgcttacgcttaccggggctaccgaccgaataccgaaccgtagcccggataaggcgctatgtgccgctatccgggaaccctccccggtggcgcttacgcttaccggggctaccgaccgaataccgaaccgtagcccggataaggcgctatgtgccgctatccgggaaccctccccggtggcgcttacgcttaccggggctaccaaccgaataccgaaccgtagcccggataaggcgctatgcgccgctatccgggaaccctcccccggtgacgcttaccggggctactaacaaaacagcagccccgttacaagatcacgatttaatcgcgtgttga

SEQ ID NO: 100285 - DNA, 375 bp, Enterobacter aerogenes
ttgaataagtttgagttacgtagggcggaaaatattcacagcatctacccgcggtacttttttgtcgggtggcggctaacgccttacccgacctacggattgtaccattgcgaactgaaactgccgatgttggttgccttaatatccccggtggtgctgccgcttaccggggctacagcgctttgcgatttggtagcccggagaaggcgcaacgcgccgcgtccgggaaaaacccttaaaaagttgcaaaccgataacagtatctacgacccgtaccattgtgaactgaaactgccggtggcctcaaaatccccggtggcgctgccgcttaccggggctaccgcactgtgcaatttggaattatgttgcggatag

SEQ ID NO: 100286 - DNA, 228 bp, Enterobacter aerogenes
atgcaattcactcctgatagtgcgtggaaaatcaccggtttttcccgcgatattagcccggcttatcggcagaaactgctctccctgggaatgttgcccggttcttcgtttcatgtcgtgcgcgtggcgccgctgggcgatcctattcatattgagacccggcgcgtgagcctggtattacgtaaaaaagacctcgcgttaattgaactggaagcggctacgcaataa

SEQ ID NO: 100287 - DNA, 642 bp, Enterobacter aerogenes
atgaagccgtatcagcgccagtttattgagtttgcgcttagcaagcaggttcttaagtttggcgaatttacgctgaaatccgggcgtaagagcccctatttcttcaacgccggcctgtttaataccgggcgcgatctggctctgctgggccgtttctacgccgaggcgctggtggattccgggatcgagttcgacctgctgttcggcccggcctataaaggcatcccaatcgccaccactaccgccgtcgcactggctgaacatcatgaccgtgacctgccgtactgcttcaaccgtaaagaagcgaagacccacggtgaaggcggcaacctggtcggtagcccgctacagggccgcgtgatgctggtggacgacgtgattaccgccggtaccgcaattcgtgaatcgatggaaattattcaggctaatggcgctcagttggccggtgtgctgatctcgcttgaccgccaggaacgcggccgcggcgagatctccgcgattcaggaggtggaacgtgattatggctgcaaagtgatttctatcatcactctgaaagatcttatcgcctatctggaagaaaagcctgagatggccgatcatctggcatcggtacgcgcataccgcgaagcctacggcgtctga

SEQ ID NO: 100288 - DNA, 591 bp, Enterobacter aerogenes
atgatggctcaacttaacaataccgaaaaaaatagtgctctgttagtgatggactttcagaagataatccttaataactttttgcaaccagagagcgctagaaacgtcatcaggaacacagcatcactcatttctactgcgcgagcagcaggtgtcacagttatctatgtcagtgtcgggttccgcaatggctatcctgaggttagccagaacaacactattttctcggcgattaaagccaatggaatttttataaacgatagtgaagaaacggcgattcatgaaggtgttgctcccgcagaaaatgaggtcgtcattgttaaacgcagagtgggagctttctcgtttactgaactcgatatggtgcttcgggcacagcgcatagaaaatttgatcattgctggggtaactaccagtggtgtggtactttccacggtcgggcaagcttttgacttggattaccgcctggtagtggcgagtgattgctgcgctgaccctgatcatgataagcatgtttttttagtcgaaaaaatcttaccccaacatgctattgttaccagttcatctgaaatatcagataattgggtataa

SEQ ID NO: 100289 - DNA, 1131 bp, Enterobacter aerogenes
ttgcgttataccgtagacaggcaattgttacgtgagattgtacacaataacgaatgtatttgcggcactcatattgaaaaagacagctcggcggcacggcttttagaggaactcggtaaacatgcctttgaccctgatcttaagcaccgctgggtgagggcgaccaagctacaacaaaaacttagcagccagcaactaccaaaatctagtatggaaaagttattagctgatgttgatgactacgaagttagtatgcaggaacttgaacacagtataaaagagttaagttttacaattgtcgagtctgacattgatgatattaagattatcgaacgtgccaaagatttggctaaatctcagtgtgaccaactcaaaggacagattcctcagttagagcagaatatccgtaaaaaagatattgatattaaagaaattgatcgtcgagtgagcagtttgtcatcaactcagcccaaggcccagaaagtccgcaacctgattctagcgacagacaagataactgagttatatgaggaagctatgaattcctcgcaaaagggagttgagcaattattattgaaaaagatgcaatcattgtttagtcaagttgcttttaatggctacacggttcaaaaggacaccaacagaaaatcagggagctttacatgggcaattgttgataatcaaggcaaacgtgcagccgctggtaacggatatcaagctatgcttgcgatatcttttatcgtcgcactaattgagttctcgaaggttcgcgcatataacaagcaacatcttcttacccctggtactattgccccatttattgcagactctattcttgcctttatcggtccagataacggtcgagagcttgttcgttacatcgcggagaaagttgagcagtcaatctttttgttttctcaagctcagtggactgaaacacataccgacaaaggaatacggcataaaataggtaaggagtataatcttgttcaacatacagtgcttaccaaggaagaatttaaaggccagtatccgacgcaacttacggtgaatggcgttaattatgaagttgttcgttttggtagtgattttgacaaagtaactatcgaggagattcctacccatggctga

SEQ ID NO: 100290 - DNA, 264 bp, Enterobacter aerogenes
atgaagaagcgcttttccgacgaacagagcatcagtatcctccgcgaggccgaagccggggtttctgcccgtgagctctgccgtaagcacgccaattccgacgctaccttttacacctggcgtaagaagtatggcagtatggaggtgcccgaggttaagcgcctgaagtcgctcgaggaagagaacgtcaggctcaaaaagctgcttgccgaagccatgcaggataaggaggcgcttcaggtggctctggggcaaaagtactga

SEQ ID NO: 100291 - DNA, 312 bp, Enterobacter aerogenes
atggacgcactagccaacggtcgcaggatcaagtgcctgacctgtgtggatgatttcacgaaagaatgtctgacggtcaccgctgctttcggtatttcaggcgctcaggtcacgcgtattctggacagtatcactttgtttcgggggtatccgacgacaataagaaccaatcagggcccggaatttacctgctgtacgctcgaacaatgggcctttgagcatggtgtggaactacggcttatccagtcatgtaagccaacgcagaacggatttattgagggtttaacggacgctttcgcgatgagtgactga

SEQ ID NO: 100292 - DNA, 1896 bp, Enterobacter aerogenes
atgtcgtgcatttttcactatccagtaccctttgcatgtctgtgctgcatgaattcgcatgatcgttcgaggatcgttttgggtaaggttctccagagatggcgggctcatgctcaagtcttgcaggtgcatgaaaaccactacgtaaagcgggcaggcgtggcggggatacgagcgcgcgctcgttactttgatactattggggctacaatagggcaggctaacttttatcggggaatacaaatgtcattagagtttgttaaggaacagttatcagattttatttcatcatcagaacctgaggtaatggctatacagggtgagtggggtatagggaaaacatacacatggaatacctttctgaaagaaaataaagataatattttatttaaccgatatagctatgtctctctctttggtatcaactctcttgattctttaaagtactctatttttgaaaatacaatcacaaaagagtatattggaaataaaccagatttagaaacagctacaaccaatgcaactggaattgtagaaatgttttctcgaaaagctgctggtttgttaaaagaagtgcccattgtaaaaaatttcgcctcaacacttgaatcgatgtcatttatgaccgttactaaaatgatcgtagtcatagatgacttagaaaggcgtggtaaaaacttagaggttaaagatgtattaggattagtctctcttttgaaagaacaaaaagattgtaaggtggttcttttacttaacaatgggtcaaatggtatgggagattattccacttataaagaaaaagtcattgatagagagataacttataatcctactccagaagagtgtgcctccatagcttatagtaacgatgttaacgtttataacttattaagcaagcataccatctcgctgggtattaaaaatattcgcatacttaaaaaaattgaacgcttcatcttgacattgattcccaaagttaatggtgatattgagacaatttcaaacgaagtagcgcattcattaacgttgtattgttggagtcattatgcattctctccagatggagatgtaccctcgttggaatatattggtaatataaaaaatatctatatgtatgatgataaggaggagggacagagaaaaagatggcgtaatactttacttaagtacggttataaaaaaacgaatgagcttgatgaaatcctaattgatatagttaaatatggatatatagatacaaatcgttttcaaatacaagttggtataagaaatgatgaaataatccgtgataacaagcgtggttctctgtttaaagcttggcagtactttcataattcatttgatgataatcaaagcgaggtggttgaaaaattataccgagctgtgctcgatggaatgaagtatgtaactccaagcgaactagatagcgtagtcggattgtttagagattttggggaaaatatcaaagcgacggagttaataaatagctttattgattacgctaacgatgcccttaatgaatacgtacaatctatttacatgaatgttcatccagtaaaagatgctgaattattgttgagaattaaggagtattccgctagtagagacatggaagattctatagaagacgtgcttacaaaattatctggtcagaatggttggtctgataggcacgaagtcaccttggatagtgcatcagaagacgattactataaattattcaaagatgttattcttaagggcggtgactcaataatagctaccgctcttaagtttggcagttatagcaatggttcagatagaatgaatcgtattggtgaaaaggccaaaaatgctgtaataagaatcggtaatgagtccagtattaataaaatacgtgttaagcgctatttgtga

SEQ ID NO: 100293 - DNA, 1053 bp, Enterobacter aerogenes
atgatgatctttaagtgtcgttttatgcctttagacagttcatttccgcatcatggtatgttccgtcaaacggaggacgatgaatggcaagttaatctctatatgctgttcaaaaaactgcccaaaccgcggggttcgagagccatttggtataaaaccagccaaaatatggttcataaactaccgagggaaatgtttaacaaggaaattcgtgagattggtgctgttttccatgacgaaattgataagaacacatggatttcagttcgttcggccctcgtgttactgacctatggctcccgaaatcacaagcatcttgagttagtacaatgggttgagcgatacaccggggtcaatctccctcgactaaaaggcttaagtcgtagagagacagtctttggacgaaaactccttgaattcattaaaaaagagctagttgacatcacgtatggtgactatgaattgcaaactcagtgccgcatgtgcaacgggaaatactatgtcgatttcacagtaaagcattactggaacggtaacgaagatagcaccaagtttcacctttatcttattgaatttgatgaagaagaacacgaacacttccaaaacaaactagccgatttagctagggactcagaaatcaaaaaacaggagccgaaagcaactatcatcagggtgaaacacaacgaatgtgatgactggtttgatcttgtacgttacaacaatgggctaattggttttgaacaagctcttttattgggaatttctgctgccagccgtaatgtagatggcgacagaatcatcattgattcaacatctgccaaaaatgcttatgacgactccttgaaccggagtgcctggttgctttcctatgagaaacagccgttgagagggatcgaggaagctgctaagcgatgtggaatccattatgaaaaagcacgttcaaatacaagcaggcagttgagattatcacttgagtcgttcagctctaaactctaccgctggttacctgatagctcagccgaatacgtccttcaaaacctaaaatcagactga

SEQ ID NO: 100294 - DNA, 288 bp, Enterobacter aerogenes
atggccttactttataacgtgaatgccttcgcagaacctgccatcaatgtctggctccgttgtgctaatggcattcatgcaacgattaaagatgacgtactgactgccgagggagtgatgacactgccatttgagcacacggaaaacgaaaccgaccaacagataacgttggtcttctccgacgctcatactgaagcaaaagtacaaatcagatatagaggaccagcattctatctcagagacatggatggtagatgggctccatgtatagcgacaaaaataccctaa

SEQ ID NO: 100295 - DNA, 210 bp, Enterobacter aerogenes
atgaataattcttgggaggatggctatttctctgttcggggctttggagttctggccttaagatcctttgaacaacaaaaccgggaacaagcagtactcacgttcagtaatggcgatgtgagagccaaaattcagacatgggtcaaggataacgtcattcacttctatctgtgggatcaaggcggctggaagtcttgcgactggcagtag

SEQ ID NO: 100296 - DNA, 204 bp, Enterobacter aerogenes
atgagtcgcaagacacgtaagaagtaccggactagtgttcagcaaacgttttgtgggaacgaccgttccaaaggtgttttcaagggtgtggccaagtttctactcggtcaattcttccgcgaaatcctttcggaggtctttcattctgaagaagttgcttccgtctggtcatccattatggatttaatccaatggaggccttaa

SEQ ID NO: 100297 - DNA, 960 bp, Enterobacter aerogenes
atgataaacacaaaacgttcccctagtcttcacaattcccccaagctttaccctttgaaccaatcccctcttttcaaattgaaatcaaaaaagaaactgctagaaatcattgggttatcgaaagctcaagctgataaactcatgctagattctgcgtataaagaattcgaaaacgatgctggaagaaagattcaagaaccaattcctcagctcaaggcggttcacaagaagatcggcgttttgttaagcagaatcgaattgcccccatatcttcactccggtcggaagaagcattccacgctaactaatgcaaaagcacataagcaagcaactgaacttctgaagctcgacattcacaaatttttcccctcgactcgggctgcaaaggtttacaaggcatttgttgagaaatttgagatgtcacccgatgtagcttatgtaatgaccaaccttgcaacctttgcaggaaaagtgcccacaggcagcccgataagtatggccatggcgttttgggcaaacagagatatgttcgacgagcttagcaaccttgcgacctcaaacagcttagtatttacggcatatgttgacgatgtagcgttctctggttcgaaaatcccaaaaggatttgctgcccaagctaaaaagtgtattcgttctcatggcctcacctctaaagacaagaaagagcgattttatccatcatcagaagggaagctgcttacagggattgttattcaggatggagaacttaaggtacgttgggcacacagtgattcaatcagaaaagaattcgccactttggctgaagcaacagacaatgctgcaaaaataattcatctagaaaagctagcaggcaagcttcatgcagccggtcaagttgacttcagacagaaagacagagcccgcttcttcactcagcaactaaagatagccaaaaagcaatctactcaaggcagttag

SEQ ID NO: 100298 - DNA, 204 bp, Enterobacter aerogenes
atgaaatacagtttagataccgttggcagtattaagagagcagcacatgatcatgaacttcatgtctttttggtcggagatgacggctcacagcacaactttattattaaagtgaaaggccgagagataagcagccttacactcaaggacattgaagcaatggcaatagagcacgcgcgtcaaagctttgctaattgcaattaa

SEQ ID NO: 100299 - DNA, 255 bp, Enterobacter aerogenes
atgctcaagcgcaaacagctgcagcgcgtactgctgccgctaatctctctgatactgttagccagctgcggcagcaggcaaaaaaccttgccacccgcctggacgccgcaagccacaccgcaagtcttgccgctaccgtcagaagcaaaacaaccggcgccaccgccggagtgctcgccgacatgcttggaaaccttgcagaagaagctcgacggtatgctgcaatcgctgacgaacgctacacagcaggaatga

SEQ ID NO: 100300 - DNA, 270 bp, Enterobacter aerogenes
atgaccagaatgagcaccatatatagcagactttcatacggcaccgggaccgcactgacgggctgcggtgtttccactaaggcatatgccggggcagtcaaaacagaggtatggattttggccgacaaaatagcggggctgaccctgagtgactgggcgatcattgtcggtattgcatgcactgtcattacctgcggggtcaactggtattaccgacgaaaggaaagggaggacagattgaatggctatggcgtcaaagttgaggaataa

SEQ ID NO: 100301 - DNA, 990 bp, Enterobacter aerogenes
atgtacgcgaatcgaaaggatttatacggtcgcttagaagagatgcgtggctcaaaagtgatatgttttgttaccggtgacaaacccggtatggaaacccagattcatagcgacgtatttgactactttgttaaccatttggacatcctcggcgtagttcccaaaatcagtttatttatgtacacccgaggcggagataccttaaccgcatggagtttaataaacctgatccgtcagttttgcgatgaacttgaggttatcattccatcgaaatgtcttagtgccgggacaatcatgtcgcttggagctaactctatcatcatgaccaaacaagcaacgttaggtccgattgatccgagtataacgacccagctcaatccttcagtggtcattaacggtcaagagatcaagctcccagtcagtgtagaagacattaaaggttatttagctcttgctacagatgaacttaaaattactgaccaagagtctctagcccagttgctgctttcgcttggtgaaaaagtgcatccattggtcttgggtaaagtgtatcgttcgaaatcccagattcagatgctggcatcgaaactgctgtcttaccaaattgatgatccagaacaaattacaaaaattgtcaatttcttgtgcagtgactctggaagccatgactatactataagtagacgtgaagccgaaaacgagttaggcctgaacattgagaagccaggacaggaattgtatgagcttatcaaagagatatacgaagatatcaaagaagaattaaaacttggggaaccttttgtccctgcggcgttcttaggacaaagccaggaagctgcatacagtcttccgcgtgttcttgtcgaggcgaaagaatcttgttcttaccagttcagaacggacggtacggtaagaatcgtcaatgatgcaggacaattgtccattcaacataatgttaccggtgaaggatgggggaaatttgatgactaa

SEQ ID NO: 100302 - DNA, 351 bp, Enterobacter aerogenes
atgagagatatgtacgaagtaatggaccgttggggagcatgggcggcatccgacaatagtggtgtggactggcaaccaattgctgctggatttaaaggtctactgccgcacggtaagaagttactcctgcaatgtgatgatgatgaagggatcttgattgatggctgtgtcgcacgcctaaagaagtataagccggacgaatatgagttgattattgctcacttcgtctttgggatatctttgagggcaattgctaagaagaagaaatgttcagatggcactacaaggaaaaaactccaaacagctcttggatttatcaatggcgttatgtgtatgatagttcgacaataa

SEQ ID NO: 100303 - DNA, 984 bp, Enterobacter aerogenes
atggcccgcatcagaacagttaaacctgaattctggacagatgagaaggtggtggaatgttcaattccagcgcgtctcctgtttatcgggttgttcaacttcgccaacgacatgggatgccttgagcgttcgccaaaacggttgaagatgcaaatcttccctgcggacgcgctcgattgcgaaccactaatacaggagctgattactcatggattactcactgagtattcagtgaatgatgtctgctatttgcagattaaaggtttccttaagcatcaaaaaataaacagaccttcggcctcaaaaatacctcttccgccagaattcactgaggctaaggcaggaaaggaagaaaagagagcgcctaatcaaggagggctccatgaggactcagtgaatcctcatggaggactcactgacggaaaaggaagggaagggaagggaaaaggatcaaaccccactctctacgcgcacaagggaaatgtttttcaggaacctcaatatttgcaaggtctggatattccgatcgggaaattcactatgcacgacctttggctgccgtcacaggactggccgagactggctgctacctggggaatagcgcttcccgaaccggcatacctgccgacagagctggcagagttcaccgcgtactggaagtccgaggggaaagtgttcactcaggttcagtgggagcagaaatttgcccgcagcgtgataaatgccagagccaaatccaaaccacaaccagcaaccggaggtaacggcaatgcaagaattcaatcagttaacaccgcatcccgggcagtccagcaaattcaggaagccagagaactctgggagaagcaacgcggacttgctggcggcggatacggcatggcggctatggacggtcatgggagagatattctcgaaccggtggacccagaagaacggggcggcgccatcggatatgtggattgcccaaattggatcgatgagtga

SEQ ID NO: 100304 - DNA, 429 bp, Enterobacter aerogenes
atgatgaaagtgaaacacgtttctatgctgctgctggcactcagcgcagccatcgcgattggttgcagttcaccagcgcagcgtatggccgagtgcgaagcacaggggatcagtaaagatgcctgttatattgcggaacaaaacaaacaggctacggtgaacgccgcagcggagaaacaggcgctggaaaatgcgcaggctttatatcccgtgcagaaagcgcaatccagcaaaaaagtgaagatcttcaatggtatgaagctggtcacaaactcaaccgggctgacagttgatggcaaacccgcggccttagacgaaagcaatgctgacgcgaaaacctattctcagggtttatacgtttttattgtctaccaatcaggaaaaattgccgtcatgcaggactgtaaatttttaggctacgccaaatag

SEQ ID NO: 100305 - DNA, 342 bp, Enterobacter aerogenes
atgattatggaaagtttcaaagaacaacgcattgattctttagtggccatgaaggtattggatgaagggattgatgtgccggtatgtcgaagcgcttttattttggcaagcactcgtaatcccagacaatatatccagagaagaggccgtgtccttcgaaaatctttggataaaaatgaagccttaattgtggattttgttgttcttccattaccgggagtagtgaataatattagtcaaaatttacgacgtgcggagttgaaaagaatagatgacttcaagttaaccgctataaaccccgaagagattgataaaaaaatcatcgaattaggactctattaa

SEQ ID NO: 100306 - DNA, 684 bp, Enterobacter aerogenes
atgaaactaataagacttgagataaataatttccgtcaattttatggaaaacagtctatagatttcgctgtagatcctgagcacggtgttacactaattcatggtgagaataatggtggtaaaacagcgttgcttaacgcgcttcgttggtgcctttatgaggaaaccactgaaaacttactcgatcctaaaaatcttcttaataagcatgcagaatctcaaggtaagaatactttcagtgtttctgttcaactagaacatgaaaatcgcttacttgacgttcgaagaattcaagataagaatagtggtagcagtaacttacatgtttatgaaattattgatggttgctatgcagaaaaagctgaagaaaacccgaatacgttaatcaatacttttttaccaaaagaaatgtctcagtactttttctatcaaggcgaaggaacaggtactttaagtagtcaaaatgatttctctcacataaaagatgctatcgaaaaagttttaggcctaacggttgctaaaacaacactaagacacttgtctgccgttaagataagttatcaaaaagatctcaaacaatatgatacaaacaatgaaattgatactttattgacaaacaaagataatttagtttcaagtttagaacgtgacaagatgcttctggaaaaaaagcaacttgactaa

SEQ ID NO: 100307 - DNA, 510 bp, Enterobacter aerogenes
atgttgctcttagctggtttgcatggtgttgaacttgaaggcgttgatcaccagatctcaaataaattgagtactgacttcctaacaaccacgatgtgggaattaatttctcgtaaaaacgctattaagaaggtcttcaatggtggttctacagaaggatggggggatgaggagattgcaaacccagaaatttataacaagattggtaacgtattaattgatgtcagagacggagtttccagcttcatttcaccgtcttggtataatctaaagcaacatttacttcaggccttagctaacgatacaattaacgatattgaagatatcttatcatcagagtgccatatttctgagcatgctaaaagtcatgcttcagtcttgatgctagagaaaaaatttggtgatataacgttcgccgataaatggggaaagcagcagattgatgaacgcagttcattactcctaagtaacgcatggcgcaatcttactaaatggcttgattgggagtaa

SEQ ID NO: 100308 - DNA, 249 bp, Enterobacter aerogenes
atgactgatgccgttctgttaggcgaaggcttcaccctgatgttcctcggcatgggcttcgtgctggcgtttctgctgctgctcattttcgccatccggggaatgtctctcgccgttacccgtctgttccctgagccgcctgccgcgcccaaagcggcacctgcggccgtcgcgcccgctgacgacttcgcccgtttaaagccggcgattgccgccgccattcaccaccatcgccgccttaattcttaa

SEQ ID NO: 100309 - DNA, 681 bp, Enterobacter aerogenes
gtggcagtgcaggtgcagggtgacgtcatagcgttttttgatttcgctgaccagctcaaaggcggcatgcggggtgaggatgccggacatgtccttgatggcgatggagtcgacgccggtctccagcagctgttcggtgaggtcgagccaggtctgcagggtgtgcgccgggctggtggtgtagctgagggtaccctgggcgtgggcgccgtggcggcggaccgcctgcagggcggcctgcatgttgcgcgggtcgttcatggcatcaaagacgcggaacacgtccatgccgtttttgacggcgcgctcgacaaagcgctccaccacgtcatcggcgtagtggcggtagccgagcaggttctggccgcgcagcagcatctgcagcggggtcttgggcatcgcctttttcagctcgcgcaggcggacccacgggtcctcgccgaggaagcggatgcaggcatcaaaggtggcgccgccccagcattcgagggagcggtagccgacgtcgtcgagcgcagccgcaacgggcagcatatcgtcgagacgcagacgggtggcgaacagggactggtgggcgtcgcgcaggacgacatcggtaatggcaacggtcatgaattcctccgtgaattaagaattaaggcggcgatggtggtgaatggcggcggcaatcgccggctttaa

SEQ ID NO: 100310 - DNA, 192 bp, Enterobacter aerogenes
gtgagtgaaagcgatgcgcagcgggttgccgacgccattaagcaacaggcgctggaaggggtgaagtcacaacactccttcaacggtaatgcgagcgatcggtggagcgaaacgatggaagcgaaggatgctcgtctgtttggtaatgagctggctggcgcctatctggacggcctccacgggataaaataa

SEQ ID NO: 100311 - DNA, 1218 bp, Enterobacter aerogenes
atgacctcactcactgtcaggacggttcagtctctcatcaaagcaggagaggctggtaagtttggagatgggcgaggcctgtatctgaaagtcccaccaaaaggtgaggcgtactggatgcttcgatacacaatccactccaagagacgagaaattactcttggtaaggtatctcttctgtccctgtccgaagcacgtagtctcgctgaggatactcgaagaaaagttgccaccggggatgatcctattgctgagaaaaaactcaatcgccctaagcaactgaccacagtagatggactgtttgaagactggcacaaagacctcgttaaacgattaaaacatcctcacatacctgaacgggtttaccggaaagatattgcccctactataggtagacttgccttggtaaaagttaaccccctcgatgttcggtcgatcctgcaaaaaattacagatagcggaaggccaaccatttcaaacgatgccctactctacatgaagcaactctttgaccacggcattaagcttgggctgcttcagagcaacccagcaatggcgttcaaggtcaatgatgcaggtggaatcgaaaaaagcagagaaagagcattaagtctggaagaaattggtcaggtgtttaaagttttcagagaacactctgacagcttctctcgtgataactaccttgcctgtgccctgctactactccttgcagttcgcaaaagtgaactaaccgaggctccttgggcagaattcgatttggatgagaaaaaatggtctttacccaaggaaagaagtaagtctggtgtaggaatcgtcatcccgctttccccgctcgctattaagattcttgaagagctaaaggtcagagcttttggttctgattatgtattccctaaccgcagggtgagtacgtcgaggcatatgggaaaagataccctcaacagggcgatagccaagctattcggggtagaacctggtaagaagaagcaaccacctaatgtaatgggaaatattgaatatttcactgtccatgacttacgaaggacttgtagaagtttacttgcatcactatctgttcccccacatgtcgcagaaaggtgtctgaaccacaagctgaagggtgtagaagctatttatgacagatacgactattttgaagagaggaaaaaagctctttatgctctttcagatttaatgtgcaatttgatattaccatga

SEQ ID NO: 100312 - DNA, 2163 bp, Enterobacter aerogenes
atgtcagatatcaccgctaatgtcgtcgttagtatgccgaatcagctgttcacgctggctcgatcgtttaaagctgcgtcaggtggcaaaatctatatcggtcagattgatactgaccctgttaacccagccaaccaaatccaggtgtatctggagaatgaagatggttcccatgttccagttgcgcagcctctcataatcaatgccgccggctatcccgtttacaatggtcagattgcaaagtttgtgactgttcagggtcacagcatggctgtgtacgatatgtacggcacgcagcaattttattacccaaacattctaaaatatgaccctgaccaactaagggttgagttgagtggccaaaatggtgcatccatcgttggactaaagcagggaggaaaggtccaggatgcactgccagatgtctatctacctggagagggagtgttgattcagccggcatcttttattagtggaattcaagccgttgacatgaccgctaagttacaagccgctatagacaaagcaaagagtctcggggtggggattgatacctgtattaggtctatttatggcccagcgccttctgggtatgtttatgtgacaaagtcatttgatatgacaggacttaagtgtgtaaaaggatttctacctatagcagttataccagaaactttcacacccaccatgtttactgctgaatcaccgcagcgcgggatagtccttaaaaatatgaatgcccgctatgattccagcgggaagcaattcggattttctaccgctgtaggtcctgaatttgatggtcttggcgtgtatgggttgagggatatgccggagaatatcatcggtatggttcacacaactgcgtacaatcactttaatggtccagtttgggctcgtcgttttgccactggaatttacttggcaaatacctatgacatctctattgctgcgcaatgggcagtagttgatagcggttcaatgaactatcccccattaatggttggttcatacccagctgcggatgttgtcgatgagtctaacagcatcacattccctcgattgctattacattcaaataagtatcgtgatgcggaaattattggcagcaaaatcaatgtaatttctgtccatgctgaggactgcactattggcagtattaccggcatgaccccacgaggtttcgatcagttcgctcccggaggaatcgcttctctggtctttgctaccactggaggaagtcttgggaatatcaactacaccatcaacaacgcatccacaacgcatggctgtctgttggtaaatatgttaggtacccatgttgatcaggtttatgcggatagaccgattattgatataaaagttagtgatgtctatttccttggtcgtggcggcagcgtaggttccgtttacacttcaggaagtttttatactgatggagggtcaaagattgtaatcggaagcgtgattgcaggcggaaacctatccaacaagaatgtcagatctagcatcactcgggcagacgtaacgggaaatgtcgataactccggcactattgattatctgacatgcggaggaactttcacgcaggaccagtttggcatcataaatggaggccaagtaactggagcggccacactctcagcatcaagtgaaataaccaacgttacgtttaatggtgcattcacatcctcagccaccctcccacgaatgaagcgctgtacgtttaacggttcattcaccaacactggagggggaagatttgaaaattgcactattcctggatttgatatcaagtcagcagttaacacacctacctacattgattgcactataacgggagcagtcacagggacaactgcatccggtaaagctatattcaggaacagtgcagtaggtagctacaattttgataatggcgcttctctcacggtcagggtgttcaatggttcgtgcggagggatatccatgactggaatttcatcatctgcaattattcttgatggagtttcatgcaccgctggaaacagcatagcgggatggtcgattccttctggaactggagttgggtttggcaccaaaaccataaacccgtacaccgctggaggctggatgttaatcagtaattctggtgtggcaacgtggaaatctgtgcaatggtag

SEQ ID NO: 100313 - DNA, 264 bp, Enterobacter aerogenes
atgtacagcaaatacgatgaggcgcagttccacttgaggcttacgcacgaactacacgcgaagattaagcaacgcgcgaaaatgaacaaccggtctatcaatgctgaaatagtggctacgcttgaggagtcacttggtaggtcttccccggtttctggatttagggatgaggcagaaagagaggctgatatagtttcgcaagaaatccagaggatggtctttgaaaagttgaaagaacatctcggaaacaaaaaacccacctga

SEQ ID NO: 100314 - DNA, 969 bp, Enterobacter aerogenes
atgacggacaaaaaaagcagtgaaggaaaagcaaagggtggcgttgcgcgcgccaaatctctaaccaaagagcagcgttctgaaatagcaaagaaggccgcggccgccagatggaagagtaagattctcagggcaacgcatcgcggtaactttttagatgattttggcattgatgccgaatgttatgtgttggatgacgagtcgaaaactgtcgttgttaccaaaactggattatctcagttgctggggattggcgagcacgctagggatttagatcaactgctaggcgctcagtatatgagcaaataccgagatctagaattgcagcgaaaaatggaaaatccctataaatttcaattaacttcgaagtctaaaactgttcatcaagcgttgggatatgacattacagcaattgttgatattggcagggcactaatagaagccaaggataatgacgacctgccacaatcacgtttaaaggctgcaacttcagcacagaaacttattaatgcctctgctaaggctggaatcaaaggtgttgcgtatgcgcttgctggttatcgcccagaggtgcaggctgtcattgacgagttcaaagcgtttgttcgtgaagaggcgcgtcaatatgaaaaagaatttccagatgagttatacgaggagtggtatcgactctacggactaagcaggccagaaaaaggaaggccgattcgttttggtcagctaaccaacatgcaaatatataccccgcttgcaaagagcaagggtagaattctcgaacagattcgagctagccgcgacgagagcggaaaacaatctgataagctgcatttgttcctttctgaaattggtgtaaaggctttgcgtcagcatatcggtaaacttcttggtgtcgcagcaatgagcgaaacaagggaggaatatgagaaagggatacataaggttttcggcaagatgaaggctgatatttaa

SEQ ID NO: 100315 - DNA, 672 bp, Enterobacter aerogenes
atgctaattcatcagattgccaataagcacctcagtaaagcggtgtatcaaaagggtggtgatggcggtgccggcgcacaggcaaaggtaacgcagaagggaatcgatctgcagcgtgagatgtggcagacgaacatgcagaatcttgcaccgtttacgccacttgctcagcaatatgtttcacagcttcagggattatctacgcttcagggtcagggtcaggcgctcaacgattactacaactcgcagcagtacaaagaccttgcaggacaggctcgttatcaatccctgatgtctgcagaggcgacaggtggccttggttctaccgcaactggtaaccagttagcagccattgctccaacgctcggacagaactggttatcaggtcagatgaataactaccagaacctggcaaatatcggcctgggtgctttaactggtcaggctaacgccggccagaactacgccaataacgctagccagttgtatcagcaacaggccaacgcagcagcggctaatgccaatcgaccctctggtctgcagtctgctcttggtggtgcaatgagtggcgcggcttctggagcaatgattggctcggttgttcctgggattggtaccgctgcgggtgcaattggtggcggaattatcggcggtcttggctcacttttctaa

SEQ ID NO: 100316 - DNA, 480 bp, Enterobacter aerogenes
atggaaataaagctcatcgataacccggtgaagcttgcagaattcctcaacaatccagaaacaacaggcaatatcgtagatagcggtgacaaatactacatcaagcctgatgcggtatatctcggcatctatgaaggcgttctgctggttggcgtccatgaagttcgtaacttctggcacagcgtagttgaatgccacgcgtgctacctgcctggatttcgcggtgaatacgcccttcaggggcaccgcttattctgcaaatggcttctccagaactccccatttctgaacagcatcacgatggttcctgataccaccaaatacggtcgcgcgattatccggcttcttggtgctacgcgcgtcggtcatctcgatgatgcctatatcagcaatggtaagcccgtcggaatcacactctatcaattacctcgctcgaaatatgaggatctcttaaatgctaattcatcagattgccaataa

SEQ ID NO: 100317 - DNA, 954 bp, Enterobacter aerogenes
atggctgatgatggattaaaagaaccggtcatcattcaggctactcgcctcgatgcttctatccttccaaggaatgtcttcagccagtcatatctcctgtacgtcattgcacaaggcactgaccttggaaatgtagcaggaaaggctaacgaggcaggaaagggggcttatgatgctcaggtgaagaatgacgagcaggatgtcatcctcgcagaccatgaatcaaggattgaagccgctgaagcaacactcattaaccatgagcagcgcatcacagcagcagaggctacacttgcagaccatgaaacaagaatcactgccgctgaagcggagttggtcgaccatgagacaaggattaccgcaaacgaggctgagttagctgaccacgaaactcggataactcagaacgaatctgacatcaacgggcttgatacaaggctaacagcagcggaaggaaacattacgacgctgcaaaccacttctgctaatcatgaaactagaatagacgctcttgagtacgccacaacgcgcaagaaatctgaggtggtttacagtggcatatctcttgtaatcccaactaccggtgcaaacctcgttactttgcttaaagcgcttactcctaccagcgggacacttgctccattcttcaacacaacgacagacaagcttgttgtttacaacgaaaacaagactgtcaatttcaagttgtcattgattgggtcatggcctggcggaacgacaaaccgctctattcagttaacgttctccggagcagtacctgacacgttggttaacagcaggaacgtagccacagccacagataacgtattgctggcgacgttctttagcgttgatgtcggcggattccttgccactaacggaagcaccatgacaattcagtctaacggtgcagcattcacggccacaaccatcaaaatcattgcggaacagtaa

SEQ ID NO: 100318 - DNA, 1419 bp, Enterobacter aerogenes
atgccgattcagcagcttccattgatgaaaggggtcggcaaagacttcaagaacgccgactatatcgactatcttccggtgaatatgcttgctacgcccaaagaggtgctcaacagtaatggttatttgcgctcattccccggcatagcaaagcgaagcgatgttaacggtgtatcacgtggtgtcatctacaacactgctcagaatgccgtatatcgcgttttaggcggtaagctctataagtctcagagtgaagttggtgatgtttccggtagtggcagagtatcaatggcatttggccgcacatcacaggctgtatgtgttagcggttcggtgattgagtatcgctatgacggaaccaccaagactatcgacaactggccggctgattctgatttcactcagtatgaattaggttcagccagagacatcactcgcttacgcggtcgctatgcctggtcaaaagacggatctgattcatggttcatctccgaccttgaggatgaatcccatcctgacaggtacagcgcagagtatcgcgcagagtcacagcctgatggaatcattggcattggggcgtggcgtgatttcatcgtatgttttggttcgtcgacgattgagtacttctcccttaccggaacaaccacagtaggcgctgccatttatgtggctcagccatcattgatggtgcagaagggcattgccggaacctactgcaagacgccatttgctgattcctacgcctttatcagccacccggcatcaggcgcaccatcggtatatatcatcggatcagggcaagcgtctccaatagctacggctagcgtagagaaaattatccgttcttattcagctggacagttatcaagcgcgatcatggaaacaattaggtttgactcacatgaaatgctgataattcacttgccaggtcatgtattagtatatgacgcatcatcaagccagaacggaccgcaatggagcattctgaaaactggtttatatgatgacgtatatcgcgcaatcgaccttatgtatgaaggcaaccagattacttgcggcgacaaactggaggcagtaactggtcaactgcagttcgatatcagcagccagtacgataagcagcaggagcacttgttatttactccgctattcaaagccgataatgccagggtatttgaccttgaagttgagtcatcaaccggtgttgctcagtacgctgacagattgttcctgtctgcaacaactgatggcatcaattatggccgtgagcagatgatagagcagaatgcgccgtttatttacgataaacgagtaatctggaagcgcgtgggtcgcatcaggaaaaacataggcttcaaactgcgcatcatcactaagtcaccagtaacactatccggatgtcaggtgaggttagaataa

SEQ ID NO: 100319 - DNA, 483 bp, Enterobacter aerogenes
atggcaacgactctgacaaagggtgacatcgtacttttcgcccttagaaagccagcaattgcatcaaatgcgtcacttaccgatgttgagccacagtcagttgaggacgccattcaagacctcgaaaatatgatgtacgagtggcagattaatcctggcgatatcggctacttgttcgctgcagatggcgaggaacctttacccgatgatgattcaggattgcctcgtaaatacatgcaggctgtcggttatcagctgatgttgcgcatcctttcagattacaaccttgaaccttcttccggtgtgctgacaaacgcacagcgttcatacgacgctcttctcaccgatacactggtagttccatcaatgcgccggcgcggtgactttccagttggtcagggcaataagtacgacgtatacacagcagatcgctattaccctggcgacctaccgccaattgatggcgatgtgccaaatccatag

SEQ ID NO: 100320 - DNA, 186 bp, Enterobacter aerogenes
atggatcgcatgagcgtgttcattaacgcagataacgaggctggtcacgtacaggcagttatcgcagaaaaagacttcccgatttacgaaaagctaggcttcgttgcatcagtagacgacctgaagccagcaaccaagcgcggacgtaaggcggcagataatggcaacgactctgacaaagggtga

SEQ ID NO: 100321 - DNA, 1275 bp, Enterobacter aerogenes
atgcctaacaacgatctcaacagtaacgtcagtcaaatcgttctgaaaaaattcctgccgggtttcatgtccgacctggttctcgctaaaaccgtagaccgccaactgctggcaggtgaaatcaactccagcaccggtgatagcgtcagcttcaagcgtccgcaccagtttgcatcactgcgtaccgcaaccggtgatatctcaggacaggcaaagaacaacctgatctctggcaaagcaaccgggcgtgtaggtaactacatcactgttgccgtggagtacggacaactggaagaggcgatcaagctaaaccaactggacgaaatcctcgcccctgttcgtcagcgcatcgttaccgacctggaaactgaactcgccaagttcatgatgaacaacggcgcactttcccttggcagtccgaacactccaatcaacaaatggtcagatgttgcacaaactgcatctttcctgaaagatttgggcgttgaagaaggcgagaactatgcagtaatggatccatggtcagcacagcgcttggctgatgctcagtcaggcctgcatggctctgacaagctgattcaaaccgcatgggaacaggcgcagatctcttctaacttcggcggcattcgcgcactgatgtctaacggcctggcatctcgcactcaaggggcgttcggtggcactctgactgttcagactgcacctaccgtaacctataacgcagtgaaagatacctaccagtttactgtaacgctgactggcgcaactgcttctgttaccggattcctgaaagctggcgatcagattaagttcaccaatacctactggctgcagcagcagtccaagcaagttctgtataacggttctgcaccgattagcttcactgcaaccgttctgtctgacgccaactccaccgcaggtggtgcagttactgtaacactgtctggcgtgccgatttatgacaccaccaacccgcaatacaacgctgttagccgtcaacttgcagcaggcgatgccgtaaccgtcatcggtactgcaggtcagacaatgaagccgaacctgttctataacaagttcttctgcggcctgggcaccatcccactgcctaaactgaacagcatcgactcagccgttgctacttacgaaggcttctctatccgtgtacacaaatactctgatggtgacgccaacgtgcagaaaatgcgtttcgacttgctgccagcatatgtctgcttcaaccctcacatgggtggacagttcttcggcaatccgtaa

SEQ ID NO: 100322 - DNA, 885 bp, Enterobacter aerogenes
atggaaagcgaactgatcatcgacggtcaggttattgacctgtctgaaaaacaggaatcagccgaagaagtgaccactgagcaaaaagagcagcctgagaagaaagaccagggtgatactgagcaagaggttactaccgaaagtgaacaggccgaagagcagccgggtgaatactccctgcgtatcggtgatgaagaaatcccgcttgctgaagaggatgacgatcacgttgatggtcaacctgcccctcagtgggtgaaagatttacgcaagaacaatcgcgagaaagataaagagttacgggaactgcgccgccagcttgaggagattcaatccaagccggcagaagtgcagcaaccacaatcagacgcattgcctccaaagccgactcttgagtcgtgcgactacgacgaggcggcgtttgaacaggcagtgactgactggcatgagaaaaagagccgtgccgagcagcagaagcaacagcagcaacgtcagcagcaggaatatcagcaacgcttccagcagcgagtagaggctcataagcaacgagcagcaaagctcccggtgaaagattaccaggagatggaaagcatcgttcttagcgaactcaagcctattcagcaggaaattattattcatgcagcagacgagggttcagaactgatcgcctatgcgctcggtaaaaacccacaactacgccagcgtgtagccgctgagacagacccaattcgcgcagcatttctcttaggtcagattagcaagcaagttagccttgcaccgaaacccaagaaagccatcaaaccagagccggaagttcgcggtggcggcgctgatgcgaaacaagacgacttcaacaaactctgccccggcgcaaaaatcgaataa

SEQ ID NO: 100323 - DNA, 2088 bp, Enterobacter aerogenes
atgctcaggtttgaccgcgcctatacgccgcagcaagacgtgcgcgaaaagtgcattgaggctacgcgattcgctcgtgtccctggcggtcaatgggaaggagcaacggcagcgggaaccaaacttgatgaccggttcgaaaagtacccaaagtttgagattaacaaggtagcaacagaactcaaccgcatcatcgccgaataccgaaacaatcgcatcaccgttaagtttcgtcctggtgacaaagaggccagcgaagagttagcaaacaagttgaatggactgttccgcgctgactacgaagagacggatggtggtgaggcatgcgataacgcatttgacgacgccgcaacgggtggttttggctgcttccgcctaacttcgatgctggtcaacgaatacgacccaatggatgagcgtcagcgcattgctatcgagcctgtttacgatccgtcacgctcagtatggttcgacccggacgcgaagaagtatgacaagtcagacgctctgtgggcattctgcatgtactcactgtcgcctgagaagtacgaagctgaatatggcaagacacctccagcatcgctcgatgtaaccacgatgaccagttgggaatacgactggtttgagcctgaagtagtttacatcgccaagtattacgaggtgcgcaaagagtctgtagatgtaatcagctatcgccagccaatcactggcgagattgctacctacgatagcgaccagattgaagatatcgaagacgagttagcacttgctggattccaggaggttgcgcgtcgttccgttaaacgccgccgtgtttatgtatcagtagtggatggccagaacttccttgagaagcctcgacgcattcctggcgaacatatcccgcttatcccggtatatgggaagcgctggttcatcgatgacattgagcgcgtagaaggtcacattgcaaaagcgatggacccgcagcgcctctacaaccttcaggtttcgatgctcgcagactcagcagcacaagacccagggcaggttcctatatttgaccctgagcaggttagggggcttgagaagcattgggaagatcgaggcaagaagcgacctgcattcttagttgctagagccccaagagacaaggctggaaatccaattggcccagcggcgccaggttcatttactccagcgcctcagttgagtccggcaattgcaacaatgcttcagctaaccagtgcagacattcaggaagtaaccggtagcagtcaggcaatgcagcagatgcctagcaacatcgcacaggaaacggttaacaacctgatgaaccgagcagatatggcatcgttcatctacctggataacatggccaagagcctgaaacgagccggtgaggtctggttgtcaatggctcgtgaggtttacggttcagatcgcgaggtgcgtgttgtcaacgaagacggaacggatgacattgcgctgatgaatgcgaaggttgttgaccgacagactggacaagttgtcgcactgaatgacctttcaacaggtcgttacgatgtcactgtcgacgttggtccaagctatacagcacggcgtgatgcaacagttgcagcgctaacaagcgtgctgagcaccatggcacctcaagacccagacgctggcatcattcgcggcctgattatggagaacatggacggagaggggcttgacgattacaaggaatacaaccgcaacaagttgcttactgcaggaatagtcaagccacgcaatgccaaagagcaggcgcttgttcagcaagctcaagcagcagcgcaaagccagccagatgcgaatatggttctggcgcaagctcaaatggttgcagctcaggccgaagtacagaaagccaacaacgagacagcgcagactcaaatcaaagcattcactgcccagcaggatgcaatggagagtcaagccaataccgtttacaaactggctcaagccagaaacatagacgacaaagcagtaatggaagccatcaggcttctcaaagatgtcgccgaatctcaacagcaacaaatcacatcaccacagccaccgacaggctcactgtcgagttaa

SEQ ID NO: 100324 - DNA, 1413 bp, Enterobacter aerogenes
atgacaacgattaaccctatcttccaaccgttcatcgaggcgcatcgctacaaagtcgctaagggcggtcgaggtagtggtaagtcatgggcaatagctcgcctgcttatcgaggcatctcgccgtcaacctgtacgcatcctttgcgctcgcgaattgcagaacagcatcagtgactcggtaatcagattgcttgaggacacgatagagcgcgaagggtatgcgtctgagttcgaaatacagcgctcaatgattcggcatctcggcactaatgctgaattcatgttctacggcatcaaaaataacccaacaaagattaaatccctggaagggatagacatctgctgggtagaagaggctgaggcagtaacgaaggagtcatgggatatcctgattccgaccatccgaaagcctaactctgaaatctgggtcagtttcaacccgaaaaacattctcgacgatacctatcagcgcttcgttgttgaccatccggatgatatctgtctgctaacggttaactacacagacaatccacactttcctgaagttctccggttggagatggaagagtgcaagcggcgcaatccaactctctatcgtcacatctggctaggtgagccagtaagcgcaagtgatatggcaatcatcaaacgcgaatggcttgaagcggcaacagatgcgcacaagaagcttggatggaaagcaaagggcgctatagtttctgcgcacgacccatcagataccggcccagacgctaagggttatgcatcacgccacggctctgtagtgaagagagttctcgaaggcttactaatggatgtgaatgaaggctctgactgggccacttctcaggccattcaggatggggcagaccattacctttgggatggtgacggaattggtgctgcattacgcaggcaaactaccgatgcattcagtggcaagaagataaccgctacgatgttcaagggcagtgagtcaccatttaacgaagatgcgccatatcaggccggagcgtgggcagatgaagtggtgcagggcgacaacatccgtactatcggcgacgtgttcagaaacaagcgagcgcagttctattacactctggctgacagactgtatctgacttatcgcgcagttgagcatggagaatacgcagaccctgacgaaatgctgagcttcgacaaagaagaaataggcgagcatatgctagaaaaattgttcgcagaactcactcaggtacagcgtaaattcaacggtaatggcaagcttgagctcatgactaaggtcgaaatgaagcagaagcttggtattccatcccctaacctggcagatgcactaatgatgtgcatgcactgtccggcattagttcccgaagaaacggacatctacgttccatcatcctccggttggtaa

SEQ ID NO: 100325 - DNA, 495 bp, Enterobacter aerogenes
atggcagcgcccaaagataacaaatatgccgaagggaacagcggcaagcctactcagtacaaacctgagtatgcagcgcaggcagagaagctttgtttgctgggcgctacagatgacgagcttgctgatttctttgatgtgcatcgctcaacaatatatcgctggaagcttgagcatgaagagttttgcaactccataaaagccgccaaggatattgcagatgagcgagtggtaagaagcctgtatcaaaaggcaactggatacaactacgttgagcaacaggcgttcaagataaaggtcgatagagacaaagaagaaatcgaggtggcagatgttgagcgccatgcgccagctgataccacggctgcgattttctggttgaagaacagacagaaagaccaatggcgcgacaagcaagagcatgagctaaccggcaaagacggtggcgccatccagattgaaacatcacctatgagcacgctatttggaaaatga

SEQ ID NO: 100326 - DNA, 333 bp, Enterobacter aerogenes
atggctattaccgaaatgcaaacagcaacggctggttctgttgctggtcttgttccagtggttaaggcgcatatcgctgcttctcgctttcctaatggcgggttggtaggcgttaaagcaacatctaccaaaaccgaatatttccaggcggtagcagcaggcggtacagctgcaacagactacgacatcgtggtaagtacagatcgcgctgatttcactatcaagtgcaacgcaaagattaccgccggatttctgccattgggggatatgagcgttatccagttaacacctgggcgtttggttgagtacgcgcaggcattcactaaggcttaa

SEQ ID NO: 100327 - DNA, 141 bp, Enterobacter aerogenes
atgccacttaaaaaaggtcgaagcaaaaaagttatcggtgagaacatcgcaaccgaaatcaaggccggtaaaccaaaagaccaggctatcgccattgctatgagcaaggtcggcaagaagaaaaagaaaggagctaagtaa

SEQ ID NO: 100328 - DNA, 243 bp, Enterobacter aerogenes
atggcagagattacttctatgaccgaagagcaaacgttcaagcttgagatttacaaattggttgccaaccagaatgcggccgcagaagaagctttcgcctttattggcacagaccagttgaagcttgagctattcaagattcactacaacagcggcggtgcaaatccagacttcacatcgcgcactatcgaagctgttcgcaaggcaaaagaagctctcgacttatttaattcaggagtctga

SEQ ID NO: 100329 - DNA, 201 bp, Enterobacter aerogenes
atgaaaaagagagagcgagaaataactctgctctatggaatgtctctcatacgtgacgacgttctcaaccatccagtttacaagccaacattcaaagacaagctaatcgagtttatctatcacgctctgcacatcatcgctgcggtgattgttgctgtcgtgtctataggcttcctggttatctcgtctaattacctctaa

SEQ ID NO: 100330 - DNA, 468 bp, Enterobacter aerogenes
atgagcagattaaccgcaatcatcgttgccgtagttgcctgtatcattgtgtcgcttggttgggctgtaaatcactatcgtgacaatgccaccgaatacaagaaacagcgagatgagaaaactcaggcgctaaacctggcgaatgccaccatcaccgacatgacagcaaggcaacgtgatgttgctgcactggatgccaaatacacacaggaactggcagatgctaaagctgaaaatgctgttctgcagcgtaagcttgataatggtggtcgggtgctcgtcaaaggcaagtgtccaatgtcagccgcaacccaacccgccggcgccgccagcatgggcgatgatgccaccgtcgtactctctgcggttgctggacgaaacgttctcggtatcagatccggaatcgtcagtgaccaaacagcactgaaagcgctgcaggaatacattcgcactcaatgtttgaggtga

SEQ ID NO: 100331 - DNA, 438 bp, Enterobacter aerogenes
atgcaaatcagcagtaacggaatcaccaaactaaaacgcgaagaaggcgagaggcttaaggcttactcagatagccgcggaatcccgacaatcggcgttggtcatacaggcaatgttgatggaaagcctgtaactcttggaatgaccatcacagctgataagtcatctgagcttctgaaagctgacttgcgatgggtggaagatgcaatcagcagtctggttcgcgttccactgactcaaaaccagtatgatgcgctctgcagtttgatattcaatattggtaaatctgcgtttgcaggctccactgttctgcgccaactaaaccttaagaattaccaggcagctgctgatgcattcctgatgtggaagaaggcaggtaaagatactgaaaccctacttcctcggaggcagagagaaaggattctgttcctgtcatga

SEQ ID NO: 100332 - DNA, 324 bp, Enterobacter aerogenes
atgaagatgcccgaaaaacatgacttgctatccgctcttatggcggcaaaggaacaaggcataggggcaatccttgcgtttgcaatggcgtaccttcgcggcagatacaatggcggtgcgtttacgaagacagtaatcgacgcaatgatgtgcgccattatcgcctggttcgttcgtgaccttctcgacttcaccggcctgagtagcaacctcgcttacatcgcaagcgtgtttattggctatctcggaactgactcgattggatcgcttatcaaacgcttcgccgctaagaaagccggagtagatgatgcaaatcagcagtaa

SEQ ID NO: 100333 - DNA, 600 bp, Enterobacter aerogenes
atgagcctgaggtgtggtggtggaatcatcgctccgctcttggctgccatatctacgcgaacaggctctatccctaaggtgatagcgatgagtaatacgaagataacgccagagatggtgctttctgttgtggattattgcccactaactggttacttccactggaagtggaggccaggtaaagaaaggacaactctggcttggaatgctagattcgcattccagagatgttcatcagtaaataccgatggatatctgatgatcataattcatggcaagtcatatccagctcacaggcttgcatggttggttgttcatggttatatgccagacggtattgttgatcacataaatagagtcaggctggataacaggatatctaatcttcgcctcgcgacgcattctgaaaacatgcagaacaggaagcttcagaaaaataataagtctgggttcaggggtgtctcatgggatgagaagtatggaaagtggagagccagaataaacgtagctcggagatgtataaatctcggctattatgatagcccagagcttgcgtctttggcttttgagaatgctagaataaaatatcatacagtttga

SEQ ID NO: 100334 - DNA, 519 bp, Enterobacter aerogenes
atgggtgttcgtgaacttaacctgaccaaagaccagcatgactggcttaacggatggctggaattgtggggagcgtgggtatattcagggcgactggaaaaacgcatgagcagtgtaatcgctcagtttatggaaagggtagatccctcccggataatgagcaggccaatgtgcaatgacgatgacggaatgttgatttctcaggtcgtagattccgttatgcgcatcgacacaaaggcctttggcattctgcttagctactactctcacggctcatctaagagagcaattgcatcgtactatcacgccaccgcaaagccacgcaaaatggccggcagaagcggagagggttggcggcgaccatcacttgcaacatgcaggaatgaaatcgacgatatcctcaaagcttcactctttgttttgtaccaaccaatgcaagatgcctttaaaaatcgcaaacgtgttgagaaagttaaacatgttgcttctaaaaggcttgacaaccttttagccatttag

SEQ ID NO: 100335 - DNA, 183 bp, Enterobacter aerogenes
atgaataacgtaactgatatccaagcagtaaaatggcagcgtcacgcagatgagcagtcacttaaatcgctcgatgcaaagattaaagacgctgaaaacgcactcgtgattctgcttcatcatcgccgggagttggttaatcgcctggatttgaataagcctgatggtccggaggttgcctaa

SEQ ID NO: 100336 - DNA, 624 bp, Enterobacter aerogenes
atggctaaaggcaaaacgccgaagcctaaaacctgccccatctgctcaactgaatacatcccccgaagttctctccagaaagtttgtcacaactacaaatgcgctctcgaattcaatcgtctagccgacgagagattagccatgcgtgaaattcgcaaacaggagaggctacagcgcatcgaacttaaagagagaagggaaaggctcaaggggaaatcagagtggaacagagaggcccaggctgcggttaataagttcatattctggagggattacggcaacaggtgtatttcatgcggatgccaacttaactacggcgttcgtggtggcgcagtggatgcaagccattatcgctcaagaggtgcggcaccatggttacgcttcaatgtatttaacaacaactcaagctgtgttcgctgtaacaggcagctatcaggaaacatcatcccctaccgaataaacctcattgagaagtacgggcctgagattgtcgatcgcattgagaacgacaacaaggtcaggaaattcagcattgattatctgaaaagagttaaggcgatattcacacgccgggctcgtcattacgaaaagctacgcaagcgtcttatggagaccgcagcatga

SEQ ID NO: 100337 - DNA, 177 bp, Enterobacter aerogenes
atgattacagcctcagaagcccaatcctacgagcagcagagcatacgtagaacgttgtgcgcaggctgtacgaaggaattatcggataacgagacgcactgttgcgaagaatgcgcctcactggcaatagcgtatcgcgaccctaacggatttatgacggaggaagatgatggctaa

SEQ ID NO: 100338 - DNA, 228 bp, Enterobacter aerogenes
atgagctacttagacgatgactacgcagaccgactcgctgaccttcttgaagatatggaaggtgacggcgttgactctgtcggaatgattatgaacagggtggccggatatgttcagggaaagacggaaggcaatggcgcggaagcctacatgtaccagttcgaagatgccgacatgattatccagttacaggaaccagaagaaaccacagcggcgaggttgcattga

SEQ ID NO: 100339 - DNA, 201 bp, Enterobacter aerogenes
atgagattttcctggtttcatcatttcgacctcaccaacgaagaagcaaatcagttaatcaccgcctatcaatcccgcaacgtaaaaactcaacgaacgctaagcgcagaccctcggttatgggtggtttcagccttgcttccagagtacgccagcgagccaaagggtaggagtcagtatcaaaacagaatgtggagttag

SEQ ID NO: 100340 - DNA, 423 bp, Enterobacter aerogenes
gtgcaagagttcatcctgcacgaaacgaataaagctcaactctggtcacttctcaaagaaatcctctctaccggcaagcgctggcgcataaaaatctctgagtaccgcgagcgacgttcgctcccacaaaatagcctcctctggaaatggaattctgaaatagcagagcaactaactgctgtcggttcagagcgcttttccgatgaggaggttcacgagtggctcaaggatatgtattgcccagccaagccggtaaccatttcaggaatgaccaggtacgttaaatcaacccggagactggatgttggagagatgcacaagtacctgaccgacattgaccagtgggctcaccagaagggattgcgactaactatcccagatagctgtgagtatcgggaattacaacggaggcaggatgaatga

SEQ ID NO: 100341 - DNA, 213 bp, Enterobacter aerogenes
atggctaaatatagtgtcatcaagatgggggatagggaaggtaatggcgctatcgtaaaaaagtcaggattatttttttcgtcaacatggacggcgaataacgatgatgagcgctttgaaagatgggtatgcagagaaacgggggaagtaaaatataagggtccatattgctacttagattttttttataaggcgcaatttgacacgatttag

SEQ ID NO: 100342 - DNA, 240 bp, Enterobacter aerogenes
atgagcattcgagctaagtacggattcggacctgtgactgtagaggttaattggcttgataagtgccctaattgcaacaacagaacagttagagtaaccggttggtctaccactccagaagctctatgggctggcgataaagctgagtgctcaaaatgcggtcataaaggcgagattgatgccgatggtgacaatgcctgggttgaatgggatggcgtgaaggaggccagtcatgactga

SEQ ID NO: 100343 - DNA, 267 bp, Enterobacter aerogenes
atgagcgaaccaaaaccaggagatttaatccgttggacgcgtgacgatagctggcgaggaattgaagtcgtcgagttcgagctggagatataccgattcacgctcggttttttcgaagatgaacagcatcgaaaggcagggctatttactccattatccgaccctgatttgtgggttgatggaccaaactctgatgatgattatatttgtaattttggctcatatagaactaatcaggttcccgcattcgacatcatcaagaaataa

SEQ ID NO: 100344 - DNA, 630 bp, Enterobacter aerogenes
atgagtggaattaactcgttagctccaaatgacgcgagaggcgaattgcttcgcttcgtccgagataaccagccggtaaactggcagaaagcaaaagcccatataaacatatctcgcgcaacttactacaagttggttggcaagctaaaaaatactggtgatatctactcaatcaacggctctggaaccttcctgtcacgagaagattacgagcgatggttgaagacagactcagtcagagctgagaagcggatgatcgccagcaagggaggggtgacaaggaagaatgccgccacaattcgacagaaagtaatggacttcatcccatcaatatcacagcccatgacggttggtgaaatcgcaacagcatgcggcgtgagcaggaaatctgcttttcgctatgtggtgcagctagccaatgagggagctcttcagcataactcagcgacatattcaaggttgtatatgccagcagagaaacagttcacaccgaaagaaaactacgccgatgtcagaacaaaaccaaaggcattcaggcaatacaatcctgatcgaaatggcgtcgttcaggtttatctgaatagccctgcacgacagaggctgatggctgtatatgggagaatgggatga

SEQ ID NO: 100345 - DNA, 846 bp, Enterobacter aerogenes
atgacgctggatgaaaagatatcatcacttgagaaaaaacttgctgaattaagtgttccgccaatttctatcgaatacaccgaagtagaaattggcaccggaacatgtgaaaaacatggtgagttcgagcaacgtaaccgttactcaacgggcccgattaagtttgctacaaggcctagtgaatgccctggatgcatgagggatgaacttatcatcctgcaagccgagaagattaaaatcgacgacgcatcacgtaagcgaaccattgaaatgctacttggaagtcttgatattcctgaccgcttcgctagttgcacgcttcaaaactacgaacctgttaacgaagacgcaaaacgagtgctgagggtttgtcaggcatatgcgagcaaatggcctgagcgcttgcagaagggaggcggcctggtgatgtgcggcaagccaggcaccggtaagaatcatcttgcgctagcaatcgccagacacgcaattaccgagcaccaaagctctgcgacattcaccacggcgctgaagattgcccgagagtacaaatcaacctggtcgaaaggctctacacgaaccgaggatgaagtaattcgattcttcacgaagccagaccttctcatcattgatgaggtcggggttcagttcggcagtgacgctgaaaagctcatcatgttcgaaatcatcaacaccagatatgagcgtatgaagcctaccatcctgatcagcaaccaaaccaaagatgagttatcagcattcatcggagagcgggttattgacagaatgagcgacggtggcggctgcactttatcattcacatgggacagctacaggggaaaacaatga

SEQ ID NO: 100346 - DNA, 897 bp, Enterobacter aerogenes
atggcccgttcaagaaatatcaaacctggctttttcaccaacgatgaacttgccgagtgctctccatatgcccgtctgcttttcgctgggttgtggactattgctgacaaagaagggcgattggatgatcgccccaaaaaggttaaagcgcttgtcctgccattcgacaatgttgactgcgatgaactccttcagcagttacatcagcgtaaattcatcaaccgttaccaggttaatggagatggatttatccagatctcaaactggaagaagcaccagaatcctcactgcaaagaagctgcaagtgagataccagaaccagtagagaacaatgacagcaccggacaagaacagtgcaaggatgataaagaggaagataagaaggatgcaggatcaacccaagacattgaaaacaaagaagcacaagaaaagcaccatgcaagcacagtgcaagcaccagtagagaacaatttaaatcctgctgattcccttaacctgattcctgattcccttaacctgattcctgattccctttctaacacccaagccgctgacgcgacttgtgacggtgaccaggaagaaagcgcagacgttcacgaaatctcaagtcgatatgcattcgaagggcagattgtccgactgaaccacaaggactatcaggcctggaagaatctctatccgctgattgacctgaactacgaacttcagaagctggatatcgagttcactcacgagaagccgaaaaactggttcatcactgccagccagaaactcagctaccagaacaagcaggctgcgcaacgtcctgctcgcaaggtcgctaatgggcttcattctgaaggtttcgcatcgaaggactacggacaaactgatatcccatcgtgggctcaggggtga

SEQ ID NO: 100347 - DNA, 405 bp, Enterobacter aerogenes
atgcctggacaaaacgcacaagtaaaccatgacattcgagccggtgaccggttcgaaacagtctacccgttcatttttgtttgcacggattaccagctctacaacggtgatgttcacactgacgagagatggattggtggatgcaggaagacatcagaaccagctgattgcggctacggcgaacaaacgatttatacggccgacagagaggggaagagaatcctggaggttctttccgttgcagatatgccaggccaatggcagagacgaatcatttacgcctgccatctaattgaccctgacgggcgagagaggaagggcaggaaagcatacacggtaacagaggccagattcctcaagatgacatctggttactttacagattacggactggaggatgattga

SEQ ID NO: 100348 - DNA, 300 bp, Enterobacter aerogenes
atggaaaactcaattaaccgcaacaaggtcaatgcacgccgcattgaatcctggttgctcaaccgaatcgccatgaaaggtgggaataacgtagccaaagcaatcggagttgataaagcgcagatcacccgctggaaggaaagctggttgccgaagatggcaatgctcttagccgttctggagtggggcgttgtcgatgacgatatcgccagattagcgaaggaagtggctgcagttctcacaaagcaaaaacgccccgttgcagcggagcgttcagagcaaatcaccatgcaattctag

SEQ ID NO: 100349 - DNA, 231 bp, Enterobacter aerogenes
atggaagaactccgtatgtatctgaactccctttcacttgaagagcagcgcgagtttgccaccaaatgcggaacctcaattggctatttgcgcaaggcgctgagccgaaatcacgaattaggagcagctctctgcgtcctaatcgagaaggtaagtaatggagttgttactcgtaaaaacctgcacccaagtgactgggttagcatctggcctgagttgatggccgcatag

SEQ ID NO: 100350 - DNA, 696 bp, Enterobacter aerogenes
atggataaatacgaacaaagaagactgaagcttattgagataagagaccgtttctgtaacggaaaggcctcagatcttgctcgtcggattgatagagaaccgtcttacatatcaagaatgctttaccctgaggggaaaaagggcaaaaagcgtatagctgatgacatgatggaaatcattgaaaaagcattcaatcttccaaggggatggatggattcaatagcgactcatgagcagcttaataaagatgatattgaatttgctggaagcatacgcgagggttatgttcccgttattggcgaggccgtactaggagtagatggctctgtggatatgattgagttcagagccggatggttacgcatctacagtggcgataaggatgcgtacggcctgaaagttaaaggtgatagcatgtggccaagaatacaatctggtgaatatgttgttattgagccgaataccacagttcatgttggtgatgaagtgtttgtaagaactagagatggccacaacatgataaaaataatgaacaaaaccagggatggagactttcagttcagtagcgtgaacagcgatcatcgccctataaccatgtctcccgatgaagttgttaaaatgcactttgtatcagccatcgtaaaacacacaagatatgttgaccaagacgatgttccaagagttgatgggatatag

SEQ ID NO: 100351 - DNA, 168 bp, Enterobacter aerogenes
atggttaaagagcgctttaacggaattccttgggataaaatgaactctcaggatagaggcatgtatcagtgtgccattgagcgcctaaactaccttcaatcattaaagaaaagccaaacccatcaagaaagactcttgcctccctggcctgaaaacccatacaactaa

SEQ ID NO: 100352 - DNA, 288 bp, Enterobacter aerogenes
atgactaatcgtgaacacaagaagttattacgcgccatccgtcatcaacagggtatgcgcgaaagccagcaactggcgaagaagattgaccgcgctttctcgcgtatctcagaagactgcagcaatcgcgttgtgctggctacgtcattgggtagccttcgcaacaaaccatctcaggaagagattacagagcgtagaaatcgcatctggtacaaacagcctggcgagcgcggcattacttgctcaggccggcagaagatgaagggtaagtcgataccgttaatttga

SEQ ID NO: 100353 - DNA, 609 bp, Enterobacter aerogenes
atgggaacgagacatttgacatgcgtagttaaagatggcgagtacaaggttgcgcagtatgggcaatgggatggttactattcaggtgctggcagtgagattctctcattcctgagagatgggctagaccgagataaattcctggataatcttgctctgacttaccaaccaactgaagatcagatcaaggcgtggtggctggaattcggtcacgacatagagaaaagcgacggatttgtcgattacaccaccgccaagctgtacgggaaaaaacacccatcgctatctcgcgatacaggatcaggcattcttgaagtgattcagaacgctagtgagcctgtacctttgaatatcaacaaaaactttgcagctgattcactgttctgcgaatacgcctacgtggttgatttcgacaaaggcacctttgaggtattcgaaggctttaacaaagaacctctggctgagggtgagcgattctatggcatggcatgtgatagattcaataagaactaccacccggtccggctcaaaagaacctactacctagacaagctaccaaccgaagaagagtttctatctgagctagagccggaagaagaaggtgaataa

SEQ ID NO: 100354 - DNA, 198 bp, Enterobacter aerogenes
atgaaattaaaacttaaatatgaccacgctcatggatatctcagttctcagcgtgagcaggttatggaactggacggcgtcatcctggacggaactgtcgatgctcgtgaggtgttgcctcagctggatggtgcggtagtactggaatggctggctgagcagggatatgtcatcactcatcaggagaaagcagcatga

SEQ ID NO: 100355 - DNA, 159 bp, Enterobacter aerogenes
atgagtgcgatggaaagatgggatgatgacgctttcttgcagctgatggttgatgtgatcggagacgttgaatcggaagatgacgagccggtgagcctggatgctgagagacagaatccggtgattaattggtcagaatttgcaggagatttcacatga

SEQ ID NO: 100356 - DNA, 714 bp, Enterobacter aerogenes
atgaacctgaacctgttagacgagccattcgccactggtgatattgagtggcgcattcagcaggctggtaaaagtagcaacaagatttgggctaaggtgctggcatacgtcaccaaccgcgcaatcatgaagcgtctcgatgaagtatgtggtaagtctggctggcgtaacgaatatcgcgacattcccaacaatggcggggttgaatgcggcatttccatcaaggttgatggagagtggatcactaaatgggatgctgcagaaaacacccaggtggaagctgttaaaggtgggcgatctggggcaatgaaacgcgctgccgtgcagtggggtataggacgttatctatacaaccttgaagaagggttcgcaattgtctcagcagagcgagcgcccgggtttcattatgccaagtcaaaagaagttggcgtattttactggaagccaccatccctaccatcttgggcattacctgcaggatgtggcgatcatcagactaaggatcagacagtagagcctgaacaagataaaaccgtggatgccgacaagatactcttagatttcacccaatatgccagcacagaaagcgacggtgtgaaactgaagggtagttatgaagcaacgtggaaattacttattggcttcgcagagcaccaggctaaatgcaaagaagtaacaggcatccgtatcaaagaacttaaaaaggcggcataa

SEQ ID NO: 100357 - DNA, 285 bp, Enterobacter aerogenes
atgtcatcacctcttcacgaggcggattacttacgcccaccgaaagcatcaggaagccgagaagaggttttggcgcggtgctttgaggctatcgcaaacaacgattatcagacgccaagcatggaagatcgtattcaggagcgattcgagaaagatgtctggtatgacaatctggaagcaagcaaattccctcaattcgtgccagtcggaccgatgctcccaactcgtgaagatgagcgcttcaaactttatcgcacacgctacggcatgattagtaataactga

SEQ ID NO: 100358 - DNA, 495 bp, Enterobacter aerogenes
atgggtgtgaatatcaccgaactggcgcagcgagagaaattcgaggcgtggtttgtaaatgatgttgtaggggctgatgtaaccttcccaacatttgaagatggcgaatactccgaaggagaaatttacgacgaacaattgtacttcatgcttcaagctatgtggatggcatggaaggcggcttccgtcgagttggtagaggcgctggagaaagaagttgcaatgcgagaacagaaccttgctatcaaattgcacatgagtgaacgcatcgccgagctggagtcccgcaccgtcaccgtgaagctgccgaagccgcacgctcacttaatctggattcaagccgggcatgcgccagacgattattgggatgatgtagtggtatcacatagcgagaaagaccgttgctgtgatggttcagagagatatccggtttatacgcgctgggaaattgaagagatgctgaccgcctctggcatcaatatggaggacaaatga

SEQ ID NO: 100359 - DNA, 279 bp, Enterobacter aerogenes
atgactcaagtaaccaaagaatcactatccgctcgtatcgctgaacttgaatcaggaacaaggtctattaaggaagattaccaactggaggcttatcgcgttctttttcatcttatgagtaaagagccggctgcatggagatatagatatgttaaaaaaggagtaacagaacatgatggaagccagtgggtaggagattggaaatatatgccaacgaaagatgattgcaatgatcgtcctagctatgagattcaggcgctatatactcacgatttataa

SEQ ID NO: 100360 - DNA, 207 bp, Enterobacter aerogenes
atgaaaacggaactatcaaagcgtgagataaacatgcttcgcacctttctaactaaaacaagattctggcgagttatgccacaaactgcaattgatctatgggactctggttttatcaagccaacaaaatttggcatgggcaattttcagatcgcagaaaaaggtcgtttatatctaaagtctataactgacaactcatcggagtaa

SEQ ID NO: 100361 - DNA, 591 bp, Enterobacter aerogenes
gtgaaagaacgcggaatgatttttaacagtgagatggttcgcgccattctcgacggtcgaaagacgcagacacggcgcccagtgaaattccctgtgcatgataaaaaccttgggtgcgagttggctggcaatgaactggccggggagctgtcggcagggaactatctgaacagcgcatttggcaagcaaggcgaccgcatctgggtgcgggagacttgggcacgctacaacatcgaccaagacagctacgatatggcatacctagctactcctccagaagactggccggaagaaggaaaatggcgaccatctatccacatgccgcgctgggccagtcgaattctgctggaaattacaggcgtacgtgttgagcggttgaacgctatcagccaagaagatgcgcaagatgaaggcatggagcttaccggatggcggccaacatactctgactcagatagtggcggagaggtttggactccatatgacaactttgcgcggctgtgggattccatctacggcgaaggaagttggaaggtcaacccttgggtgtgggttatcgagttcaaacgcgttgaaggcggtgcagcatga

SEQ ID NO: 100362 - DNA, 1299 bp, Enterobacter aerogenes
atggaaagtcaggttgacctgcaaatcccggcgaaacttgttcctgtattcgcgacagagggaattcgctatcgcggcgctcatggtgggcgcggttccgcaaagacgcgcacattcgcgttgatgagcgcggttaaagcgtatcaggcggcagaaagtggattaagcggcgtcattctctgtgctcgcgagtttatgaactccctcgaagagtcatcgatggaggaggtgaaacaggcgatccggtctgttccctggctggatgattacttcgatattggcgaaaagtacatccgcaccaaaaaccgcaacgtcagctacgtcttctgcggattgcgccacaacctcgacagtattaagtcaaaggcgcgcattctggttgcgtgggtagatgaggccgagtctgtatcggcgacggcctggaagaaactgcgcccgactgtgcgagaaaatggctctgaaatctgggtgacatggaacccggagaaagacggcagcgccactgataagctcttcagaaagaacccgccgaaaagctcgatgattgtcgaaatgaactacagcgacaatccatggttcccggatgtactcgaagaagagcgcctcgaagatttagaaaacctcgactacgccgattatgcgtggatttgggaaggcgcttatctggagaactcagataaacaggtgctggcgaataaatacgtcgtgcagagttttgaagatgacctctggaagaaatcagaacgccttctatttggtgctgacttcggcttcgcaaaagacccgagcacgcttattcgcatgttcattctggataacaacctctacatcgaatacgaggcctacggcaacggggtagagcttgacgatatgtggaagttctacgctggcaaaaccgatgccacaccgaaacaacttgaagactggaaggttactgatgaggcgaaattccccggcatacccgaggctcgcaaatggcctatcaaagctgataattccagacctgaaactatcagccatatcaagggacagggattcaatatctcagcggctcagaaatggcagggcagcgttgaggatggaattacctgtctgcgtggctttaagaaaatcatcattcacccacgctgcaaagagacggcgaaagaggctcggctctactcgtacaaaactgaccggatcactggtgaagtcttaccggtcatcgaggacaagaacaaccactgctgggatggagtccgttacggtctggacgggtatatcaagcacaaagcgcaagtcggcgcagtattcttctaa

SEQ ID NO: 100363 - DNA, 225 bp, Enterobacter aerogenes
atggaagacattatcaaggcaacaatgaaaagcttttactggcttgagggcggagctcaattccgggttgaattgtccattgatacaagtgatgaaaatatgttcgatgtttcagtgtatttctatcgtggagaagagccattttacactcgatacttcaataacctcacagatgcttgtgcagagtttaatgggctggtaactgcggcgaagactaagatttaa

SEQ ID NO: 100364 - DNA, 255 bp, Enterobacter aerogenes
atgaaaaagttaaaggttgagaagactggctgctggggaacaattaacggcgtattccagcaactgccagtaggtcatgagtttgttgcgattgaagttccaccggctttcgctggtcgcgtatcggtggtgggcgaagtggaagagcgcgtgcttgaagtcgcctctcctggctctgatgctgaaaagcagccggagcagccggagcagccggagcagccggacaccaccgctaaatcgaaaaagggtaaataa

SEQ ID NO: 100365 - DNA, 174 bp, Enterobacter aerogenes
atgacgtacaaatcagttaagcacgggcttccgcgctcgttcacccgcgtctgggtgatgaccgacaccgggcgggagacaaccggctacgttaagtcggacggcgagtggcatatcaactgtgagcgcatccgggcgaccggcgccaaggtgctacgctggaaggagggctga

SEQ ID NO: 100366 - DNA, 396 bp, Enterobacter aerogenes
atgaaacgcatcatggcagtggcattgctttctcttgcgttaacaggttgctataagtcagcactaactgagcaagaggcgatcgatacggctaaaaaagaagtatttatggctatttgcggcgataaaaataaaagttgcgtagatgttagcggcgggaaggcacatattggcgaacggaaaaatgacaacactaaccaagttactgtcaccttcaaaaacattaggtccaggagtgatgcgtcagagaaagtaaacgtagatgctggaatagtggtctatgatttcgacgctaaaactggcgaaacgtatattaaagagatttcactttggtctgaaaatggaaatcactctatagaactatgcggacatgattataagttctgtaggaaataa

SEQ ID NO: 100367 - DNA, 837 bp, Enterobacter aerogenes
atggccgaaaaagcgggtgagatttattacgaagttgacctggaaacagcgaagctaataacggggagcaggaaagcagcagatgtgctaggcgctatggataagagcgcgcgcaatgcaagctcaggtatagataagttagacagttcaggtcgaaaggcttcaggaacgatgggagtactgacatctgcgctttctggagtggctagcgcaatttctgtcgctttaattattgattatgggaaggcatttttaacggttgcagacaacgttacccaactccaggcaagaatttcccgcctaactacagatactgctgaggcgaaggctactttctccacccttgcgatgatcgcatctaatactggagcgagccttcaggacacccaaagcctatgggaaaagttgacctcttcgcttaaggctacgggcgccacgaacagccaattattattcctcactgacactttgcagaaaataggtcgtgttggtgggagttcagctgaagagatggctggagctttacggcaatttggccaatcaatcgacggcggaattgtaagggctgaagaattcaacagtattgtggaaagcatgccagaactcgcacggcaaattgccgccggcatgggaatttctatgggtgaactccgccaggaaatgcttgcagggaaggtaacagcagaagccgcgcttaacgccattgccaagcaatctggggtagttaaccaggaatttaataagcttccaagaacgcttgagcaagccaacaacagtcttactgtttcactctctttgttagtcgataagatgaatgatgaatcgccacgggtttaa

SEQ ID NO: 100368 - DNA, 582 bp, Enterobacter aerogenes
ttgagtcaccatgaacatatatcaatacttaagtgtactccttggttagtcaagtttctaactcgtagaggtttaagaaaacctgacaaacgtcctctttatgaataccacgcaacgagtgatgaatatgatgagttaaaatggctattgcgagctatagggttacccgatggttacaaaagtgataaaggatacgcagcctgtttcacgttgttctgctcagagtggtatcgaagagattatgaaagggagtgtggatgggcatgggagccaatttataaggcgataggcatatcagcatcttcttcggaaatggggaaaataatccctaaaggcctggatgggtactgggggcgcccggtgcggttctatgatacagaaagacgaaattttttagggtctttatttagtgaaggcggtctacctttcaggttactaaaggaatctaatagccgttttcagtcgatgttctctctcattcttaatcagtacgaacaggcccaatcatctaacatttctacgttcatgctagttcatgcagtgaatcgccacgggtttaacagacacctcggagtcatttaa

SEQ ID NO: 100369 - DNA, 1317 bp, Enterobacter aerogenes
atgacgtctcgtcgaaactttaccgtcttcgaatacgggcttctggttgatgagaaggagaggggtcgcataaataatgcggtcgttctgccctccaagctgtttgagtggcttgagcaacggtgtctgaaagatgatgcggataacactcatcgtctgctaaccctgcgcagtcggggtagtgtaaaaacgcttcaagtaaaaaattttgctggtgttatttctcttccgggtaatgcgtatattgaagtattgccaaaaacggggcggcgtgaagacaacgttgatattgcacgtcagcagattttgatgatgctacgcacactaaaatcttttcgccatattgccacttcagcatccagagtcagaacctcgaagatgccgttgatggatgtatttattcagcagtttatcgatagcgtacagcagattgtgcgccagggtctaaagcgtgattacatacgtcagcaggacaacctgccgtgggtgaaagggaagttaagggtctccgatcaattaagcaaaaactgcgtgcgtcgggatcgctttcaggtggagtttgacgattacagcgccgagcgtccggaaaaccggatactgaaaacagccatcgataagatccgccgtcagatcagcaacccgcagctactaatacaagttaactctttgcaggtacactttgacgatattgcacctgtcggagatgttcgcatcgccttcgacctggtacgtctcgaccgacatatgcgtcactatgaacttgccttggagtgggcgcggctgattttgatgggacagtctccccattgcatgcagggagacgccaacgccatttcactactctttccaatggaagctgtgttcgaatcttttgttactgcatggatgcgtcatcgttataatgataactggcatgtggaggcgcaggtggattcacacaacttggttcgtctcaatggcgaagggttatttaagctaagacccgatatccatctacggcctcgtggtgataattggggtcagccgatgatttgtgatgttaaatggaaaatggtagagagcggaaaggagacactcgaacagtcgcaggccgacctctaccagatgctagcctacggtatgaactatcaggcggggataggggatatgcttctgatttacccttcccatgagggttttagtcagccgttagctcatccatatgaatttagccatcaaaaggaaaatccgctgcgtttatgggttgtgccatttttcattggtgacagtttgcaaagttctggcgtgcttttccctgatgggaaaatattgatttaa

SEQ ID NO: 100370 - DNA, 2064 bp, Enterobacter aerogenes
atggttctggatccctctgtattaccctctttctttcgttctcatatcgcaaaaaacaatcaatataatccaaactggggtaagcactaccgccagcttgttgaacagattcaagccgaaaaacccaacttttcaacggatacaattcgacagatttggtacgagcgcagcaatggcatctccagcctcaagcagggcggtatgtcccagtttgaattcgaaacggcgcaaaaacagctgctcgctctcactcgcttgatggcagaagagtgtacgcaggagaattacgaccttgtgattaagcgccttattaaacttaaaacagacggagtgttaaacaaggtgtacttggctctttgccatcgcgcttttgccgcactctacccatctcaaatcaccaacgtcgtgaatatcagcaattttttcagcagttacaactactgcaataaccatttccaactaggcctttctgagaatcaagagtggttcgcacgcaatcttgatctcaaaaaagtgctgcaccgcgcactgggcgatgatgtcgatcctatcgaactgaacatgtcgctctggcatctctatacgcaggttattcagaagaagaacgatattgcgttaattggcagtgagactgctttgccagaggatgagcaagacgaggaggttacctcgccgcaattgccaaaaaatactattctctacggtccgccaggcactggtaaaacttaccgtacaatcgatctggccgtacgcgcctgtgaaccagtagcctattcgctgcaggaaggtaaagatgagaacgaaaaacgccgcgagctgaaaaagatttatgaccgcctgattgccgaaaagcgtgtgcgttttattaccttccatcagagttttggctatgaagagtttatcgaagggctaagagcagagaccaccgacgacggcaatgtgcgctacgaaatcaaagcgggcatttttaagcaaatttgtgaggatgctgcttttggtcacgccggtgttcagcagaagcttgacgaggcgcttgcccgcctacaagaacgtttatctgaaaatggaagtattacccttgaaacgcttcagggcaaagccttccaacttgcttacaagagccaggccacctttggtatcttcccagcccaatcgaaaaaagaggatttaggtcagggttacaatgcatacctcaagaatatcagtctggtttaccaaaaccctcaggcaaaggtacacaatccgtcatatgtacgaagtatccttaattacctgattaaacaggaaggtttaccttccaacccacaggagtctgtatctgaaaaacgtcaaaactacgttctaattattgacgaaattaaccgtggcaatatctccaaaatcttcggcgaactgatcaccctgatagaaacctctaaacgtgccggagaaccggaggctcttagcgtaatgcttccttattcttccaccccatttagcgtgccgaataatctctatttaattggcaccatgaataccgccgatcgttcgctcacggcattggataccgccttgcgccgcagatttgagtttgaagctatgctgccggatattgatgtcttgaaagatacggtaatcaaagggattgatttgccacgccttctgcagactctgaatgaccgcattcaggtgctgtacgatagagaacatacattaggccatgcttttttcatcccagttgttcaggtaaaagaggacgaagagctggcatttgaaagactcaagcggattatgcgaaacaaggtgctgccactgctggaggagtacttctacaacgactggcaaaaaatccgtatggtgctgggcgacaatcaaaaaagcgaaaacccgcacctacaattcgtgtgtgaggtgaaagaccagaaacagtttgtggatctttttggcaatagcggaactgaagatctgcatgatatcggtgccagtttccatttggcctctgagagcgacgatgtctgggataatccgctcgcctggcaacaaatttatgcaccaaaaaatagtaatcctgggagcaggggatga

SEQ ID NO: 100371 - DNA, 222 bp, Enterobacter aerogenes
atgctgttaggtagtgttgattattactcaaaggccgatgtattcactattacgcttaaccctaatccagtacctgattatgtcactggcaccacatcaacggatacatgcacctgtactactaccgccagcaatcctacttatgaatggacttgcttaattgatggcgtattgaatcagggggtaacggctgagatcaaggagctaatacagctaccatga

SEQ ID NO: 100372 - DNA, 648 bp, Enterobacter aerogenes
atgcttacaagtctggaggatttggagaaaaactttcatttgcagaaggttcatttttccattcaaagaattcaatttgcattagaatcctattctaatttcaacagtcttgttcgaaaggaactggattatgctgtaagtaaattggaacaaaatggcaataaaattacatttgaactctctgaggatcagttaactttatatttgctttcgtatattgaaaatagatatctgggtctcgaagccagtcacgaaaagaatcagcgagggcactgtgatatatctattacacttgctgattatatctggcatggggaagcgaaaaaacattcttcatatacatatctttttaaaggctatgcgcaacttaccgagcggtatagtaccgggaccattaatagctcttcgggtggtttgattatttatacgaaaaatgtttcctgttctgatatgatgggtttatggaaaaaattcttatcaaagaatgctcccagaattcatgcttgtaaatctgttaatattattgattgtcaaaaaaatccattagttttttatagccagcatcttcatactgtaagtaaacttgattatcaagtcgtgcattatccagtatcattacatcataaacctatagacccggatctatag

SEQ ID NO: 100373 - DNA, 429 bp, Enterobacter aerogenes
atgaaggatgctaacttggcaaagaccatacaagacatatgctccgaacgcccagaagtgggtgttttggcgtgcatgtttcatgagaaacttgctcagttagcacaccgctcccctaatatatttattagttataaattattgtttgatatagcactttcgaataagggtgaggctaatgtagatgagcgtgatgtttacttagctatccaagttttgtgtaatccaaaagttaattttctgaaattaaactatcaatttatagaagatggtttcgaaccggttaatataagcattgcggatgttattgatgctgaagataatcaaggtttagaacatccatatactggtgagatcgtgccagattacaaaaaatatgtatttcctttctttacagttataagtttcacaagggaaggtgcgtgctaa

SEQ ID NO: 100374 - DNA, 1107 bp, Enterobacter aerogenes
atgacaggaaatgccccagtagtacttagtgaagcagaaatgaaatccattttgacactaatcacacgattcccatggaacgtggcaaaacctgttatttcagctcttgggttagctcgtggtaaaggtagagatgcaactcatgaaaaaatactggaagagttaacagagctaaaagaaaagaatttaaaaaaattcaatgatatcattcagtctgtaaataatttaatattcggtcaattagtatatggtgataaagcgttttttaatatggcagttgataatcaaatagtttcatcgctaacaaaggctattaaactagaatgggatttatctgcacagccttctgtcgcctcagatgtaattctttctgaacaggaacttaatgcgtcggggaagaataaactagatttgattcattattctgagagcggtaatcaggcattagctctttttacttctgtcagagaacaaaaaattagagagagaatttcgcctaaaagcttaccgcaatatagtggctacgaagaaattattgctactaaaaaagaaaaacatcaatgttttgatgtatgtatttttgataaagctaactccactatctctattttgatagatgcaggcaataatacaataggcgatagcgtcttgtttgcaaagagtactgtggtaagagaactttataattttataggtgctgagtttacgtcaaaggaaaaagatttctttcctttgattgatccaatctttaaacaagatcaaaaaccatattcgactctcaattataaagtttttgagctttcattccttacccctgaagggacaacacataaggaaagaaaaacggatactactaaagatttgagacaagatatcttcaatcaagaaggtattaaagctgtaggtaatatcggactttatagaataggcattagggttgaacgaacaaatcctttactacagttagccgacaatgtagaacttacgataccaggaacgctaagacggtaccttggtggaagttcaggctcaccagtgaattttgctatacttagtaaatgtatctctcgtgatgatttcgaaacacttacgaagctgatactatag

SEQ ID NO: 100375 - DNA, 807 bp, Enterobacter aerogenes
atgaagaaattaactggcgtaattgttcttgctctgctgcttactgcttgtgacaaaccgaagatcgatgcatcaagtgatcagtcgatgaaagagtccattcaaaaggtaagggagtccttacctgcagataaaaaagctcagtttgatgatgcggttaaagtcgttgcctttagccaaatcaacgtgagagagctaatgcaagctggcgcgtcttctggggacctgtacgaaacaaaaattaagactgcgctggaaggtaaaactggtgatgaggttataaattacgcagaaactattcgccttgagcgtgagaagagggagaaagaacaggctctgcaagaaataaaagaactggaagccaaacaaacctcggcggcacaggcagctgaaaaaatgaaagccttcaaggtcgaacgctcccgtttttatttccagaaagagaattacggcaatgaccagccaattttggatattagcgttgaaaacggaacagacaaagcagttgctagagtattctttaaaggagttattgcaagcccaggaagaagcgtcccttggttctctgacgtcttcaactataaaatttctggaggtttggaaccaagtgagaaagccaactggaaattagcccctaacaagtactctgattggggaaatcttgaggttccggctgatgcagtatttaccgtcacagtcactggccttgaagacgctaatggaaaatcgatctatggtgacgccgagttttcagaacgcgatgctgatagactgaatcaactgagagaaaagtacctttctaaataa

SEQ ID NO: 100376 - DNA, 177 bp, Enterobacter aerogenes
atgtaccctgtgctgtacaacacattcgccaaccactttatgatgaatggtggaaacatacttgttttgagagatattttgggtcattctgatatcaagatgaccatggtatattcacacttttcaccagatcatcttgaagacgcagtttataaaaaaccactcaactttttataa

SEQ ID NO: 100377 - DNA, 1743 bp, Enterobacter aerogenes
atgaaaacgcagaaattcgtaagtgaactttttttagaaaatgggcaatttattctagttggcttaactgggagaactggttctggttgtaccacagcagcaagtattttagaaagtaacgagacagtttttcctgatgtggataaattaaccgatttttatagtggtttagatttacaaagatataagatagtcaaggatttcactgaaaatcattgggaggcattttattcaattaaggttagtgatttactatcggtttatttattagcaatgccacaaagtgagctttcagacttcataatatcttcaactagcgatagcattgataaagatgaattgaacaagatacttaatgaaggcgcattttcaaaaacacatcttagaaaaataaagacggatatcttaaaagcacttatcgatcatagtcaagaattagatctagataagctagatgtatctaatataagaaaaacattgcatttggttaggtttttcactaataacttcaaaaaagaacttaatgaaataaatacagggctttatgtatcaacttatcaggctgctggaaaatcagttagacggcgtggtgaaataaaaacaaattatgaggcagaagaatttgatccaaaatcggtatttcatttgcctgaaactatcaatagggtcattaagctaattagaaaaagccaagatggtaaggcattagtagttattgatgctatacgtaatccatatgaagctaaattctttaaagatagatatgctgcattccatctggtatcaattaatgctccggatgagcataggaaaaaatatttacagaagctacataagttttcatctgagcgcattaaacacattgatgatattgagtcaggtaaaggagataaagacaatcaatataaacatttaacaaaccctaatgtaactaaatgcatagaaatttcggatatacatctttttaatcctaagaatgagtttgataataataacatacttaaagcacaacttgcatggtatatcgctctaatgaagcatcctggattgatcactcctacagcgatggagcgagttatgcaggttgcatatactgttaaattaaactctggatgtatatcgaggcaggtcggtgccgttgttacagataatgataattctattaaatcagttggttggaatgatgtggccaaaggacagataccatgttcaatgagatcactcgatgggttgatcaatgattttgattcgaaagtatatagctcatatgagcgaaatgatgctctttttagaaagaaagctaaaagtaatttaataaagtttagagcgattgaatcaagttctgaaatttttaaaggacggactttgtcatattgcttcaaggatattcataatagtctagatgatgataaaaaaggtaatcaggtccatactagagctttacatgctgaagaaaatgcctttttacaattatctaaatatggtggcgttggtgtgcaaggtggtaagttgtatactacagcaagtccttgtgaactttgtgcaaaaaaagcatatcaactagaggtcgatgaaataattttcattgatccttatccgggtattgcacaagaacatattattaatataggtaataacccacctaagttaattcaatttagaggggcgattggtaaatcatatcatcgattatatgaacaaattattcctatgaaagatgagttggattatttatcaatgtaa

SEQ ID NO: 100378 - DNA, 888 bp, Enterobacter aerogenes
atggaactgaacttatgttggtggaatattggaatatctccacctgtcaaatcagaaaaaaaagataaaacagaagctattaatctggctaaacattatataaagaaaatttcgcaagaaaagagtgttgatttctttggtatttgcgaaatttcagacgatcaagcaattgactttaaagatttggctgacaagctacatctagagtacctagatttatctggcacggtgggaagggtcataattgatatatcaattatgtatgaagcgtccaaattagaattcatatcacacaaatacatcacaaaaatacagccagatgatcgaacattacgtgttggtgttagaactgtattcaaagacattaaaacagataatctacttactatatttctatctcattggccgtcagttttaagtgcaacagaaaaaactcgagaagatgtagcggaggcattacgtaataacattacaaaaataatggatgatcacgggagtgactcccagataatatgtatgggcgattacaatactaacccatattctgtggctataagtgataagctatatgcaacccgagactaccaccagatacggaagaaaaggaaactgctgttcaacccattttggtatcttctttctgataaaaagacaaataacattggcacttatcacttcaaatcaggctcggccaacagatggtatgtctttgatcagatgctattttcttcttcatttctttttggcggcgataattgcctacgattagatatgaatagccttgattttcatcgaatcatgagtgaggataacctatgtttagatcaacgattctttaaatcttttgatcattaccctatattttgcaggattcatcatgaccattaa

SEQ ID NO: 100379 - DNA, 432 bp, Enterobacter aerogenes
atgaccattaaaaacgaagagcttataaatagattaagaaactcattggaaaaggcaaatgcaatactgaagttaaaatctaggatcgaggaggacatgtcttcagtattagatatactaaaaaatttaacttcagactccatcgattattacatcatggaaaacgacccagttatcccttcatataaagacggccagaagctaattcgattaaaaaagaaatcgaatagcgattactctttaggaataatactatttggttttagcatcaacgattcaacaggttatcccttacagttagaaaccgaaaatgaatattttgaatgcagcgatgttgacgaaatgaaagaatgtgttgctatcataatagaaaaaaaatcaatagatattatgaaattaatatcccaagacagtgactttattccattctag

SEQ ID NO: 100380 - DNA, 1656 bp, Enterobacter aerogenes
atgggcattatgatacagccaacaaagaaccgtttcggcgtttaccacattcgtaaagccgtccctaaacacctgcaaggcatcctcgataaacgagaaatcaagttcactcttgatactaaagacgtgaatgaagccagagctcgtgcacccgccaaaattctcatgattgacctgatgctcatgcaggcagaaaaacgactcgaagctgagcagaccttaactgatgcggatatcgagctgattgccggtgtatggacatcaaagacgatgcagaatgacgagcttatccgggagcggtatatcgttgaggagcagtgcaacggtaaaatgggactggctcactcccctgaaaatgagctaattcacgactggctggaagaccgcgaacgtaaaccccgctacaagtcagaaacatggcagagagaacgtgacgaatccatctgcaaactgatggccgtagagctggacgaagcccttgaatacacgcctgtcgtccttactccggtctggcgaaatcgtctggcatggcgactagctgaacgacgtagcgatctgaccaacgcctatctactgaatctccgtccccggctctacgccaaaagcaaagggctggattcactccccgttgaaaaaacgaagacgctgaccttcgcagacctgtttgtacgttataaagagcacgtcaaacatcatgagccactgcgggcggaaaaacgaattatcgcctacacggcatcggcaaaccgcttcatcgagtttatcggtctgaaggccgccgaagacatcaccgttactgatctcgctgacttccgtaacctgctcgaaaaactgccatcccgcccgccaaaggctgtgcgattgctccccctgcataaacaggtggaagctgaaggtgaaaaaatcagccctgtccgcgtcgagaatatcatgaaggagctgtcgtcggtcttccgcgtcgcggtagaagacggcaagctcacagataacccgcttagcaaactgaagaaacgcaaagccatcgctggcccggcaatcatccgctctttcagtcgcgatgaaatccgccgcatcttctccctgcctgtcttccacggtgaagatacaccgcacggggcaatggcgtactggataccgataattctctactactgcggtgcccgcgttgaagaaatcgcccagctccgtaaaggggacatcgtggaagtggacggtaccccctgtttcaggctcgcgatgggtgaaggccagtcgatcaagatgggtaatacgcgtcagttcccgatacacagccacctgctcgaactgggcttccttgatttcgttcagtcctgcacctaccagctctttgccgaaaaatcggaagtaaacggatcatattcctataactatgggcgctggtggggcaactacattcgtgaacacggcctgacgaggaacggcatcaagcccacccacagcttccgccactctctcgttaccctgttccgtgatctggacatccgtgaagaaattcaggacagcatcctcgggcacaacgaaaactcatctgacagagcgaaggccagtcacggctacggagagaagtccgtggaggcccagcgtcgtgccattgaacaaatccccaggctgaagctaaagcgactggaaaactga

SEQ ID NO: 100381 - DNA, 936 bp, Enterobacter aerogenes
atgttaagaattcctgataccgactggcggaccgttgacggggccccccaagtttccgtggcttttttgcgggaaatgacgcctcaggcatccagatttactcaatggatagagcgaacacgtgccagattgcttcatgcccccgaaaatgtcctgtcgtgctgcacatccgggctacttgcgggagatattcccgacaaaaaaggctggctttccgctggtgatgcccttgccctgctgacttacagcgtccactccagccagaatgggcttctcattcatgccattgagcaaaaatctggtctgatactcccggtaaagcccggtgaaagccgtcttgagggacaatttggcgtcaaattacacgatttgatcgtcgaactcaggcaacaaccacgattcacacattatgaactcgaacggcaaaagcaggtcggcccctacagagtggatttcttcctcactgagcagtggtacaccgatatggcaaaagggaaaactgctaaacgccaattcatcattgaatttgacgaggaggctcatagagcaacacgttatcagctcaatgataaacgacgggatcggtggttacggaaaaatcggcccgatgtaaagctaatcagggtcagacatgcagagcaggaaacatggctggaagcggtccgccagctaaagcggttcatcagtctggaggattgctatgcccactgtctgcgaatggcctgtatcagcctttctgaatcaacactaaggataagcagcgagtcggcccggaaagcctatgatgcaaccaataacgagtgcagttttttgctaaaaagcccacgccagccgctcagtgagatgggtatcctgctggaaaggctgacaatcccctttgataaacgcaggaacagatactttcaacgtgcgaaattgaggtcatacggaatttaa

SEQ ID NO: 100382 - DNA, 1203 bp, Enterobacter aerogenes
atgaaacaacagcaactcaaggagttggtcgagcaagctaccattttgcaacaggccgaagaggatgatgcaaagcttgattccgttttgcaatcgtatggatggggttatgatgaccttcgttacgaggactcttatgagttagcgaaagatacgtctttagaggaatacgtaacgctggataaattgcaaaaacccgtacaccatgtccctatggtaagttttttcgctggggccggtggactagacctcggctttgaggcagcaggtttctcgcatgatgctttagtagaactaaacccaattttcagtaacacattgaggcataatcggccaaattggtcagtgattggtcctccagactggaaaggggatgtgtctgattttgaagatacatgcaaagctttagccgaatgcggtgtgaaagctgactatcctggcgtttttgtaggggggccaccatgtcagccgttttctatagcagccaatcaacgttttagtaaagatggcgagaacttcaaacgtgttggttttgctcatgaaaagaacggcaacttactctttgattacatcaaccttatcattaaatacaaacctgccgcgtttcttgttgagaatgtcgttgggcttttagaagttgatgatggtgttcagctaaatcgagctatcgagatgttgagtcaaagtggttactctgtcgagaaaccattgattctaaatgcttctgatttccttgtgcctcaacatcgcacacgaatgtttttagttggcaataggttaggtaaatctttcatgcctccgctaaaagctgataaaaaggtgccctgtgcagcagctctatgcggagatctaagcaaattacctaatcatgtaactagaaagcatcaagcatcatctgtcctacgttacgtcaaattgccttttggcggtcgagacaagcttggccgagtggatagattgcatccaatgcttccttctaagacagtcatagctggaggatcatctggcggcggtcgttctcatcttcatccgtctatacctcgtacgctttcggttcgggaatcggctcgtttgcaaacgttccccgatgattatgagtttacaggtacgcattctcgacagttcactcaagttgggaacgcggttccgccagtgttagctacccagttggcttggcagatttatcagtctttctttagctga

SEQ ID NO: 100383 - DNA, 1227 bp, Enterobacter aerogenes
atgagcagatggcgttgggatcaaggacgtttggattatttttctgttgaaagcctaagaaaaattgcgtcagtttttgttgatattgatggggcagaagacaccgaccccgagtatgatcccctccgagagccactggtgcttagaactgaattaccgttttcacctgatagttacaaagtctggcgtaactatgcccgagtgatcaaactgggtttgatcgcgtctcgaattgatggtcgttatcactgtactgatattgctaagtcgctggcttcgggggagatggctagtgatgcagatagctatcttcttacactagcgaaacggactttttatccttctcctgcattcgaagggttcgacgcttcactacagcgtgtttacccgatgctggcaattatcaaagtgttactcacggggcgatttgatgtgaatggcctgtctgctagagatgtatgtagtgtgttagttggtaataatgctacaggtttagaaggactcgagttctattcatctattggtgaaacaagccgggcacccgaaggcgatgaacttcgccagataaatgaaatgatgaaagtaatgagccagataagcttccttttttggcagcaaggccatctgtttattgacccttctatctcagcttcttctaaaaccgatttataccagctgctaagtcctgatgcgattgtacaagatttacccgatgaacctgatgctgctattttaatgatgggatcgttggacagctcaactgtgctcgtatcagaggccgttgattcacactttgtgaatctagatgaggatagctatcaatctgactcaactcaggcacaacagacattccaagaaggaaggcgaagattaatcaaccactatcgggtagagcggaatagaagattaagagagcagtttttaagttcgtcttctgaacctgaccgctgtgatatgtgtcgcaaaacctcacatatccagtatccttgggtaaatagccttatcgaagttcatcacaagttgcctctagcatctacggtcagggtgcaggggaatagtaccttattgaatgatcttgtaggactatgtccatcttgtcacaaggcagttcatcaatattaccgtaactttttgcgtgatgaaggcaagagcgattttacgtctaaagaagaagcaaatgaggtttatgagcgtgcaaagagcctgtatacttctacagatgtttaa

SEQ ID NO: 100384 - DNA, 345 bp, Enterobacter aerogenes
atgctgtatgccgcgctggtgatgagcgtggtggcgtggctggtgccgcagcgcagcattgactggcaacctggggttttttgggcactggcctatagcgcaatcctggcgacggcggtggcctggagtctgtggctgtatgttctgcgtaacctgcctgccagcgtcgccggcctgagtacgctggcggtaccggtttgcggcgtgctgttttcctggtggctgctgggtgaaaatccggggctagtggaaggcgctggtattgtgctgatcgtcgcggcgctggcgataatcagccttaaaaaacgtcaacctcagattaccaggcaaggtattactcgttaa

SEQ ID NO: 100385 - DNA, 582 bp, Enterobacter aerogenes
atgaatataattactcagtatgggaaagagattttcgcactttttgttcctgtttttaccttgattttgaataagtttttcaagaataacgccaaaatcacttatgggaaattgcatcagtttagctatttgcttaatgaaccgctattggatgagcataatgaggtcataaacccgaaacaggttgttcatacacaatcattcatgttttcaaatgtaggtagggaaccggctaacgcagttgaaattgtgtttaacttccgtccaatgtatatcaatatttggccgtcaagacactatttggtaaaggaggatgctgaggggcggcaggtcttggtctttgactatttatcaccaaaagaaatgatccgctgcgagattatgtccataaacagggatctgcctgagttgctctccgtaaggtgtaaagaatccctagcgaaatgcataactattgtacctcaacagtcatattctcctcttttaatcaacttaattcgtttcttgatttttcttgggtctgtcagcttcatctactttgtgatggtttcattacagtggctacttgtaaaaacaggctag

SEQ ID NO: 100386 - DNA, 1080 bp, Enterobacter aerogenes
atgtcacgaagttttgcggtctgggggtgtagggattatcatagtagttcaggctcgacctacaactctgaacataagaatttcattgaagagttgcatattaatttttggaacataagcgctcataaatttggctatttagattttggcatcacattcaaaaagcctgaagatgaaaccattgctaagcatggggcaatatgtatattcctaccattcgaaaaagaaaataattttttttctgatcttagtgaaaaccttgaatcaagcagagatctcgtaactgcggttttcaatgaataccttattgacactaaaacagtagatggtagacatttaaaattagtgctcgctaataaaggagacttagttgttaatactaagttatcatttagcggtggcgagcttgaccatagagtcaagataacaaaaatccacaatggcaccttactagccttcaaactcaaggattgtctctcttccgaagatgcttgcaatcactatttaagattccgtgttcaaattaataaagaagatatcggtcttttagtgaaaacattttaccccaaagatctcttccttaagagtagtattgagcggtctgatatcattgattttagggttaatgagcaaagaaatctgccctccgaaatagccacaactcttgctagcgccgcttgtacccccttgaaatgccatatttttataatccgcgatatggttgatgactgtgctgcatccggttcaaattacaaaggttcaagaattttagagtctgagacatggacaaaatactttagcaaaggcgtatctttcgggtctcatgatccaatgatatatcattggaaaatatcgaatgatataaattcgagacttaatgatttttctgtcgtcgtaaaatttaaaaatacgaaatctaaactaagcaaaatatttgcatacattttctacggcgcggcaataacatttgtcatgaaatttatcccaacagaaagcttagataaaaacatatttatttacggttcactatcgttaatagcattatatataatcgcacatttcattaaatttagaaaatga

SEQ ID NO: 100387 - DNA, 1074 bp, Enterobacter aerogenes
atggaaaatttaaagcacattagttttaatgaagtaaactttgacgatgttttttttgactcattgaaagctgactataaagctggttttgtagaatggtttcacaaaaaagcaaaagatctaagagaaaaagcatacgtgctctacaatgaggatgattcaattgatggattcatgtatctcaaaattgaagatggtgaggttactgatgttaacccttcattggctgatttaaaacatctcaaaatagggacctttaagtttaatacgaaaggtacattgcgaggccaacgttttttgaaaaaaatatttgaccacgcattaagtgaaaaagtaaacgatatatacgtaacagtttttgataagcatgattacctgattaaactttttttaaattatggctttataaaatacggaaaaaaagaatccgaaaacggtattgaaaatgttttagtaagagaaatgagcacagatgatctcactggagaccttcttgccgattatcccttcatcaacaacagacataaagaaaacaaatacttactatctatttatccagattttcatactcgtctattcccagactcaaaacttataactgaatctccagatattattactgacgtgtctcacgctaacagtataagaaaaatttacatctgtgccatgcaagatgtagtaaatataaaaatgcatgacattctcgtaatttatcgaacgtcagataaaaaaggtccagctcattatcgttctgttgctacatctctatgtgttgtagaagatattagagatattttttcattcccaacagagcaagattttattaaatactgtgctcgatatagtgtatttaccgaaacagaattgagaagtttttataaaacaaagaaatacccctatattataagttttacatataatcttgctttaccgaaaagaatcactcgtgctaaactaatagaagacgttggtttaaatccgcaagcatattggggtgtattaaagttaaccgacagagaatttgacaacattattaaacttggtgctgtagatgaaagtattattgtcaattaa

SEQ ID NO: 100388 - DNA, 372 bp, Enterobacter aerogenes
atgaaagtattattgtcaattaaacctgaatttgttgaaaagattcttgatggaacaaaaaagtttgagttcagaaaaggaatcttcaaaaatccagatgttaaatctgtggttatttattcaacaatgcctgtagggatgatcgttgctgagttcgatattgccgatgttattgaagacaaacccagcaatgtctggaaaaaaaccagtcgttatgcgggtatcagtaaacaattttttgattcttactttcaaagcagggataaagcctttgcgattaagatcggtgatttgaaagtctatgaacaaccacgtttgctaagttcattaggtgacaacataacagcaccgcagtcataccgatacctatga

SEQ ID NO: 100389 - DNA, 726 bp, Enterobacter aerogenes
atgatggtcaaattctcatttaaagttccagttttcgacttctccttaacatttgacattatcgaaacattaataactcaaagtgaatcctcaattgaaaaagggattgcagagtataaagaaaaaggcccagaagaatatgtaattgacatctctcctgaagaaggactttatcagtccattgatcactatatgggtcttgatagttcatcagttgatctagatgagatgtttctggagtattacccaagtgtatttaggaggtctgttttcttaactatcttcgggatgtttgagcacgaaattgaaaaattctgcaataatttttcaagcagacaccaacccccaataaacctttcagatcttaaaggcagcggatttgagagaagtcatcttttcatcaaaaaacttataggaatgagttcaacggctcactacccagccatcataaaaataacaaaactaagaaatagttgcgcacacaacgatgcaaaatatatagaaaatgatgggcaggatagcaagcttattatcgaactgatgaatgttcatccggttttattcaaaaaagatggcaaacaagttctttttatgagtggcgtattgaccatggtcttagacgccttcaaatcgtatctaagtgaagttgagcaagcagtagatgagtacgagaagaggattcgaagtggcgacaaagtggcgacagcggttggcattgccccgtaa

SEQ ID NO: 100390 - DNA, 1116 bp, Enterobacter aerogenes
atgactattattgctggcatgagttttaatgattaccctgtaattataagcgatctattaattaccagtgataaccataatcaattttcaaatagttcaatacctaccctgtctgactgtgagccacatttaattgattcaaatttttccatttacggaatgatgaaaaaaattgaaataataaatgaaaaatttgtaatatcttgggcaggtaatgtatttgaggcaattaatattataaaatcacttaaggataaatttgaaaaagtagttccttctgatgaaagtattcttttggagataggctctagcaagaatgtttcttttatttggagtgttatcagagatgaatggccaagattaaattcatataacgctgaggttaaagaaaaaaacataaaatcatttgataaattaatttattcagggactggtagtgaagccattgaggaggctatagatatttttgagaataagcatcctgtagaggatgtcgaaaatttggttgttgattccgtatgtagttgtctttttatgttcagtcatttaatgaatcacgaattaatttataaaaaagactccaatactctaaaagatcgtttcggtggcggttatgatgttgtgtgtttttatgacggtgaatttcgaagaattaataacataacttatctatatcttgatgcatcaattacgaaaaaaggaatgatagaaatagatggttcaggaacacttataaaacaattaactgatgatgaagcaatgtatatcagaaaaattaactttgaatttattcatagtatagataacgaagttcttgccacaaaaataacagaggatgatagttatgacttaactggtaaaatttctaccagaaagagcgaggataaactgatacaagacaatgacttagcatcgtctttcatgtgtgttaatgttagagttaaaggttctgataaaggtagcatggcttatattcataagtatgcgaatagtgcctcggccgcagaaaaatcaatcaaatttacttgccaccacaaatttttggctatcaaatttaatcaaaaatactggagcgaatttacgagaaatattctagaattttataaaggccaataa

SEQ ID NO: 100391 - DNA, 456 bp, Enterobacter aerogenes
atgaataagaaagatttaattaattctatagacattagtgagttgaggaaaatatcaagtgtaatcgcatcatatgaagtgcttgataacataaaaaatccagacgacatggcatcttatctatatgaaggtggcaatgatttattatttgcatctaatgaaaatggtaatggaacagaagataaattgccaaaaaaaatgtggatcttagtcagggatgagatgaattcatttttgtgttctgatgatgaaaagtataaagggctgtgggagaagataaataatttagagaaatttaccacagtgtatgtggtaacttcaatttcattattcctttgtagtaggcttggctttagtgagtcagcggcaagcggagtagggcaatttgtggcgatagtcttattcttttttttgaagtttgggaaggaagtatattgcaaaattaatgataaatag

SEQ ID NO: 100392 - DNA, 336 bp, Enterobacter aerogenes
atgaccgatcaatcaccgaatagcgctattgacaacgatgcgctggaaaaagagaccatgcggcgggttatctggcgcatcctgccttttctggtcgtaagctatctggtctcgattattgaccggggcaatataggtatggctgcgctacagatgaatgaggatctgggcctgagcaaggcggcttttggcttcgccagcagcttatattttgtcgcctactttatatttgaggtacccagcaacctggcgatgcagaaggtgggcgcgcgactgtggctcccgcggataatgatcagttggggagtggtatcgatgtgcatggcgctggtgtaa

SEQ ID NO: 100393 - DNA, 1083 bp, Enterobacter aerogenes
ttgaaaccggagcagatgaaaaacagggaagaattaaatagctttgcaacaaaacttgctactcaaatcaagatgcatacccgcagcaatttgaatgatctttctacagcccaagagagttcgctgttgcctctaatcaatcatgcttggggagaacagtttgagaatatgaataggatatcccaaaactaccctggtctcgactatgggcaaccgggaaagcgtttaggtttgcaaatgactgccacagtaggaaaggttaaatatcagaaaacattaaaaaaacttcgggagaataaggagttaaagggtaagtttgacgagatttggtttttcgtcctcactgctgaacgcctacctgataacgtacgtgaataccctgacgattttcagtgcaaatattacacattgcacgatctggtcgaaatggtaatggcacagactttagaatttcagcgtgattttttgacccttgcccggcaagaatactcggattatttctctcctggggacattgctttcaatcaggggtattgtgtatcagaaaataagccgatcccctttgacttgaaccttttcaactcgttgattgatactaatgaatggtttgattatgttgccgaaggtgagcagagcgtatatgaatttctagaactttttaaaaacagactgcgtcaatgcactttatccgctagaaagcttttaagcataattatcagtgagataaatatgccgaagagtacaagcacgaaaatagagtttcctgaaaagctacttttcggtccactaatgattgacgatacaaactatcaatgtttttcaaaaaaccttgatgatttgtccgagatgaatcttattgaacgatgggacaattatgtggagatgtactataagggtgatgatgcatatttaaaaactgagcgtatgatcagcgtatcatttcaaaagaatgaacccgaaatgaatctgtatgcggcgttatatatcttttatgaaaaaaatcatgatgttgcaaagcttgtaaacgcaattgaaaatagtgatttttctctgctcgctgacagcgcttgccaaaataattag

SEQ ID NO: 100394 - DNA, 567 bp, Enterobacter aerogenes
atgataaagcatatccgtatttttcccggcgggctgacggtgctggccgccgtttttctctgcctgctgacggcctgtcgcgatcacagtcgcgacggcatgagcgccgccgacatagctgtcttaaaccacggcccggacgctatcgtttcggtggaggtcaacggctacggcgggccaagagcgaactcctacggcggcggcggcttctgctgcgtgatggtgccagatgtctggcgtccgggcctgacggcaaaaatcacctggacctctgaccctaactcctggatgaaatccagtgagatgccggatgattatgaaactcactatcagcgccatgggccgatcacggtgcctattgaacgctgggaggaggatcaggcctgcggctttgatatccatattttcccctgcgataaagtgcggatagtgcgttcctgctatggtcgagcggcccctgaatacccaatacagcctgaccctgacggaaataaaaaagcacaaaatatactttataatcacgttaaggagaacatcgtatgtccgacaccgcagactccacgttga

SEQ ID NO: 100395 - DNA, 1008 bp, Enterobacter aerogenes
ttgaatgtgattagatttaatgccctcgatggaattcgtggtatcttggctattatggtcatgcttagccatatgattggcagttttgttggttggacgtcgataaggccatttagtggggcttacttgtgtgtggtttatttttttattatgagtggttttgttcttacttacgcgcattcttctgggagtttttttaaatatttactaactcgttttgcacgtctctggcccttgcatcttatctctaccctgctaatggtattaatatattattataatgcaaaacatggctactatgtttccagtggtgacgtattctctacgctcacgattataaagaatttattatttcttcatggtatgtattggaacgacttccaattgattaatgaaccttcgtggagtattagtatagagttttggtgctctctactgattcctctaatcttcatcaaattaaacatctttacccggagcgttattgcctctgtgattttcgtgttcatgtggagcaagttttcgtctgggataccgccatcttttcttaccgctgtcctttcaatgttagttgggtccttgtgtttttctattactcaaacttcaccttttttgagtattattaaagagcgttttacatctctttttattactgtagctgtggttgccagtattattggtgtatacgcaatgaatcatagtcgcctcgattactttctatttatggtttttatacctgtattattcatcgattatctagcagatgagaaaataataaaaaaaatattcacttcaaatttgtttctttttttaggctacataagttttcctctctatttgttacatgagttgattattgtctcaggattcatattcgatgaaaagaatgtctggacatccatatctatgtcagctatggctgctatatttatcgcctatttatatgcgcgatttattgattatccactctatcgttacttaaaaaaacttatttctaaaataaactaa

SEQ ID NO: 100396 - DNA, 1380 bp, Enterobacter aerogenes
atgattggggggaaattgccggaggggtgggttggctctagtttaggagacgtacttgatgttaatagcggagtaggttttccaataaaattccaaggaaaaaacagtggtgattatcctgtatataaagtaagtgatatatcagtggctgtaactaagaataatggaaatttaagcactgcagggcactatatatctaaagaagaggccgtagagcttaaaggtaaaatattccgtccaggttccactgcttttgctaaaataggtgaggctgttaaattaaacagacgagcaatagttcaatcacctggtttagctgataacaatgtaatggtgatcagtgcagtactgcatgaaatggataagtttatattccatttcatgaatactatagacctttcagaacaggctagatcaactaccgtaccttccatcaggaaaggagatatagaagatatacgattagctctcccttcgatttccgaacaaaaaacaatcgccgaaaaactcgatacgctgctggcgcaggtagacagcaccaaagcacgtcttgagcaaatcccacaaatcctgaaacgttttcgtcaggcggtattagctgctgcggtaagcgggcgattaacaaaagtgtggcgagaaaagaatcaagactcaagttcctcaggtgaatggcaacagtttgcattatccgaacttggagttttgtctagaggaaaatcgaaacatcgccctcgaaatgatccccgtttatttggtgatacgtatccatttattcaaacaggtgaggttgcaaatagttcaggaaggataaaagcagccacgaaattttatagtgagtttggtttatctcagagtaaactatttcctcaaggaactctttgcattactatcgcagcaaatatagccaatacagccatactagatattgatgcttgcttcccagatagtgtagtcggattcattcctaaaaaaaacaaagctcatattttatttattaaatatttaattgatgctaataaagaagatcttgaagcatatgcaccagcaacggcgcaaaaaaatattaatttaaaggtgctcaacgatctaagattccccataccagatattgaagaacaacacgaaatcgtccgccgcgtcgagcaactcttcgcttgcgccgacaccattgaaaaacaggtcaacagcgccctgacccgtgtcaaaagcctcacccagtcaatcctggcaaaagccttccgcggcgagcttaccgcccagtggcgtgcggaaaaccctgatctcatcagcggtgaaaacagcgccgccgcgctactggaaaaaattaaggccgaacgcgccgccagcggtggtaaaaaaacctcacgtaaaaaagcctga

SEQ ID NO: 100397 - DNA, 6321 bp, Enterobacter aerogenes
atgactacacgctatttttcttcgctgattgaacagtcgttatctcgttcgacggaagctacgctgagcattatgggcgtaaccaacccgtatcttcgtgagcaccttacgcagcagatggcggctgaatgtggaaaggatggaacatttctggcttctcccgtgtttgaacaaacatttggctggaaagagtcaaatttcacgatgagggagcttgccacaaagcaaacgttactgagtaaagaggttgttgattctctcgataacgaagaaaacggacgttatcgttttggctcaacctggaaaccgttcacacatcagttagccagctggcaagcattacttgataaaaaacattcggtggttgtgaccagtggcacgggctcggggaaaacagagtgcttcatggttccggtgcttgaagatctttatcgcgagctacgggacaacgggggaaaaccactaataggcgttagagcccttttcctttatcccctgaatgccctgatcaattcacagcgtgaacgtttagatgcctggacccgaggttttggaaccgggattcggtactgtctgtataacggtaatactgaagagctgcatgcctcagtaaaaagtgagcaggcaaaccggccaaacgaggtgctttcgcgtgagaaaatgcgtgaggaaccagcccctgttctggtcacaaacggtaccatgctggaatacatgatggtgcgtcaggttgatgcacctatcattcagaaatcaaaagcggaaaaatcattacgctggatcgttctggacgaagcccatacctacgtaggatcccaggctgctgaactggctttacaactccgtcgtgtcatgacggcgtttggcgttacgcctgatgatgttcgctttgttgcaacatcggcgactattgccggaagtgatgctgaaaagcagctgaaaaaattcttatctgagttgtccggtgtgccacaggaacgtattgatgttctgggaggtagccgtgtcattcctgacctggcgccgtgcaagcatctttctctatccctggatgagcttgagcatattcctgattctgatggggaggggattagccttgagcgctacaccgcgctgacccactctccgcaagcgcgtcatctccgcgaaatgattgtgagtcaacccagaccgatgaagcttgatacgctcacccggcgtttgaacgagctaacaaaacatcaatacactcagcaggaaattttgcgctggctcgatctctgtaccggtacgcttcccagtgcgcaggaaccggcattcctgaaagtcagagcgcatatttttcaacgtaatactcaggggatatgggcctgcgtagataaacattgctccgctaaacacaatactgcgctggagaaggggtggccttttggcaatgtgtatgtaaatcagcggcaaagctgcgagtgtggcagccctgtttatgaactcgcgttctgcaatgagtgtaatgaaccgcatttacttgcccgggacaaaaaaggaaaacttgtacagtgggataataaaggtggggatgagttttcgctgcaggatgaagctcctgatgattttgactcctccagtgaaaaagttcaaaaagaacaggtattccagccaccccatattattgccgcggaatgtaataccgaactgggctatatcgtgcagcgcctcgatcgtcaaactcgaagtattggcgtagtcaacccggatagtattccgttggcgatgaatgatattgagcaggtctgtagtgccagcaactgcggttatagagggggtaaaggtaaacaacccttccggcgggcactgttaggcgggcctttttatgtgacgaatatcgtgcctaccgtgctggaatattgtcaggactttatcagtgatgaaggtaaagagggggttggcccgctttctttgcctggacgagggcggcgactgatcaccttcactgatagccgtcagggaacggcacggatggcggtgcggatgcagcaggaagcggagcgcagccgtttgcgtggtagcgtggtggatattctcggatggtaccaacggaaacagtcaacatatgcgccaaatgctcaggctgacgtaacgaagttgactgagatggcagcaaaggcacgtgaagaagcgaaaaatcttcatgattgggggatgccggaagaagcgatccgtcgtgaagaacaagctgagcgtttagagcacgccatccaggtcgccactggcggaaaagtcgatacggttttgatttccctttcttggcctgaaatggtcaaggaattgaaagataaggcggatatcaaaggtcctatcctgcagtataaccactatcttaaacccgaaatattcactgaaaatggtggccctttaaaactcgctgaaatgctgcttttccgtgaatttatgcggcgcccgaaacgcaccaatagcctggaaacacaagggctggttcaggtgggttatctggggttggagaaggtgcatagcatccctgctcattggcaggaaaaaggattaactctggatgactggcgtgattttcttaaggtcacgctggatttctatgtcagggaaagcaactacacccagttggacgaagatctgaaaaactggatcggtagccgtttctcttcaaaatttgtccgtaaccccgattcgaaagagcctgatgacaaccaggttaaacgctggccgcaaattcgtcacggtaacgtcacgcagcgcctggtcaagcttttgatcctcggcgctaaattcagcagcgtaaatacggtcacaatcgatatcgttaatgcgtggctaaaagaggcatggcttcagttgacggggtcattagcggtattgaaatccgacggcaaccgtttttatttacctaaagagcatctgacattctctctggtacaaaaagcctacatttgcccggtaaccaataaattactggcgacggctttcagaggtctgacgccttatctgccaatgcatattcagtttgaacggctgaccagtgcacaatatgacgcctttgtcgcacaggcggtgacgctgcctgagatttggcagcacgatcgttctcaggatgattatgtcgatgggttaagaaaagttcgtgactggcttgggcaggaccctctggtggcgcaattacgttcgcaaaacctctggacggacattaacgatcgcgtcgttgaaggtggattttactaccgcacggcagagcattccgcccagcaatcatccgaacgtctacaaagttatgagcgtatgtttaaaaacggacagcttaacgttcttaactgttcaaccactatggaaatgggcgtagatattggcgggatttctgccgtggtgatgaataacgtcccgccgcaccccgctaactatttacagcgtgccgggcgtgccgggcgtagcaaagagtcccgcgctatttcttacacgttgtgcaaaggcaacccgcacgatcggcaggtttttgctaaccctctctggccttttgaaacggtgatccctgcgccgatggtggcaatgaattctgagcgtctggtacagcgccacgtcaattctctgctgctgtcagactatttgtgccatgtcatcggtgaaaccgaaaaagaacgcaccagccttaatagtcagtggttctttggtgaagagcttgaacagtcggtgtgtaaccgtttcaaagcctggctggagcgtccgacgctcagcattgacgcggctttggttcgtttggttaaaggcaccgcgcttcatggcgttgcggcagaaaagctgcgggataaaacgtgcgacgcgattgcggcgctgcagaagcgctggctgggaatttatcgcgatcttgttaagcaggaaagtgaatcgcagcccaatacgccgtatcgcaaacgtctggagctggagaaaaaacggcactgcggcgagtatctgctgcgcgacttggcggccagaaccttcctgcctggatatggcttcccaacggatgttgtcacttttgataacttcactatggaagattatatccgcgagaaaacgtacaaagtccgtgataagagcgatcgtgaagataacgtctcgcgttataaaggcttgccctcacgcaacctttccgtggcgatccgtgagtatgcgccaggcgcggagattatccttgatggccgggtcttccgctctgccggggtgtctctacactggcataatcttaatgctgataccaatgaagctcagcgtctggatagcgcctggcgttgtcacaaatgcggtacgttaggctatgaggaaggtattggcggttcgggtgatttgttctgtaccaatgatgcgtgcggtgagcgcatcacgccggaaaaccgccgtcaggttttacagccggcgggttttgtgacggatgcgcacgatccggtgaccaataacattgagaccatgaaattcattccggttgtaccggcctgggtatttgttaaggccgagcgtgtgcctttgccgaacccgttgatgggctttatggcttccggggcggacggtaatgtgttccagcaaagtatgggggaaggcggtcacggctatgcgctgtgcctgagctgcggccgtgcagagtcgatgctcaaccccacggatgcgccgaaatccatggaagcacactatccgccccgtcctggaaaggccgaccgggacagtcagaatcagcggattatctgcccgggttcaacggcgctgaataaaaatgtcacgctgggagcgctggccagaacggatgtcttcgagctgattgtccgtcgcccgcaggacggagagtatattgctgataacacggaagaagggcgtattgttgcaatgacgctggccgtggcgctgcggcgctcgctggcgagcgtgctgggcgtttccgtagcggagctgggctacgcggtgcgtccggtcaggctggagaacgagcaatccgttctggcggtacagctgtacgatattatcagcggcggtgcgggctttgcttccagcgcgccattgcatattgaggccgtgctgaagggaatggtgaagcaactgggctgccaccactgcgataccgcctgtagcgagtgcctgctcgattcacagacccgccacgatcacgatctgctggatcgtaaagcggcgctggcctggctgggtgcggatttcagccactatattggtttgccggatgaggagaaattctctctggctgatgcacaatattgcccagggagcattgaagatactctgcggcgggccatcaacgatggggggcgaaagctcacgctgtggatgagtgggccgttgaatgagtgggatctgtatgcccgtcagttccgcaccgcgatccagaactaccggctaaaagatgatgttgaggtggtgctggttattccgcgaaacattgacgatccggagatccttctggaactcgcgcagttcacggcgataggcgtgcagctgtgccagtctgagctggatacggatacgccgctcgttgcgcaggtgacgtttgacgatcgcctgatgacgttaatttctcgcagccatgacgctaccatccccgggccgaactggcatctgaatagccagatggttattcgcagccatttgcaggcgccgatagcgctttataaagccgagttgccatccgaggatgcgggcagcaaaggcctggttaacgatattgaaatccataagcagcttaacggcccggtttctcagtttggccagcgtttctggaacctgctgactgagtctcaggatgatattcaacgcctgctgaaggaatgccgggtgacgcgtatccactatagcgatcgctatctgcaaaaccccgtagcgctggcgttgttaggcgggttattgaagacgttgaaaccgatgctgacacaagaggcggaagtgacgattgatacgctgttcaggagtaaagagcgcccggggaacaaaccgttccatgactggatgagtgaagcagacttccaggatttcgccgaccagtggtttgcggcatccatgggacgagccgtggagattcaggcgttcaactctggccgcgacattccgcaccaccgtaagctgatggtgagttttgataatggccaggcgctgaaaatccgctttgatcaggggatgggatactggcgtattaactttgcgcgagcctggcgtgattttaactttaatgacgacgtctctttccagctggggaatatggcgcaagcctgcgcagaaggccaggtagtgaacagcgaggagagctgggcaaccgatgtgctggtgcaagttatcgcaccttaa

SEQ ID NO: 100398 - DNA, 1749 bp, Enterobacter aerogenes
atgggaactcagtttttttcagtgcgtaacgataataatgaaacgttattgcgaaaaaaaataggtattcttcccaatgattttaacctggaaataaaaaatggagaacaagcaaacgaaggctcaatcattattacaactaagcattcttgctggtatagtttgaaggaaaaaacattggaggttggtagaaagcgattacctggtagcacagaaataatgatgaaaagtgagggcgttcccccagcatcgattttactacaaataacgccaaaccttgctgctaaccccattgttgtttctctccctttccctgctcgaggttgtcttgccttcgataaagacgaaaagcccctacccaaaaatttaacgattaacgatcttctgggagccagagcataccttttcggaaaaaatggtgaacctacgcgataccaacttgagctacgcttacgctcccgtagcggaatgcaggcatggtatgagtggcgttatagtgcgggcgaaagcccggtagagattactttatacagcttaagggaacatattgacaatttactttccctggaggaagggattgatcaaacggtggatatgcgtattgagggcggaggtagctctttcacctggcaaatcaggcgctataaatatagccttgagtatgaccgggaaaggcagcttcttcttgctaattcagtgagcaatcgtacggggcagatcccttcacccgttattatgttactcagtgaacccgaaagaaaggcaatattgcttgtgtctagaacaagcgaaggtgtaccggttggtgagttcgaattaagttcgacgatacaaaataatggcccatggctagttgttcccaagcaaggtgatgaagcttcatttcggccttgctacattgcaggcgagccggtaatccaaagcgatactacgacaatacagtctctgcaaaaggcaacgcagcttttcaatccccggtcggatgtaaataccattacgttagttctggaacaaatggcgagcgaccctgcacactcgggctggcagttcttacgtaacttatacaatcagtttggatatttaccgctggcaacctttgaggtatggcgtgccttggtccagcatccacaggcattggcaatgtcactgtttaaatttgagatgtccattgattatctcagccgtattgaaagcgagtttcctgttttctgggagtttttgcctattactgaggttaaacgtgcctcaatgcgttttcgagcgtttctgactcataaaggtgccccggaggaaatgcagatcaagtcattgggtcgaatgttccagagattaggaactgtatttccaacctatgccagcgaggtgcaaacatggttagaccaagggaaattaccgccgacttttccggcacaaacgatagaaggtatcattcatgagtggtatcaggagctcttacgtgaacatggtgaatcacgttggccagagtttggtgggccgggtctttttcgttggtacgcctcgcaaaaggatcccattatagaggtttcgcctgataccagttatcgatattccgtcactttgctccccatatttgctgctgctgttacatgtggcaaaacaacatttgacagcgtttttgaaaataaaccaggtgccgtatttttcttaagacaagtcagagattttgactcgcgatggtttaatgccattttccagtattgcttattgcgtaatgtggctacgaaataa

SEQ ID NO: 100399 - DNA, 735 bp, Enterobacter aerogenes
atgacattttttttaaaaatcagcgccgcggccttgatgatgatttttttatcgttcaatccggtgcttgctgccatgtcggtccatccgatggaagtatcagtcgatacaaaaggaatatcacagattaagctaatttccaaaagcgatgaggttcagtttgttaagattacgctgaaaaaaattatgaaccccggcacgtcaagtgagaaagaagttactgcagatgaaagtaacgctgatgaagtggctgttgttcctgccaaaattgctcttgccgcaggaactgagcgtgtcgttcgtattgtttcgttgttacctcctaaaaaagaaacaacatggagagcctattttgaaagcgtcgatgaaagagaatttaatgataatggcggattaaataacagcgttaaaaagtccgctactgtgggtgttaatatcatatggggtgcattgattcatgttttgccgataactaatgatcctgcattgagttataaaaccagcactggcgaaatcttaaactccggtaatatcagagtgccaataaaagaaattggagtatgcaagattaatggccagtgtgtatggaacaaagttataaagaccatttatccggatatggtcaattcactttcaggcgtggcatttcatcctgggagtgattaccgggcaagatatatggacgaaacacaaaaccgtatccgtgaaattaaaataaacgcaaataattcctaa

SEQ ID NO: 100400 - DNA, 537 bp, Enterobacter aerogenes
atgaaattgaataaaatcatgatggcagcagtttttgcattcggtactgtttctggtgcacaggccgctgaccagggccatggtaaagtcacctttaccggttctattattgatgcgccttgctctattactccagagtctattgatcaaacagttgagttaggccagatctctaaggttgctttactcagtggagggaaatctaccccgcgtaatttctcgatcgatctggagaactgcacgttcggctcacctgccaccaaaaataaagtgcaggtcacctttacgggtatggagtctgcggctaaaaatggcctgctggggattaccggcacggctaaaggcgccagtgtagccatcactcaggctgatggtgaaatcatcaaactgggcaagccaactaaagagcaaacattgcaggacggtaacaacacgctgaatttcgccgcctacatgcagggtgataccgcttcttctgagtctattactgaaggtgaattccaggcggtggccgattttactctagcttataactaa

SEQ ID NO: 100401 - DNA, 537 bp, Enterobacter aerogenes
atgagtgctaataatatcgttgttatagtggttttttgcctgttttcctttctcgtggcctctgttttagccgacgagcacattgccggatgggggcgggtaaatatgcaaggatccattaccgataccgcttgtgctattgccgttaacagccgagaacaaaccattgatatgggggttctgcccctatcagatattattcgcgatggtcagggccgtagccagcctttttccattgatttagttaactgcatcactgaacgcccgggaaatgaaggctggaagaaatttcaggttacttttgatggtgaagctcatggcgggttgtttggtgttaacggggatgcctccggtgtggcgctgcaaatcatcgatacccaaggtaatgtcgcaatgccgggcaaggctatgccgccaatggatattattcccggcgacagtcaattgaattacgccatgagattggtagccaataatcatgcgttgaaagcgggcgattatttatcatctatccgatttaaactggactatttttaa

SEQ ID NO: 100402 - DNA, 2592 bp, Enterobacter aerogenes
atggagttttcttcgcttggaaaaattgcgcctctgcattcgttaggattgtttatttcccttgtgttgggtacttcagtgataggcgccaatgctgctgataatattcagttcaatacagatgtgctggatgtcaacgatcggaaaaacatcgatctgagccaattctcgcgcagtggctacattatgccggggacctacggcatggtggtgcacgttaataagaatgacttgcaagagcaacagatctcattttatgcgccggagggtgacccaaacggcagtcgcgcctgtctcaacccagcattggtacaacaactggggtttaaacttggcgtcctgaaagacctgacctggtggcgcgagggagaatgcctgaacgagaccagcgtacaggggatggaagtgcgtggcgatctgcccacgtcctctctttacctgagtattcctcaggcttatctggagtacagcgacgagaactgggatccgccgtctcgctgggatgagggcattccagggttgctcttcgattacaacgtcaatgcgcgtagccagcatcagcaacgggatggctcgcgtggttatagcctcagcggcaacggtacgacgggtgctaacctgggcgcatggcgtctgcgtgccgattggcaggcgaatcttgatcatcagacggagagcgggcaaccgaccaataaacagctggactggagccggtattacgcctatcgggcaataccggcactgcgctcaaagctgacgctgggcgaaaactacctggattcaggcatgttcgacagcttccgttttacgggggcgagtctggtatcggatgacagcatgctcccccctaatctgcgcggttatgcgccggaagtggtgggggtagcgaaaactaacgccaaagttaccatcagccagcaggggcgtgtgctgtccgagaccacggttgccgcagggccattccgcattcaggacatcaatgatgcggtcagcggcgagctgaacgtgcgggtggaagaacaggatggtggcgtgcaagagttcgtagtgaataccgcgaacattccgtacctgacgcgaccaggctcggtgcgcttcatgctggcgacgggtaagccgtcagactggcagcaccattcgcgcggcccgctgttcggcaccggcgaattctcctggggggtcagcaacggctggtcgctgtacggcggtgcgctggcgggcggcgactacaatgcgctgtcactgggtattggccgtgacctgatggcgttgggggcgctgtcgtttgatgccacccagtcgcgggcgcggttgccacaggaagacggcacgctcagcggcggctcctatcggctcagttactcaaagaacttcgacgaatacgacagccaggtgacctttgccggctatcgcttctcggaacaggactttatgaacatgagtgagtatctggacgcgcgttattacggcacccgaacggggaatggcaaggagatgtacaccattaccttcaacaaacatttccgcgactgggggctgagtacctatctcaattacagccacgagacgtattgggaccggccggccaacgaccgttacaacctgacgctgtcgcgttatttcgatgtgggtcggttccgcaacctgagcctgtcgctgtcggcgtaccgtaatgaatacaacggtacgaaagacgatggggcctacctttcactgtcaatgccgtggggggataactcaacggtgagctacaacaccacggtgaaccgcgacgacaccacgcatcaggtggggtattacgaccggattgatgagcacaacaactaccagttgcgggccggcagttcgcgcagtggggtgaatgtgaatgggtattacaaccatgaaggtgataaggcgcgcatgagcgctaacgccagttatcaggaaaaccgttacagcgccttcgggatgtcgatgcagggcggcatgacgatgacggcgaacggcggggcgctgcatcggtccgggatgccgggcggcacccgcatgctgattgacacgcagggggtggcggacgtaccggtgcggggctatggcagcaccaccaacaccaatgcttggggtaaggcggtcatcggggacgtgaacagctattaccgcaacaaggcgagtatcgatgtgaacaagctcggtgataacgccgaagccacgaagtcggtggtgcaggccacgctcaccgaaggagctataggttaccgccagttcgacgtgattgccggtgagaaggcgatggcggtcatcaaactggccgatggcagtgaacccccattcggcgccacggtgatgaatgctcgcaagcaggaaacgggcatcgtcaacgacggtggaagcatctatctgagcggcatcaacgccggcgatgccatgacggtgcactggaacggtggcgcgcagtgtgaggtgcgtatgccaacgccgctgccggcagacatgctgatgaatacgctgctgttgccatgtcatccgctgggggcacactccgagcctgaagcgtggacgaagggcgcgccactgtcagtggttgcacccgagccggagctggcttcgtaa

SEQ ID NO: 100403 - DNA, 825 bp, Enterobacter aerogenes
atggccgggaatgaaaacatgcgaaagagcgaattgaacatgaaacaacattacgaagaccgcccggtcgcgtccatgcggaaaaaggctctggcgacgggggcagtgaccggtgccctgctcgcggtattgctggcacagcaggcccaggcggcgatagcgctggaccgcacgcgcattatttttgatggtagccaaaaatcggtgagcctgagcgtcagcaaccaaaacaagcagctgccttacctggcgcagggctggattgaagacgacaagggcaacaaaatccagagccccctcacggtactgccgccgattcagcgcatcgagccgggcaaaccgagccaggtgaaaatccaggcgctgccggtggtgaaggcgctgccgcaggatcgcgagacggtctattacttcaacctgcgggaaatcccgccgaagagcaccaaggcgaacacgctgcaaattgcgttgcagacgcgtatcaagctgttctaccgcccggcaggcatcgcgatggacaaaaacgcaccgcctccgcaggagcaactgaccctgagcaagcaaggcgacaagtatgtagtcaataatccaacggcgtattacgtcacgttggttgatgccgccatcaaaaaaggcggtgcggggatcaaaaacttcgagccgatgatggtgccgccaaagggcaatttgccgttgacggtgagtgcggcggagataggtaacagcccggtgctgacctacgttaacgactacggtggccggccgcagctgagcttcacttgctccggcagcacatgcacggtgataccggcgaagaaagcgtag

SEQ ID NO: 100404 - DNA, 666 bp, Enterobacter aerogenes
atgggcatgacacacgagacggacagacacagacgaggcctgtgcgggacgattgagctgaagtattacggcgcgttgatcgggttggtgctgatggccccgataacgctgggggcggtggtgtggttgttgccaccggcgcaggcggcggtggacaactgggatgtcgaaggcgccaacggcaccctgtacgtttatggggcgttaaccgagagcgcctgtcggctggagatgtccagcgcccaccaggatatcgcactcggtgagacgggggcggggcgtctgagtacggttggcgcgcgtggcgaaccgatccgattcgagctgcgtttggaggattgtttgcgcagcccggccggtagccgcgatgtgcgtaccggcggcctgacttgggcggacaatcagccggcggtaacggtgagtttccgtgcgacgcgtgacgccgataacccacagttggtgaaggcgcagggcatttccgggctggggctgcggcttgaaaatgcgcagggggaagatgttcgcctgggcagcagggggaagccgctgctgctgacgccggggcagaatgcgctgagctacacgataaccccggaacgcactcccgccgttctgatggtgggcagttatcgggccgtagtggattttcatctgagttatgactga

SEQ ID NO: 100405 - DNA, 492 bp, Enterobacter aerogenes
atgaatggaatcgtaacactgcagcgaacgctggcaggtgtgctggcggccttgccgatgctggcttgtgctgctccctcggccacggtcaccgtcaaggtcaccgtggtggcgccccccccctgtgtaataaacgatgaccgccctattgaagtggaattcggtgatgtgatgaccacccgggtggatggcgataactacaagatgccggtcaattacacgctgtcttgcaccgggagcacctcgaatgcgatgaagctgcgggttaaaggcaatggcgccgcgttcgacgcgacggtgttgcagaccaacaagaccgggcttggcatcgaactgcgccagggcgacggtaagctggccgtcaacaactggctgaatttcacctatccgaacaagcccgaactgtgggccgtgccgataaaacaggccggcacaaccctgacgggaggcgagttcagcgcaggggccacaatggccgtggattaccagtaa

SEQ ID NO: 100406 - DNA, 501 bp, Enterobacter aerogenes
atgagcagaacactaaaagtcctgttgctggccggtggtctgacggtgggcattaccccggtacaggccaaagacggtgaagccgacatgacgtttcacggcaccctgatagagccgcccccctgcaccctcaacgacggcaatcaggtggaggtcgatttcggtgatcgggtgggcatcaataaggtggacggcgagaattaccggcaggggttgaactaccaaatcacctgtgacagcgccgccggcgggaactgggcgttgacgctcagcctgagcggcagtgcggcagggttcgacagtgaagccctgttgacggacaaggccagcctcggcattcgggtgtaccagaacgataaccccttcaccccgaacagcacggtgaagataaacctggccaacccgccgcgcctggaggcggtaccgatcaaacaagcgggcaccacgctgaccgaaggggcctttgaggcctgggcaacgctgcgtgccgattatgaataa

SEQ ID NO: 100407 - DNA, 576 bp, Enterobacter aerogenes
atgaaagggaaatcgggctggcgccagccctcaggagattcacgctctcgggtgggtgccctgctgttggtgcaaatgttgatcgtcacaccgctttcggctctggcagagggtgacaataatctgtacctgcatggcgctctggttgcagaaccctgtgtgatatcgccgggcgatgaagaaattacgctggattttggcaccattatcgacaattacctgtacctgaacacgcgcactctcgggcaagccttcgagatacatctggaggagtgcgacctgacgctgggcaaggcggtgagcgtgacctttagcggcacggaaaatcaagccttgccgggcctgctggccatcgacggcggcagtgaggccacggggattgccatcgggtttgagacgccgtcggccaaacccctgcctatcaatagccagagtgataaatctctgctgcaggacgagggcaacatcatttcgctgagggcttatgtgcaaggtgagcccacagcgatggccgagaagacgattggccggggtgcgtttagcgcagtcgcgactttcaatctggaatatgagtaa

SEQ ID NO: 100408 - DNA, 1059 bp, Enterobacter aerogenes
atgacaaacgcacagaatgaagagagtgccgtgcaggactgggatagggcgtatcgctggttgtgcctgcggcgacagcatgcgccaccgaatgcggatgtgtgggatttacgcttcaagtggccacagcagcggtttcaatggttaaaacgcgtgctgacaggggagtaccagttgtcgccaatgcaggtttatcgacggcggaataaaaattgggtgcaatggtcggcgcatgatgcgttggtgctcaagtgggtggcgatgcaggtcgaagataaattgcccaggaacgtgcattgccatcacctgaaagggcacggcggcgtgaatgggtcgacgcagtgtgttgcttctgcttggcgaagtggtgaatggcgttatgtttaccgcacggatatccgtggttattaccggcatattttaaaacatcaggtggctgggcagttgcattggcatatcgaggatacggtttgcctgagcctgagcctgagcctgtgcctgcaatggctttattacagtgttgaagatggcggtgaaatacatacccctgaaaaaggtatttgtcgcggcagtgcattgagtccgctgattggcggcagcgtattacggcatgttgaccattattttgcaacgcacgaggaactgttttatgcccggtatatggatgactttattttctttaccaaaacgcgttggcatttacgtaaaacgattaaatcgctgtatgaatttttcgatttgggaggttttgatacccacccggataaaacgcagctcggtaaaattgaaaaaggttttgactggctggggatctggtatgcccccgaagggccccggatagctccgagagcaatagagaaccatcgggaacatattgcgcagctttatgagcaagcacgtttgaggaagctgtcgaaggtagagaccgataaccgtgtgcgggaatatgaaatccggtggatgaattgggcaaagtattttctgaaaacgacagaaccgtgcccgacaactataaatatacctgccgaaaataatatcactacagaggtccaaatatga

SEQ ID NO: 100409 - DNA, 804 bp, Enterobacter aerogenes
atgacacggcccgctttgaaccgccgccactggcttatcgccgcgacggtgatccacacactgtccatccctgcatggggggtgcctgtgacgtataacgttgtacccattccggggggcgaatcatactggggcgttgaatacagtgcgaccacgagcggcgatgcgatgagtctcccaggcgttgttccgtcaggggtgaatgagctcggggtgtgctctactcgcaaggggaatgtcggtggatgtcataactggagcgagcttggtaagacctataccgtcaacgtgactccgggcgaaaaggcatctactgcgcttgcccgattttacgcgaaaaacggttacccagccgtgacacgcactcggttcgcgtgggcgcatatcgagaacggtcagtgcgttggactcatgtatggactggatagtaggtttctacgaccagtcgaaggcgtgatatgttccagcatacaaccgccagacaaccggtgcgaagttctttcgggcgatctcatctacgaattcacgggagggccgacgattataccgggtatgacccaaactaaatcgatgacgattagttgcgatacaccggtgagtgcacgtattcggactgtgaatgatattcgtctacaggaggggctcacggccgaagtatcgtaccaaggacgcaacctctccaacggtaccatagtgcagatcggggcatcgccgaagacccttcctctttcggtaacgttaaaggggtccgctggggctggggaatatgttggctccactgtctttatagtggatatcggatga

SEQ ID NO: 100410 - DNA, 411 bp, Enterobacter aerogenes
atggccgcactgactttactgcaaaagcatattcaccagcgagacctggcagaactggttgaccggctggcgcccatcctgctggccggatatctgtcttcatcacaggtcatatcgctggtacactatatagtacaggcaggcgaaacatccgacgccgaagcctttgtacgcgaactggcacagcgtgtgccgcaacacggagacgcacttatgaccatcgcacaacagcttgaacaaaaaggcatcgagaaggggattcagctcggtgaacaacgcggcattgaaaaaggcgagcgcgaagccacacttaaaattgcccgtaccatgctgcagaacggcattgaccgcaataccgtcatgaaaatgaccggtctgactgaaaacgatctggcccagatccgtcactaa

SEQ ID NO: 100411 - DNA, 600 bp, Enterobacter aerogenes
atggtaaaggtactgctgcaggaggtcctgcaactgggcatccccctgatcaatggagcaacagccatacgcttgctacgccaaagtgataagcagggaagcgaaagatgtgcaggactggtagtttccactggcgtgcgtagtcataacactaacggtcttgccgttatcctcgcgccaaatgtagtactggcaaccggtggccctggtgaattgtatcgggacagcgtgtacccaaagaaatgttttggttccctgggactggcactggaggaaggtctatcccttaccaatatcattgaaagccagtttggtattggcacacctcgtacggctttcccgtggaatctgtctaacagcaatgaagaagtcaaagtaatcccttttaaccccggtgagcgggctttacggcgtttacgacgtaaagggcgtgatttccggggccttagcggcggcagcttgctgctgacgcttagggggatgttcttcaattatttcagcgacaccagggaacttaacacggtagctgcaaagccatatccgctaaaaacgctgctggcgcttctgtacgcggtcggagtggtcacgacaaggcgttag

SEQ ID NO: 100412 - DNA, 591 bp, Enterobacter aerogenes
atgcgcttcagtaaaagtgataccgaatgtggctacgtggcgaatagtgtgtggcaggtagaaaacatatctggtgacagtgtcacgctgaatgacggaaaaagtacccgaacggtaacgcccgctgcggataaagctgaagcgcatgttgatctggcttatgccatcaccacacacggtgcgcaggggacaagcgagcccttttcaattgaactggaaggtgtgactcgcgccagggaacggatggtcagcttcgaatcagcgtatgtagcgctctcccgtatgaaacagcatacgcaggtatataccgatgaccggaaaggatggacggatgcggtaagtcgttctcagaagaaagccagcgcgcatgatgttctggagcctcttaacgatcgcgttgttaaaaacgcaaagcagctgtttggtcgcgccattcccctgacggagagtccggccggacgtgcagcactgcaacaatcaggtatcgcccgcgggcagtccacagggaaatttatctccccggggaaaaagtatccgttaccgcatgtcgcgttacctgcatttgaccgtagacgatctccgccgatatga

SEQ ID NO: 100413 - DNA, 468 bp, Enterobacter aerogenes
atgtcggcggtgaatttgttgccggaagactcccgtccgaaggtaatcggcctcggtccaacacaccgtgcggtgggagaaatgcagagcgccggtgtggaggcacagaccacagcctctttcctgcatgatacacagcttctgatgcgaagcggccagactccggatttcagcaacacacttttcctggtggatgtgagttcgatgctggggctatccgatacggcaaaggccatgaatctcatcgcggccggtggtggtcgtgcggtttccagcggtgatactgatcagctgcagtctattgcccccggtcagcctttccggcttatgcagaagcgcagtgcagctgatgtggccatcatgcaggagagcgtgcgacaggtgcctgaactccgcccggcgacagaatgcgcttcagtaaaagtgataccgaatgtggctacgtggcgaatagtgtgtggcaggtag

SEQ ID NO: 100414 - DNA, 222 bp, Enterobacter aerogenes
atgactacagcattatccattcagagtgctgaaatgagtaagggtgttaagccatctctgcgtacccgtctcttcagcaagaccaaaatgctgaaggcggcaaaagccgttctccctgttgctgttcttgcggcagctttccctgaagtagcgatggccaccaccaccggtaccgatctgatgaagtcaggcgacggtaaaccacgcagttccgggcggtga

SEQ ID NO: 100415 - DNA, 312 bp, Enterobacter aerogenes
atgaaagatcgtgatatttttagcgaattgcaggaaggcatggctgcgtggggagagtttaatgctggcaaaaaaacgttgagaacgcacaaggttagcgcaaaacccgtcactatgacgcccgatgaggtgaaagcggtacgcgaaaaattgaagctatcacaggctgttttcgcacagtatttacataccggcgtcactaccctgcagaactgggagcagggattggctaaacctaataaacaagccatcctgctgatgaaaatggttgagcgaaacccccataccctgaatgaactggcagcgctgtag

SEQ ID NO: 100416 - DNA, 339 bp, Enterobacter aerogenes
atggaagcactatttgtcgagttgccgccgttcgagcgtcatcgtgctgaatatctcacggatgatgagtttcgggagtttcagcagatgttgctgaaaaatccggtatgcggtgatgttatccagcataccggaggattgcgcaaggtacggtttggggatgcaaggcgtaacaaggggaaacgcggcggcatcagggtgatttactactggtatctggaaaaatcccactttctgttgttcaccctgtatgacaaagatcagaaagatgatttgacgaaagcacagcgcgatatgttacgcgaaatgcttgaacaggccagacgaagggggcgttga

SEQ ID NO: 100417 - DNA, 159 bp, Enterobacter aerogenes
atggcgattctgaaagcgctgaaagaatggaacatctcgctgatactcatggaagcaaccgggggactggaagcttcggttgcctgttgcttacaggccgccggatatgaggttgttgttatcaatccccgtcaggcagagactttgcccgctcaatga

SEQ ID NO: 100418 - DNA, 498 bp, Enterobacter aerogenes
atgagatatttggccaaaacagataagcttgatgccgccatgctggcacagctcgctcagatcatcgatcgccatcctgatcgcagccggtatatccgagctctgccggacgaagcgcgcgcggtccttaccgccatggtcgtccgtcgtcgccagctgaataacatgctcgtcgccgagcgtaatcgacgctatccctctcatccgcaaagtcgtaagagcatcgataacattattaatgcacttgaaagcgagctggaccacatcagtcaagagatgaagcagcacgtaaaagtttttttcatggaacaggccgagttgattgggagcgttaaaggtgttggtgaagttactgtcgcatccctgattgctgagctgccggagttgggaaaactcaatcggcgggagataagcgcactgactggcgtagctcccctgaaccgggattcaggaaaaatgcgggcttcctcgatgcccaggaaattggccactgcatga

SEQ ID NO: 100419 - DNA, 192 bp, Enterobacter aerogenes
atggccaaaataatattcaaccattgcataaatccttttttagctttaacttactcccaagaaaatggtggcataaaatccaacaaaaccaataccacacctactaaatttagcccaccaataaacatgaccattaccaagctcttcaatacgttattaattgaagtattaaaatgcacccctattatttaa

SEQ ID NO: 100420 - DNA, 3075 bp, Enterobacter aerogenes
gtgggcgataacagcgtggcgctcgacgcaggtaataacgtcgatatcgtggccgcgaccaacacggatacctcctggcgctttaaggaagagaaaaaatccggcctgatgggtaccgggggtatcgggatcagtatcggcagtagcaagactacccacgatttacgcgaggcgggcaccacgcaaagccagagtttcagcaccgtcggatctacgggcggtaacgtggttatcgctgccggaaaccaggcgcacatcggcggcgcagacctgattgccggtaaggacatgagtctcagcggcagcagcgtcatcatcgacccgggccacgacaaacgtacccgcgatgaaaccttcgagcagaagaaaagtgggctgacgctggcgctttcgggcactgtcggcagcgcgattaataatgcggttacggcggcacaggataccaaagaggaaagtgacggacggctcaaagcgcttcaggccactaaaactgtgctctccggtgtgcaggccggacaggcggctgaggcggctgacctgacggccgacccgaacgcgatgggcgtcagcctctcgctgaccacgcagaaatccaaatcgcagcagcacgctgagagcgatacgataacgggcagcacgctgaatgcaggcaacaatctctccattaccgcgaatggaaaaggcaagggcccgaacagcggcgatatcgttattgccggaagccaggtaaaagcgggcggcgacacgctgctggacgccaggcatgacgtcattctcagtggggctgctaacactcaacagtccagcggcaagaacagcagcagcggcggcggtgtcggcgtaagtattggtgcaggtaaaggcgccggtatcagcgtgtttgccaatgtcaacgcagccaatgtcaaagataaagacaacggtaccgactggactgaaaccaccatcgacagcggcaagaccgtcaccattaagagcgggaatgacaccgtgctcaatggggcacaggttagcggcaataaaattgtcgccaatgtggggcacgacctgctaatgagcagccagcaggacagcaacaaatacgacagcaagcagagcagcgtggcggcgggcggcagcttcaccttcggcagcatgacgggctccggctatatctctgcctcccatgacaagatgaagagccgctttgactctgttgccgaacaaaccgggatgttcgccggtgatggcggctttgatatcaccgcggacaaccatacccaactggatggcgcagtgattgcctccacggccacggcggacaaaaacagcctcgataccggtacgctgggcttcagcgacctgcacaacgaagcggacttcaaaacccagcactcgggcatcagtatcagcggcgcgggcagcttcggcgaccagttcaagggcaatatgccgggcgggatgattgcggcggcgggcaacagtggacatgccgaaggcacgactcaggccgctgtggctgacggcaccatcatcattcgcgacaaggataatcagaagcaggatgtggcgaacctgagccgcgacaccgaacatgccaacgacagcatcagcacgatcttcgacaaggagaaggagcagaaccgtctgaaggaaatcgggatgatcagcgatatcggcggtcaggtggcggatatcgcacggacgcagggggagctgaatgcgctgaaggctgcgcaggataaatacgggcctgtaccggcggatgcgacggaagaacagcggcaggcatatctggcaaaactgcgtgatacgccggaatacaaaaaggaagaggaaaagtatggcaccggcagcgacattcagcgcggcatccaggcagcaactgcagcgcttcaggggctcgcgggcggtaatttagcgggtgcactggcgggggcttcagcaccggagctggcgcatctgctgaaatcgacagaagataaccctgctatcaatgccatagcacacgcgatccttggtggcgcggttgctgcgcttcagggaaatagtgcggcatcgggcgcgattggtgcagggggcggagagctggcggcacgcgctatcgccaatatgctctaccctaatgtagataaactttctgaagaacagaagcagacagtcagtgcgctggcgagcatatctgcgggtatggctggagggatcgctacagggaatacagctggggccgcgacgggtgccggtgccgataagaatgcggttgagaataatttccttggtgcgacatcttcagacaaactcgacaaagccattgagaaaattaagaacggtgataagtcattagctacagccaatgagcttattaagctggaaaatgctgacaaacgcagtgatgcactggtttctaaatttactaaagacccttcacagatgagcagtactgagcgggctgaactggccgggtatcttcgtatttatgcttctgaaatggaaaaaacctacggccccgcggtagcacaacagctggttaccgggctgctctctggccaggattacatgaaacgtaaccctgactctgaagccatgtctaaagctcagagaatcatgaacacctggggctatcataagtcgaatgccagcattggtgatgcgccgctaatgttcggaagcagtgtgctggggcttactgtgaaaggtatggtagctaacgcagcaattggtgttggagttaactcagctgctcagcttgcaggaaaagatcctttcagttatgtggatgcaataatggctggggtgacagctgcagcgacaacaggaaaaggtgttatcatctcaacacctatcaatatgggcggtgcggcaattggtagcagtattaagggggaagatccgacaaactctgttattggaactggactaggttcagtttttggtggcggtgtcggaaaggtcatatcagggtctatggggtctactgtcaaagaagacacatccgatattattagcaatattgggggctcaattactagcgaggctgttggtaatgttacaaaaggaacgctagatgaagctgatgaaaccactaaaaaacaataa

SEQ ID NO: 100421 - DNA, 639 bp, Enterobacter aerogenes
atgttaactggctataaatatgaatccataaggatactttgtagcgaacacgtgattgcgtgggagcttctctctacggcagaaccgcacgttgatctggaagagcactttggattaatgagtgtgcttgagcaaaaaaaacactttttcgctcaactcagtcataccacgttttcagataatggtgaaaaatatcatcttaatgcaacatcctctttactgctggaaaaggatttcttagaacggctgcgtgaagaaatattttgctctgataaactggttatagagatcaccgatcttgaaaacatgatggaatcagaccctgttcgtattagttcactaggcaaatgtatcgctgagttgcgtcagaggggatgtgaagtatgggctgatgatgtcactgaaactattctatggaaattttttgaatgcacaatccgctttgatggcatcaaaattgataagcataccttctggaatggacgagccgagcggaataagtttctgcaacttgcgcagtgttgcacgtattttacaaataaagttctgatagaaggtattgaaacggaaagtgatttggcattagcgcgtgctagtattgcagagtatgggcagggttatttatgggtaaacaaatga

SEQ ID NO: 100422 - DNA, 498 bp, Enterobacter aerogenes
atgaaaattatttccgctattgtatgcagttccctttgtctgctttctgttgtcgctaactctgcagacaatacagagactgcatcaatgcacgtttctctggaagtcgtaaaatcctgtacgctcaatgcaaacgacctgaatttctctcgacatggctcggatgagacagtggaaattaaagccagtacgcaggtcgaaataatctgcaccaacggaactccttttacacttttcgccgctagcagcgacgcaagcgaaaatggaaccttctggctaaaacccgaaaataatgaggcaggtataaaaaatattgcctggaaactctacgctgacgaaggtaaaaagtcgcaaatcaccagcattcaggggctaaccgataccgggacaggttccaaacaaatagaaaatttgtatgggttcattgattcgggggctctcaccaccgcccaggctggcacatatgctgatgacgtcacattgaacctggtttactaa

SEQ ID NO: 100423 - DNA, 777 bp, Enterobacter aerogenes
atgtttcgttttctgtccttatttattttctggttagtgatattaattccgctatcccgctatacatccgccgcaacgcttcaggttgcccccgtgacgttagagctgcagagtcaccagaaggcaactgcgttatatgtcacgaacaccggggcaacgccgatccatgcgcagatacgagtttatgaatggttgcaggaagacaataaagatgtcttaaggccaactgaaaaattgatcagcagccctgctatgacttctctcgctccaggcgaaaggcaactggtgagaattattgtctcgcaaccagggacgagtgcgaaggagcaaagctttcgtctggtaatcgatgagctgacaaacaaagctcttggctcatccaatcccaacgctgtgcatttcctgctgcgttactcgattcctgtcttcattactggacgcgaacataaaccagcaagtaaggatgacgtccgttgcgagcaaacgaagaatatagagacaattcgttgccataactcaggagcacgtcacttacgcctgagtaatcttcaggctttaacagctgaggagcgtgttgttggatctattcctggacttgtagggtatatgcttccgggtcaaggcatccttctgacaatcaagcaaacctctcaacataagctcagcgctctgcgtgtatacctaaatgatgaccatcatgacagccatattccgttgcatccgatcgccactcgtgcgtctgctgtggctacctctaattctaccagcgcacgctga

SEQ ID NO: 100424 - DNA, 732 bp, Enterobacter aerogenes
atgtaccacattctgaatgaagaagtcgttttttctccggatgatggcgctctctggttgaaagaaaaagcagatgataaaattattttgacacctacattaaatcgtctgcttctatgcttgattgaaaatcatggaaaggttattacgcgtgaggaggtttttcagtgcgtatgggatcgctggggaaaagaaggatcaaataacagtttaaatcaatttatctcacaactcagaaaaatatttaacaattatggatttcctgaagacacaataaccacagtgcctcgcgttggattcatttttacaatacaaactctccaagagcaggttcctgttcacgtaaaaaaaatttttaatgttaatattatcttgaaggtttgttttatgtgctcaacgctactagttgttggtatttttttcaaaatattcacacaacatactaataatctcaacatttcacctaaatttacgggcgctatcgataaatgtaaggtgtatgcattaactgaatacgatgattcactttcaggaccccttgtgagtaatattcagcgttttattaacaaaacacattttttgtgcagtgcaccgggtaccatatttttttttcttgatcccaaagtgcttgcagagcaatccgggaatttatacgtctccacctgtcgtggaaatgttaatgaattttataactgcactaaccgattggacagtagctggagggaagaatga

SEQ ID NO: 100425 - DNA, 480 bp, Enterobacter aerogenes
atgaacataatgcgtctcgccattcatcgggggtggcctatcggtgtggccctgcttttgctggcggcaggcatcctgctcctccctgacaaccatcgctcacccgagttgagatgtaatacttacatcgaacaggcggggggagatggtcaatatctcatgaaagcaacctttatgtttcttcttaacaaggatggcacaggcgttttcgttaataacggaacaattacctataatggaactgtccatactcttcgccgggaagctaaagtcaggatagcaccactaaacgccgcccctaccccatggaaactgacagagtttaaagaaacagtgagcagcggtgataacaccccagatgaggtatataaacgttttttcttcgatggaagtgaacgttccgggcgttatatcacgataaataaagtggggcatcactggctaataggtagtatccgtacaccagcgttcctgtgctag

SEQ ID NO: 100426 - DNA, 588 bp, Enterobacter aerogenes
atgagaaaaatattgataactgacagctacctctataagcttgcactgcaggacattgttgccgagagttatcttattgatcgcgagcttgaattaaaaaacatcactaaactaacaaaaagtgattgctttattttgtacattgggaatccagttcatttgtttaatgtgtatgcatatctttcacgtaaaacctcagaacatattatagttgcattggattttgatcttaaacggccattaattcaagtaaactacacatattttttgtcatctaatgtaaatcacgttatgcttgacgcaataataaacgatctaaaaacatataaactacataaaaaactcacttccaaggaggagtcaattgtaaaacttattcttgatggttataactgcgaagatatatccaagatgatgaatttgagcattaaaactatttcgttacataaaaccaatgcaaaaatgaaaaccgggcttttaaaaaacaatgactttacatctttttcattattcaagattatattttccgagtggcaaccatctcctataattaataacaatcacactacaaaaccaactatagtgtga

SEQ ID NO: 100427 - DNA, 783 bp, Enterobacter aerogenes
ttggacagtggattatatttaattaacaagctggttacatttgatgttgaggcgatggtgcttactaatatatccagcaaagacaccgtcaacctcacaagaaatctatctgaatgcttattcattcttcttaacaaccaaggaaagattattagtcaggatttcttcatagaagaggtttgggcaaagaagaggatgtttatttcagaaaatactttagtgcaaaacatcagaaagctacgagcctttattgattctattggattaagtaaggagttcatagttaccaaaaaaggaatggggtattattttacgtctgaggttgaagtagagtttatagagaatgaaaacgaacgagaacgtaacaaaaatagagcggctaaattaaacaatattttgcttcttttttttaaattgaaacaagttaaatcagcgataatagtttgtgcatttataatgctttttgtttttattgcagggcgggagggggctaaattttatcttgccaacttaattcccacagtgaattattatttttccacgcgtatagatcagtgtagattttactttgacaacaagttagggtttgacaaggcaaatatattgaaagctattatcaaacaaaataaaataagttgtttcagggcgtcatatatatatgttacctattacccattatctgctcattattcctatataaaatgcgatcaaagaattgatagcaactcagagaataaaacatgcacatctgttgtgagatatgattatgcaaaaaatatttag

SEQ ID NO: 100428 - DNA, 495 bp, Enterobacter aerogenes
atgcaaaaaatatttagcgctaaagcgtcaatattatttgttattgtatttggtgtcgttttactagctttgctagtatcatctgaaatggtatcaattgatttttcaaagcatggctttttaaacttttcatgtaaagcatatggtaataagtatattaatggatataatttacaatatgttgaaacttatagattttataagacaaaggatggtaattttgctgtgagtggtaaagtatttgaaggtgataacttcataggcataattggacttaaaacttcattttcatatgtatattcaaacggaatggtaacactaagaacaaacaatgctattgttcaggttgataatagtattaatacagatatattgctagatattattccaaagtctgtactaaacaaaaataatatacagttaatcgcgttatttaaattgggcggaggttacagaattgactataatacatatccaacagcatattgttattaa

SEQ ID NO: 100429 - DNA, 321 bp, Enterobacter aerogenes
atgcgcgtgcatcagtggagaaacgcgttttcatataatccggctcatctcatttctgatatttccaaacccttactagtgctacaagggctacgggatctgcaggtggatgaagcggacgcaagactgcttaaggcagcgaatcctcaaacctccttggttatactacctaatatgaaccatgtcatgaaagaggtggctacggacgttcgcaaagcgaatattgcgtcatatgctgaccccgcgctccccttagctcccggtttaatagatgcgattgaaaatttcctgatccgcaactccccttttcccgaaaagtaa

SEQ ID NO: 100430 - DNA, 522 bp, Enterobacter aerogenes
atgacggcacacgcagcggagtttttcactttggatgaagttaaccgactcaaaatcattcaggacgttgtcgaccggcgtctgaccactcagatggcctcgcagcgtctgggtatttccgatcgccagtgccgacgccttctgttgcgttaccgtgaatctggcccgcttggtatgactaaccgccgtcgtggaaaacccagcaataaccagctgcctgatggccttgcacagtacgcgctcaatattatccaagaacgctataccgacttcgggcctacgctggcgtgtgagaaactcgcagaactgcacgatgttcacctgtccaaagagactgtccgttcactcatggtcaaagccggtctctggatcccccgcaaacaacgtgcgctgaaaattcagcagccacgctatcgacgggcctgctgcggcgaactgatccagattgatggctgcgaccatcaaaccgtgcgcccgcctgtactgctctggtctacgttgatgatgcgacgagctgcctga

SEQ ID NO: 100431 - DNA, 870 bp, Enterobacter aerogenes
atgcagcttcgttttgttaaatcggaatcgacctttacctattttgaagccaccaggggctatctggaaaagcatggcaaaccactggcattgtacagcgacaaagccagcgtcttcagaatcaacaataaaaatgcaaccggtggcgacggctatacccagtttggccgtgcgatgcatgagctgaatatccagactatctgcgctaatacaagctcagccaaaggtcgcgtggagcgcgcccatctgacgcttcaggatcgcctggtaaaggaactccgtctcaggggaatttcgtctgtggatgcagccaatgaatttgctgatgagtttatggctgattacaactggcgctttgcaaaagctccccgtcatgactttgatgttcaccggccacttgaaactgatgatgatctggctgcatttttcacatggcgagagccgcgccgtgtttcaaaatccctgacggtgcagtatgacaaagtgctttatctgattgaagataatgagttaagccgcagggctatcgggaaatatatcgaggtctggcattacccggatggccggaaagaactccggctaaacggagccgtccttccctactccacatatgatcgtcttcaggaaattgaccagggtgctatcgtggacaacaaacgcctcgggcggacacttgaatttatcaagcttgttcaggataaacgcgataataaccgttcgcaggcactccctgccggaaatggcccctcgcggcgtcgcaaaaaactaactgagaagaaatcccagcgttcactaaatagtgacgatatgcttgatgcgttaaagacattacagtcccgttctgaagaaatctttggtaagagagaataa

SEQ ID NO: 100432 - DNA, 621 bp, Enterobacter aerogenes
atgcttgtcactgattcacttcttgcttacaccctcgctgcaacactcctaaccttaacgcctggtcttgatactgcacttattctccgtaccgctactgctgaaggtggccgaaaagcctttcatgctgcgttaggtattgatgtagggtgctttatctggggggctttggtggcctttggtttgggggctttactggcagtttctgagttggcttatacactgctgaaatggtgcggagcaacatatcttttctggctgggcattcaactgctattgcgcccgcgacaacaattcaacttgagactggaaaatactaaccctgcaagtaattggttcctgcgaggaatgttggggaatgtgcttaacccaaaaatgggcgttttttatgtctcatttttgccgcaatttatcccaaccggacatacccccatcggctggacattccttctggttgctatccacgtattgattggcacgctgtggtcgctggcactcattaccgctacccactatgcttcaggtgtgttgaaaaagcctgtcgtggtgaaatggatggatcgcgccactgggtgcttgtttctagcgtttgccatcaaattggcaatgagtcgaagatag

SEQ ID NO: 100433 - DNA, 978 bp, Enterobacter aerogenes
atggctgattttgaagatattttcataggagaggagtatcttgaaccttattgcgctatgattgggagtaaggggctggtttttgtcgaagggttaagagatatatcgttttgggaaggaatgctagatagcgatgatggcttaaaatatagcataaactatgcctctcatgaaggaactagaggtaagacagtcctaatgaaatttagccaccttgccaataaattcgcactattcgccatagatagtgactttgattatatttgcccaaacaacagtgacaaagctaaaaaaataaatgcaaataaacacattattcaaacattagtttactcaaaagaaagcataagccttcatcacctagtacttagcgattgcataaaaaaaataaaaataaaagacgagataacattcccaataaagaattactttgaggcatactcaaatgtaatatatgacgcattgataagattcttattcctaaaagagcatggtaaagttatcaatgatgctgattttcataaaaaaataacaccaatacaaccaaaaatcagcaaaggttattatttagaaaacgatcctcttgtcaaattaaaagagcaaaaacaatctttagcatatgaatatacaacaaatgaattatcagaagatgattttattaaatttaaagatgatttattaagcaaggggttaaatgaaaaaactgccgcttattttataagtggtcacttccttgaagaatcagtggttatgccattaataaatgaattaatcaagactcttaaagagaatgagttagaaaaaataaaaatagagtgcaaaaaaaacccgaaatctatagagaacaacagaaatgaagtttttaaatacattgataatgagcttgatatttgcaaactactacacgatacaaaaataaaatatcaaacacctttatcaacaatggtaatggaagctaacaaaaactcattagagtag

SEQ ID NO: 100434 - DNA, 840 bp, Enterobacter aerogenes
atgttaaagcaagaaggaagtgttgagctaaccagaagtgagtcaatgaaagtaaccttaaatgaaggtggcacaattactcacatcataaacaaactcggccaagacaccgaagaattgctaaatacactaatgggtttctccaactcaatcacaaaaggaaagggagcaaaaaaagaaaaactgaaattggatgagctaataggaaagataaagtctaaaaaagcagaaataaaagaaataggattaagtaaaatagaagttagtgaggatatcagagcaaaaacaaagataaaatcagagctcatatccactgtaaatatgagtgcgaactcagtcttgccgctaaccggtagtgacggcgaagttacaacaatacttgacatggagataaaaaacgaaataaacaaattaaaaaaaataattaacgataaagaaattgagtgcaacgaactgatttgcaaacttgaaaaatcaattaatgatctatttgaagaaagtagaaaaaaagtcagattctcatctggtgatttagagatagaaagaacagacaaaaaagaagaattatacttatcaaacttatcatcaggtgaacggcaagtaatctacatcatgctaaaggctgctaacacatccagagaaaaaactgttttattaatggatgagccagagatatcattgcacctaacttggcaagaaaaactaataaactccatactttatgttaacaaagaatgccaattaatcattgtaactcacagtccagccatagttatgaaagggtggatgggtgcttttgttgatatcaaaaacattcaagaggaaacagtaaatggctga

SEQ ID NO: 100435 - DNA, 831 bp, Enterobacter aerogenes
atgtctttacatgatgcaagaacagaacgaagcactgtatgttttactatcgaagaaactctgcgcttttgcccagaaaataacactctgtataacatcagtaatcaagagattgtcaatattctcagcacggcttcaagctgttttcgtctcttaatcgaggagcaggggagtattctttcaaaggagcaacttattgaacaggtgtggggaaaaagaggaatagtaatcagtcataacactttttatcagacgatgcttaacctacggcgtggtctggagaatgcaggcatgcaaaatgatattatatccacccattacgggaaaggtgttagtatatcaaaggagatcaaaatagttagttccaactatgaaatcgttgaggttttacaagggggtggagaagaagaaaagaatactttaactgccgtggcaatcacagatgtcataaacgaaccagaaggcagtccctcttcgcatcctgaattcttaaacagacttaaaacgaaatgttttttcttaggtttttcagtttttcttataacacttattgtgtatgctgcaattaactatttttttatgaatgatgactttttctcttcctatagaaaagctaatgtacaaataaatgattgtaaaatatatataaatcctgaccatctgggtgacttctccttagaaaacacccttaaaaaatggagggtttactgtaaaaataatgagcggatttttataagtttggtcgaaccggttagacgtttatcagtgattcattgtaataatcatcttacggaggaggaagaatgcgtatcagatttttatctagactga

SEQ ID NO: 100436 - DNA, 501 bp, Enterobacter aerogenes
atgcgtatcagatttttatctagactgaataagcattatcttatgattttttttgcatcgaccattataattatgtgtacattaattttactaatagatgagtgggatgagcacgaagataataaattgagttgcagtgcagtaactaatatttataaaggtgatgagcatctttctttacgtttaagttattcatttttgggagattatggaattgctactttcgctggattactaacgagtaaggaaggaataacaagtaagattagtcgacaggtttgctttaagtacagagtactaaacgaaaattattatcttgagaataaaagaactatgatttcgcttcaggatactgctgagccttcagctttagctaatatgcttccttcattttatgaaaaaacaggggccagacttacgtttcaaatctatccacaaggtacgaatggtctcatttttgtcaaagattttacacctgttttttattgcaaagtagactga

SEQ ID NO: 100437 - DNA, 483 bp, Enterobacter aerogenes
atggccgtcatatcagcattcatactcaaaggcgtaaagaccgcagaacctgccagcacgataaaaacgggtgggcggcctttatgcgaaatcgtccgccagccagggtttgccagaaccgtattcagcggtgcggtcatctatatggtgatgaacttcctgatgacggtagcaccactttcgatgcacatgcacggcatttctcagcaggcgtccaatctcggtatccagtggcatgttattgccatgtacggtccggctttttttactggcaaattaattaaccgatttggagccatgcgtatcgccgctacgggtttgcttatcactgcatgctctgtcctggccggacccggtggaaccgatattttccactactggctgtcgctgattctgctaggtctgggctggaattttgccttcaccggcgcatcggcgaagattattgaatatcaccttcacgaagagaaaacccaggtctag

SEQ ID NO: 100438 - DNA, 204 bp, Enterobacter aerogenes
atggttacattgaaaaccgctaaaaaaaccacgctaccgcccatggctatcgctaccaaatcgcgcagtacttcaatcaactttagtactctcccccacctaaggacacatggcagtatttatggcatcatggcatcagagcaatataaaaatctaagcatttatgtaccagataccactctcatgattttgttcggtcattaa

SEQ ID NO: 100439 - DNA, 669 bp, Enterobacter aerogenes
atgaaaaaacatcttctggccattggcctgctgctgggattggcgaatcccgcgctggcgctggatgtcggcgatatctcttcctttatgaacagcggcagcagcacgctgagtaaagagattaaaaataccaccgacagcggccgcttaatcaacattcatctggaacgtctctcttcaccgctggatggcggcaaggttatcccgatggataaacaggatgaagtcctgttgacccccgccagcttgttattgcccgcaaaggccagtgaagtggtgcgctttttctacaaaggcccggcggatgataaagagcgctactaccgcattgtctggttcgatcaggccttaagcgatgcccagcgcaatggctcccagcgcagcgcggtggccaccgcttctgcccgcatcggcaccattctggtggtggcgccgcgtcaggctaattttcgctaccagtttgccggcgacacgctgaccaataccggtaacgccaccctgcgcatcatcgcctacggcccgtgtctgaaaatcgccgatggcaaagagtgcaaagaaaattactacctgatgccggggaaatcgcgtcgcttcacgcgcgtcaatattgctgacaaaaaaggacgggtcgcgctctggcagggcgagcagtttgttcccgtgaaatag

SEQ ID NO: 100440 - DNA, 579 bp, Enterobacter aerogenes
atgaaattcttcatgatgaagcgtgtaatgctggcgattgcactccctgtacttgtcgcttatttcggaggaggtaaggtcatgtcagtttattgggtgcccctgttttttatcagtgcgatgctatgtgcaacagcttatggcaaatatgtagtcaggaaaaacaatgatgctacattcaattatctgaatgaaaataatgatgggatctatattcataaattcaatgactgcgagattcggttagacaaaaataaacaagaagtatttcttaaaaatagcgcaggagcaaaaacctattcttttattgatatcaaagaatggcgctacaacattaaatatggaggtgaggttgcaggtgctggtttaagtagtatcagagagaacggtaaaacattaggtcaaaacatcgctgatacaggtctctttatccgtgtaaaagacgtgcgtaaaccagaatggcatatccggttctatcctcgtaatgatgctttcaattcgagtaatgggttaaatgatttgaagacgcagctcaaccaatggatggagatctttgatcaaaatttaaatgctgcatag

SEQ ID NO: 100441 - DNA, 1140 bp, Enterobacter aerogenes
gtgaagggaatgcaaaaaatcaaaagagggaaaatctttaatggccttatttcttatttattaaaacctgcttcgcatcacaagtcagatccgtatgtagtcggtggcaatgtaatagaaagcttcgcagaagcactaagtgcagagttcaatgctacgaagctcctacgatccgatgtcagtaaacctgtatggcacaattctctgcgtctgcctgctggtgagaatctatctatacaacgatggaagctgttagccgatgactacatgaagcgtatgggcttctctgaaacgcatctacgtgcatacgtgcttcatgatgataaagatggccaacatatccatatagtagcaagtcgcatcgatgccacatctgggaagctctatcttggtaaaaatgagaaccttatcagcacccgtatcatccaggatcttgaaaaagactaccagctaacaagaaccaaaggaactgatgccctgaaaccttcttcctcacctgcaaaacgtaaaaaatcacgtaatgaggctatgttagaagacagaactagcgagaaatgtccaaagacaatcatacaggaagctatagatacactgatcacgagcaagatttcagaacacgagtttgtgcagcagctcgcagctcagaagataaaagctgttcctaacagagcgtcaaccgggaaaatgaatggtttctcgtttgagtacgccaacatttcattcaaggcttcgcagcttggaaaaaagtattcatggaaaaacttagagccgttcatcatcattgatcccccgaccatagttgacagaaaagccaacacatctaattttttcgttggaatagatgtggaagacatattgcttcccttacctgaacgacctaaaccaccattgaaagaaaatttggatgcaaaaacaatagcagctaccaatagttatataaatctcacaatgagatggatagaagcaatcccctggttagatagcatagttggtatcgtaaaaagcttgcataactctttccttgaacacaaaaacaaaccagtaatgatcttttctgcttcaccactttctatagacctaccatctgttcactatgttaaaaaatgtgttaaaacagacacttttagactaaaaatttag

SEQ ID NO: 100442 - DNA, 375 bp, Enterobacter aerogenes
atgaaagagattatagccttaccctcaaggaataataataacaggaataccccaaacaaatcactgagaactcattgcatcagtgttcgactgaaccacgaagaactacagcttctcaatgcaaggcgcggcgaaaaaagcaaaggtgaatggcttcgtttaactttcctaaataaacttcctgtagccattcctgctgtaaacatggaagcatggaaatcactggctgacatgtcccagaaactaaacagacttgtcctacaccttgacactaagagtaaaggaagctcactgacgcaaacagaactattcgcagtgaagcgccagatttcggagcttcgcatgaacctgattacttctgacttatggaagtag

SEQ ID NO: 100443 - DNA, 885 bp, Enterobacter aerogenes
atgcgtgtatcgccagagcttttacaaatttttgtggcctgtgttgattgtggtagtttttctgctgctgcgaaaaaactacaaaaagctcagtcaacggtgagtatgtctatatcagctctggaagatgacttaaatattatattatttgaacgtcaggggcgtaaagtaaaactaacaaaagagggtgaggtaatctattcacgtgcgctgatagtactcaatgcacgtcaggaactaattaatgttgcaggagagctggttgatgttcaggaaaccggcatccaggaaatcacctcgcaggtggcgctgcatcaacagagagaattcctcaaaaaagaattggacgcacatattaatagtctgcagattaccattctttcggcagaaagctataaaatagattctatgatatcaaatggtgaggttgatattgctgtgatacctgccataaattccagaatgaattatccaattgaattaaaaagtcgacgcacatggtttaagtctagattgcatatttattgctcaagcactcatccattgagccaactcactgaattatgtgaggatgatattaaacgttttcgtcgtattcgtcttgtcaaagggatgattaacaaccaatcgcctcgtaataatatatttacagataatatttttagcgcatacagactctgtgcccaggggttaggttggtgtgagcttccggaatggttcgtggagagccagtataggcaaggtgatactagactgaaaaaactttctgtttctccaatatgggaaacattagagtttgatgctatttttcgcaattcatcaaaaggtaaatttatggattggtttattggtatggtgactagaaaagaacctctgaacgtttag

SEQ ID NO: 100444 - DNA, 894 bp, Enterobacter aerogenes
atgaaatgttctgcattaatagtcacgtttaatcggttggataaattaaaaagaactttagccaacactgtaaaattagattttgcaacaattataatcgttaacaatgggtccacggatgggacccaactttggttagatgcaattagagacccacgtgtaattatacttaatttgccatctaacactggtggtgctggtgggtttaaagctggtagtcgatacctttgtaacaatgttgatactgactggattttcttttatgacgatgatgcctggccagaaagtgatgctcttgataaattctctcttttagatagagataattgtcgggtattcgccgccttggttaagaatatccatgggaagccttgccctatgaatatccctttttcgaaagtgcctacatcgtttattgaaaccttgaaatatatcaaaaataatgatgatttcactccagattatgatcagccttgcagtgttcaaacggtttctttcgtcggtatgataattagtcagagcttactatcaaaacatatagacagtattcatgacgagctttttttatatttcgacgatctttatttcggttaccaattaacattatctaatgaacatattcgttattctccagaggtcatctttttccatgatgtgagcattgaggggaagtctatttatccagaatggaaggcttattatctttgccgaaatctgcttttagctacgagaatacttccgggagtaaaggtgtttagtagtctctcaatccttttgcgtttgataaaatatatagcaatattaccgtggcaacgtaataaaattttatatttaaaatatattttccgtggtgtaatccacggcgtaaaaggtatcagcggtaagaaccattaa

SEQ ID NO: 100445 - DNA, 882 bp, Enterobacter aerogenes
gtgggagtggatctgtaccgggttttccatcaaacgattaatcagttttttgcgaaaacatgctctccagaggaggcacgtgcgcttattgctgaaaaaggggacagttccatcgttaatccgaaaacctttgaagaacaggcccttcgttttattggaaaggaactgtatgaggcattcttcaaagggtatactattaagcaatggggtatggaaccagcacagcttccggcatcgattcttaagcgtttgccagtgcgttttaactatgatgataattattttaaccataagtttcagggcatgccgaaacttggttatacaaaaatgattgagtcaataatcaatcatgaaaatattatcattgagcttcagcagtcttttaatcctgaagataaagaaaaatacgatcacgtattttacagcgggccattggatgcattttattcttatcagtatggtcgacttggctaccgaaccctggactttgaaaaatttacgtggcaaggggatttccaaggctgtgcggtaatgaattactgctcgattgatattccctttactcgtattacggagcataaatactttacaccttgggaaactcacgaaggatcggtgtgttacaaagagtacagtcgtgaatgtggggagcaggatataccttattatcctattcgtcagatgggggagatggcgttactcgataaatatttatcgctggctgaaaatgaaaagaatataacctttgttggccgtcttgggacttatcgctatcttgatatggatgtgactattgccgaggctttaattacggcggataaatatttatcgtcaatcagttgtgatgaatgtatgcctgtatttgcggtccctgtgcgatga

SEQ ID NO: 100446 - DNA, 681 bp, Enterobacter aerogenes
atgtttgagcacaacaaggatagagaaaaactagttggttttgtaggaattaactaccatcagactattgttatagatggtgccggtattaatcctgaaatttataaatactctcttgaacaggaacgcgagataccagttgttctatttgccagtcgaatgctgtggagtaaggggcttggagatctaatcaaagccaagaaaatcctcaagtcaagagatattcattttacgctaaatgttgctggtattttagttgaaaacgataaagattccatttcgctttctgatatacaacaatggcatagtgaaggtttaatcaattggttgggaaaaagttcagatgtctatgatttgatccaaaaatcgaatatagttgctctaccttcgagttattctgaaggcgttccgcgcatcttacttgaagcttcatcagttgggagagcctgtattgcgtacgatgttggcggttgcgacagtctgataatagataacgataatgggattatagttaaaagtaatactcctgaggaactggcggacaaacttgggtttctattaactaaccccaaaatacgggtagagatgggaatcaaaggaagacaacgtgttcaggagaagttttctagcaggatgataattagtaagaccttaaaagcttatcatgatgtagttcattga

SEQ ID NO: 100447 - DNA, 249 bp, Enterobacter aerogenes
atggcaaatgaattgcttggtgagcatgctgatgttctactcaaattcatgcctattgatgattacatgaataaaattagttcatgtggatttgttattatgaatcacgtgagacagcagggggttggtaatataataagcatgctttatatgggagcgaaggtgtttattcgtgaagaaaacccaacttttatatatcttaaaagaaacggagtgacagttttttcagttcaggagctagaaacatag

SEQ ID NO: 100448 - DNA, 594 bp, Enterobacter aerogenes
atgtattcatctaaaccaagtgttgtatatggctttcatggaatggataaaacggcgggattatccattcttcttcagaatgaagaattcaaacatagtaataatttatatgattggttaggtggtggtatttatttctgggaaaataattatgaacgagcaattcaatatgctgaagaagataaaaaaagaaagcattctaaaataaaaacaccatttgttcttggcgcagtacttgaactaggtcgttgcttcgatcttttagatcaaaaaaatatagatttccttaaattctcctatgacgagttaataatttctttagaaaaggacaacaaggaaattcctgttaattctgcatttggtaaaaatgactttgattttaaacgcagagaacttgattgcgcagtaattcgacatgcacatgagttggcaaaaaatgaaggaagaactttcgactcagtaagggctgctttcttggaaggagagcctctttatgaaggtgcaaagtttcatgaaaaaaaccatatacaaatagctgttattaaccccaactgtatcaaagggatttttattccaagaaaaatagcttattaa

SEQ ID NO: 100449 - DNA, 168 bp, Enterobacter aerogenes
atggatatggtagaattattaagaagggcgaaagaatcagcaaaacatcgctctgatgaagaaaggcgtcaacttttgattgatgcaaagatccttaccaaagaaggtcattataactctcgtttctttacaaaagaaactgttgagaaaagcaaaaaaactgattaa

SEQ ID NO: 100450 - DNA, 693 bp, Enterobacter aerogenes; identical to SEQ ID NO: 11600

SEQ ID NO: 100451 - DNA, 276 bp, Enterobacter aerogenes; identical to SEQ ID NO: 11599

SEQ ID NO: 100452 - DNA, 2196 bp, Enterobacter aerogenes; identical to SEQ ID NO: 91973

SEQ ID NO: 100453 - DNA, 234 bp, Enterobacter aerogenes
gtggcgacgggtaatctggtggtggcggctatctcgcggcaaaacccggcgaaagccccggtcgccaactttatgcttaaggattcaccgtgcgtgattggcctgaaaaaaaatgaaccggcgctgaaggaaaaggtgaacgccttaatcgcgcagggcattaaggacggcaccctcaatacgttatcacagcagtggctgaaagcgccgttgcccagcgactttgccgcttaa

SEQ ID NO: 100454 - DNA, 360 bp, Enterobacter aerogenes
atgaaaaaagcaatgattgcactatccgctattctggtcgcttctccggtattcgcggcaaccactacacatgcaaccgatgataccgtggccgcagcccacgaaaatgccaacacggcaaaagaaaaactgcaccaggcgcagaatcagggcgaagagatgaagctcaagtccaaacatgctgctgaagggaaaagcgatagcgtcggcagccagataagcgaaggcacgcagaaaacctggaataaaaccaaagaaggcgccgagaagggctgggataagaccaaagaaggcactgagaaaggctgggataaaaccaagcaaggcgctgaagagttaaagaataaagtctctgagtaa

SEQ ID NO: 100455 - DNA, 1521 bp, Enterobacter aerogenes
atggtcagcaataatagcgtacagtcgggcgaatatttgttggaaatgagtgacatcaacaaatctttccccggcgttaaagctcttgataatgtcaacctgaaggttcgtccgcactctatccatgcattaatgggtgagaatggcgcgggtaaatcgacattattaaaatgcttatttggaatctatcaaaaagattccggcagtattctttttcagggaaaagaaatcgatttccattcggcgaaagaagcgttggaaaacggtatttctatggtgcaccaggaattaaacctggtacttcaacgttcggtcatggacaacatgtggctgggacgttaccccaccaaaggcatgtttgtcgatcaggataaaatgtatcgcgataccaaagcgatatttgatgaactcgatattgatattgatccgcgcgctcgcgtggggactttatcggtatcgcagatgcagatgattgaaattgccaaagcattctcctatgacgcgaaaatcgtcattatggatgagcctacctcatcgctgacagaaaaagaggtcaatcacctgtttaaaataatccgcaagctgaaagagcgtggctgcggtattgtttatatctcccataaaatggaggagatatttcagctatgcgatgagattacgatcctgcgcgatggtcagtggattgccacccagccgctggaggggctggatatggataagatcatcgcgatgatggttggccgttcgctgaaccagcgttttccggataaacaaaacaaaccgggcgaagtaatccttgaagttcgtaacctgacctcgctgcgccagccgtcaattcgcgatgtctcattcgatctgcataaaggtgaaatcctcggcattgccggactggtgggcgctaaacgtaccgatattgttgaaacgctgtttggcatccgcgaaaaggccagcggcacaattaccctgcatggcaaaaaaattaataaccatagcgctaacgaggcgataaaccacggctttgcgctggtgaccgaagagcgtcgctcgacgggaatttatgcttacctcgatattggttttaactcgctgatatcaaatatcaagaagtataaaaacaaggtcggtctgctggataattcgcggatgaaaagcgacacccaatgggttatcgattccatgcgggttaaaaccccaggccatcaaacgcaaatcggttcgctgtccggcgggaatcagcagaaggttattatcggtcgttggttattaacccaaccggaaatattaatgcttgatgaaccgacccgcgggattgacgtcggggccaaattcgaaatttatcagctgattgccgaactggccaaaaaagataagggcatcattattatctcttctgaaatgccggagctgctgggaattaccgaccgtatactggttatgagcaacgggctggttgccggaattgttgagaccaaaaccacgacgcaaaatgaaattctgcgtcttgcatcattgcacctttga

SEQ ID NO: 100456 - DNA, 1290 bp, Enterobacter aerogenes
atgttgttggccggtagtctctttttattcacgctggtgttggttatctggcagcccaggggcctcagcatcggctggagcgcgagtattggcgcaatactggcgctggccagcggcgttattcatctcagtgatattcccgttgtctggaatatcgtctggaacgcaacagcaacttttatcgcggtgattatcatcagcctgctgctcgatgagtcgggcttttttgaatgggctgcgctgcatgtctcccgctggggcaacgggcgcggtcgtctgctgttcacctggattatcctgttaggcgcgaccgttgcggcgctgtttgctaacgatggcgcagcgctcattctgacgcccatcgtcattgccatgctgctcgctctggggttcagcaaaaggacaacattagcctttgtcatggctgccgggtttattgccgataccgccagcctgccgcttatcgtttccaatctggtcaatattgtctcagctgatttcttccggcttggttttacgcaatacgcctctgtgatggttcctgttgatattgctgccatagcggccacgctgggcatgctgcatctgtttttccgccgggatattccagcaacttacaacgtcactttgctgaaaacacctgccagcgcgattaaagatcccgcaaccttcaaagccggctgggttgttttgcttttgttgctggttggtttctttgttcttgaaccgctggggctgcccgttagcgccatcgccgctgtcggagccgctgttctgtttgccgttgcgaaaaaaggtcacgccatcaataccggtaaagtattgcgcggcgcgccctggcagatcgttattttctcgctgggtatgtacctggtggtctacggtctgcgcaatgcgggcttaacggaatatctatcgggtacgctgaatatgctggcggataagggactgctggcggcaacgtttggcacgggcttcctgaccgctttcctgtcgtcggtaatgaacaatatgccaacggtcctggtgggcgcactgtcgattgaaggaagcaccgcttctggcgttattaaagaagcgatgatctacgccaacgtgatcgggtgcgatttaggccccaaaatcacgccaataggcagtctggcgaccctgctgtggctgcacgtactgtcgcagaaaagcatgaccatcagttggggatattacttccgcacgggcatcgtcatgacgctacctgtgctgtttgtcactctggccgcgctggcgctgcggctctctctcactctataa

SEQ ID NO: 100457 - DNA, 447 bp, Enterobacter aerogenes
atgttaagtatttttaaacccgcagcgcataaagcgcgtttgccggcggcggaaatcgacccgttgtatcgtcgattacgttggcagatctttattggcatcttcttcggttatgccgcttactatctggttcgtaagaactttgcgctggcgatgccttatctgattgagcagggcttctctcgtggcgacctcggtttcgcgctttccggtatctctatcgcctacggattttcgaaatttatcatgggctcggtctccgaccgctcgaatccgcgcattttcctgccggcagggttaattctggcggcgctggtgatgctggtgatgggcttcgtgccgtgggcgacttccagcatcatgatcatgttcgtattactgttcctgtgcggatggttccaggggatgggctggccgccgtgtggtcgtaccatggtgcactggtag

SEQ ID NO: 100458 - DNA, 348 bp, Enterobacter aerogenes
atgaatatattcgatcactatcgccagcgctatgaagctgccaaggacgaagagttcacactgcaggagtttcttaccatctgccggcaagatcgcagtgcttatgccaacgcggcagagcggctattgacggccattggtgaaccagtcatggtcgatacggccctggagccgcggctgtcccgcctcttttcaaaccgggttgttgcacgctatccggcgtttgaagagttctatggtatggaagatgccatcgagcagattgtttcctatctgaaacatgctgcgcagggtctggaagagaaaaaacagattctgtatctgctggggccggttggcggcggttaa

SEQ ID NO: 100459 - DNA, 1557 bp, Enterobacter aerogenes
atgcaaagggtgccaatctatgtgctgagcgcgaatggcgaacgcagcccggtcaacgatcaccctctgtgcctgtttaacccgcaggaggacgcgcagatcctcaataaagaatacggcattcctaaccgttatctcggcacaattatgtcgccgtgggcggctaaacgcctgcacgagttcggcggtgatatcactaaattccgcgtcgtgaaagtgtggccgtcaatcctcgaacagattgccatcgccaaaacggagcccggtgatgaaaataaccaggacatttcggcgctggtagggaaagtggatatccgtaaactggaacactatgcgcaaaacgacccggatgcctatggttactccggcgcgctgtgccgcgccaaccaggggatcatggaattcgtcgagatgtttaaagcgccgattaaagtattgcacccactgctgacggcgacccaggaaggcaactataacggtaccgaaggtatctccgccctgccgttcaacggcattatcctcgcgcactccaacgaatccgagtgggtgaccttccgtaataacaaaaacaacgaggcgttccttgaccgtgtctatatcgtcaaagtgccttattgcctgcgcatctcggaagagatccgtatttatgaaaaacttttgaataacagtgagctgacccatgcgccatgcgccccaggaacgcttgaaacgctgtcgcgcttctctattctgtcgcgcctgaaagagccggaaaactcgagcatctactcgaagatgcgcgtctatgacggcgaaagcttgaaagataccgacccgaaagcgaaatcctaccaggagtatcgtgattacgctggcgtcgacgaagggatgaacggtctctctacccgttttgcctttaaaattctctcaagggtgtttaacttcgatcatgccgaagtggcggccaacccggtccatctgttctacgtactggaacagcaaatcgaacgcgaacagttcccgcaagagcaggccgaacgttatctggaattcctcaaaggctatctgatcccgaaatacgccgaatttatcggcaaagagatccaaacggcgtatcttgagtcttattccgaatatggacagaacatttttgacagatatgtcacttatgcagatttctggattcaggatcaggagtaccgcgatccggataccgggcaactgttcgaccgtgaatcgctgaattcggaactggagaaaatcgagaagcccgccgggatcagcaacccgaaagatttccgtaatgaaatcgtcaacttcgtgctgcgcgccagagcgaataacagcggacgtaatccgaactggaccagttatgaaaaactgcgcacggttattgagaagaaaatgttctccaataccgaggagctgttgccggtcatttcgttcaatgccaaaacgtctaccgacgagcagaaaaaacacgacgacttcgtcgatcgcatgatggaaaaaggctatacccgtaaacaggtacgcctgctgtgcgaatggtacctgcgggtacgtaaatcgtcctga

SEQ ID NO: 100460 - DNA, 348 bp, Enterobacter aerogenes
atgaaaaaaaacatcttcggagtcacattacttctggcatcatcaacttttgcgggaacagttgatgattatttatcacgccacccgcaattaaaagaaagcgccactgtcgacatttatgtaaaacgcatggcattcatgatggcattaatggatgcacaacaacgatataataggtcagacgatgactttatataccaactcctttcaagcaatggtgataaatatgcaaggatgggcgtaagaaaattttcccgcgattgcaagatagagaggagcataggtcaaagtggcgagcttaataaagaagagtgtgacctaataatcaaggtagacaaacaaaaatag

SEQ ID NO: 100461 - DNA, 921 bp, Enterobacter aerogenes
atgacaacgaaacaaattaaccttccgcaccttgcggagatggtctttggcgtgccgcattatgtgtcacggcaggctatggatgctgtaaaagctgtattacttcctcgcattcagggaacggtgactgactctgtcattacgatggcgctaaatccgaatgagaccaacgctcctgagcaggtccagccatccggtggtgtggccgttatcccatctcacggtttgctggttcctcgacgtggacaaattacacaagcttgtacagagctaaccagttatgaacgaatccgcagccagctatatgccgcattaaacgatccctcaattagcgaaattgttctggatattaattccggtggtggttttgcatcagggtgtaaagaactggctgactacatttatcaatcgcgagaaatcaaacccattaccgcgattgtgaactttaatgctttttcagcagcctattttatcgcctctgcttgtagcaaagtcgttatcagccagaccagcggtgtggggtctatcggggtaatcatggaacacctggatacttcgaagatggaagaaaatatcggtgtgaagtttacttcaatgtaccgtggagataacaaaaataacggcagttcgcatgagccactgagtgaagcctctctcgcgatgtacggcaagatgcttgacgacatgtaccagacattcacttcttcagtagctgaatatcgtggccttgatttacaggctgttattgatacgcaagcaggcgttttcttcggggccgacgctatttcagctggtcttgctgatgaaattgctgaccctcagacggcgataaatgctatcgcggcgaagtataagcaaccccgtcaaaaaacctccattcagatgcaggcagccgcgatggacctgcaaaccaaaatgtaa

SEQ ID NO: 100462 - DNA, 135 bp, Enterobacter aerogenes
atgaaagctaatagccatgatgccgaggcgttatataaatggcaaagagaagctgctgagaattgcaaacggattattgaggaaactcggcaaacaataagctggatgatgaagatgaaatataaaggtcgttaa

SEQ ID NO: 100463 - DNA, 270 bp, Enterobacter aerogenes
atggaaataccattagtcggcggaccttatgatgcgaaagttttcgacatcgccgtagacagaaacggaatgccggaacttgaagtgctgaatatgccgcgccggacgactattgaagaagggtgcattgaactactagccgatgcaccgatggctccagtaagtactctacgataccgattggtccgggttaatgggaaagaatggattaatgggcgcttttgcgattctccaacgaaatggcattgggagtatcactatgaaagctaa

SEQ ID NO: 100464 - DNA, 726 bp, Enterobacter aerogenes
atgatccgattcgatgaacttacaggcggagcaaaggatacgctctttgctcttttcttccgtggagcacttccgtcaggagatttaccggcgaagagtggcgcagcagaattacgcgagcgaggtcttgctgaaagcgggaataccgcgatggcatatcaaggggaaaattacttcacctggttgacgcctgcaggcttgaagttctgtgttgagcattttgttacgccgcgctcttgtgccatggatattagttacatgttcaagacaccgcccgacgacacagttaccagctatgaagggcaactttgcggtaatagcatcgagcaagaaacgctttcggcggtgctagtgcatttcctgcccactactaacctagataaagccagcgatcacgctgtaaagctggcatcggctgtcaaagcttcatttgccgaattggatcgccctacgggtggcgttgttagtggcgaatatgctccccttcgaatttttggcgaaataggcgatccaataacaatccccgcatcgaccatcaagccgggcgctgatggtgagggaaagcaggtttcaacccttacggtaagagtcgagatggatgctagctccgtcctgcagtcgctggatgaggtcgaaagcgccatatctaagcacattgctaccgttttagataaagggcttaagcctgacggtaaaatctggtctgctattaagaatcatcgctaa

SEQ ID NO: 100465 - DNA, 297 bp, Enterobacter aerogenes
atgagtaaacaacgtaaatggcgcttcgtcgctgagggtgcagaaaagcaggaaggcggtacttatagcggtccacgaaccggtgtttttcaggtctggtatgtcactggtggcgatggtgtgaaatttcgccgttgcccgtatacgcctggcggttggaaggttcagaagaaccgcaccacgtatgatggcaagcctgtcgaatatgccgtcaataatcctgaagacatcttatccctggacgcttttgtcggagaaaaaccatatgcgggatacggaagggtacaaggggcgtaa

SEQ ID NO: 100466 - DNA, 240 bp, Enterobacter aerogenes
atgagactacaaatgaacactcccggtggttctgtgattgtcgagagcaacctggtatctcagttttaccccgatttcgaaagcggtggagagctaacaaccattgaaactgtttcatctgatgggaaaacgttctctgtgaaagttaagcactcgtttcatcaggttactcatgccctggctaccgcatggcgcgtagatgaaaagaaagcattgcagctggacgaggatgccaaatga

SEQ ID NO: 100467 - DNA, 405 bp, Enterobacter aerogenes
atgacagatatcacccggctgattaacagtattaagcgccgctcatcctcagcaagagagcttggttacgatatcctgttcgtgaaactcgatgacttagatgtcctggcggattcgctggagactgcgttgcgtgtaaacgccgcccaggccgatcacatcaagcagctgcaggacagctttaacaagctggcagcggagaacggggcgttgaaacagttcccagaacagattgttaaatttattggtggtcttggtacaagcgagattggtagcgacacgaaagagaaaattgagttggcggcaaatcgcattaaaacccctatcaccgatcgtacagtcgccgggtttaaggctgatggggaggaatccaccagccaaccgctcgaaggagggaaagtatga

SEQ ID NO: 100468 - DNA, 792 bp, Enterobacter aerogenes
atgaacgtactctctgttttctcatttcaggaagaacatcctgttagggtagttatggttgatggtgagccgtggttcgttgctatggatatctgctcagccctccacatcgccaacccttctgatgctttaaagaaattggaccatgatgaaaaattgaccctcggtttaaccgaggctcaaaaattagatcgtatggcaagggaagttaatgtggtttctgaatctggactctatacgctcatcctccgctgccgcgacgcagtgaagcagggaacgacggcctggcggttccgcaagtgggtcaccaacgaggttctaccagctattcggaaaagcggtgaatataactacgtcgagccaatgccaaaaagcgccggtgaaccgttggactggcggcaaaaggaagaattacgcggcctgataaacgatatagcccaaagttttcgttaccacaacgcatggaaaagtggtgtatggctggcgctacgtcgcgcctgcagaaacccatcccccaatccgattacggttgatgatctcccagccatcactgccgagttgcgccggatattaacgtctgcagaaaccgcgctggataatatgcgggcctacgagcgggaatttctgcgtgaggtagttcgcggtgcgcgtcggagtgtgtcgcgtgaggaattgtcaatcatcgaccttggctcagaggtggagaaggtgctgccagcgcatttcgagctggccatcaataaactggaggcgttatccacaaaattagaggctcctgccgtatcttcctga

SEQ ID NO: 100469 - DNA, 486 bp, Enterobacter aerogenes; identical to SEQ ID NO: 10073

SEQ ID NO: 100470 - DNA, 213 bp, Enterobacter aerogenes; identical to SEQ ID NO: 10074

SEQ ID NO: 100471 - DNA, 417 bp, Enterobacter aerogenes; identical to SEQ ID NO: 10075

SEQ ID NO: 100472 - DNA, 420 bp, Enterobacter aerogenes; identical to SEQ ID NO: 92004

SEQ ID NO: 100473 - DNA, 393 bp, Enterobacter aerogenes
atgtctttcaaacattggcttgaaaatatgtccacattcgaaatgatttctgtcttaattggtctttctctaactctggcattcatcattgcaatttttttttcttttagaggtggtgcgtcacaatttaaagatgcaagggtttttttagagcgtgaaaagtgggaaggtgagctataccagtctacaataaactcatggcgccaaactaacattcgtcatggcattgattttttctatgatatatttttttatatcgatggagagtctaaattacgatcagccaaagctttaatttccccagggcaaatgcatctcttggtcaaagggcttccaattgttgttaagataggaaaaggaaataggatggctgttgtgcgaattggaaaatga

SEQ ID NO: 100474 - DNA, 165 bp, Enterobacter aerogenes
atgtccgacaccgcagactccacgctgaatgccctggctgggcgcccatttggatgtacggctacagctgtatgtggcccgccatttattaccggctgcgcaacgctcttgccaacccaaaaacgcggcgcggttagggcggaccgcggtactgcgcccgcttaa

SEQ ID NO: 100475 - DNA, 378 bp, Enterobacter aerogenes
atgtttaatcgtaatgatctgaccatttcgcttttctatgcttccagcacgaatgaggaaggcgaaaaagtcgcgacattaaccgttctggtgaacaattccgacatggtggccatgcagagcaacaagctgcagtgcatcactgatatcaacttcaccgggcaaatttacgtgtggatcaaaggtcaacgggtcggcaagtattccgtagacaaggcagcgtctaacagtactacgcgttacattccggtgacgggtacgttgtccggtattacagatcagaatgttagatgtgagattacggtcgacggaggcggcatttataactttatgggcggcttcgcgtttatgactcgctcgtccggttcatggtcgtaa

SEQ ID NO: 100476 - DNA, 213 bp, Enterobacter aerogenes
atgcttaaagattatttttcacaatatatatcggaacaagagcgtcgcttgcttgctgtggaagctgctttggaaattgctaaagcttctgtcagcgcgcctacatcctactctggtattaaagcgcaggcagatttgaaaaatgtcgcagctgaaattagtaatttagcagacgcaatccaggaagcccttgagggtgacgaagaggaataa

SEQ ID NO: 100477 - DNA, 534 bp, Enterobacter aerogenes
atggatgataaagtgatggcgattgctgctttgcaagctgcgcaagattcagcaaactgggcctattggtcaatgataggaacatggttggctggattcgctaccgcagccgcagtgattgtgtcattgtacatagcaaaaatgagaccaaaaccatgcatcaaaggagagatcactctttcagcaaggaaaataggatcttggcaaaaagggataggtatctcagttgctaatataggtcaaatgccagttaacatttcttcaatggtttggcatttctcaggtgacctcagttttatgcatgattttgcacctggcagccatagtcttcctaaaaggttagaacatggagaatctgcatttttctttatcgaaaatgatgacgagatcacttgggcgaaagatgtaaaaaaattcattcttgaaaataatggtgatatcaaaaagcttcgaatggcagtcaatttagcctcgatggacagattttttataaaacccgccaaagaagtgataactgaaatcgaaaattcataa

SEQ ID NO: 100478 - DNA, 519 bp, Enterobacter aerogenes
atgcccacgttgctgaaagaatactggaagccactggcgatcattttgctggtggcttttttattatggcgtgcctttagctttggtgtcgagacctctgacaataactggggtcagcaatgtctacagcgtgatatttcatattcgacagcaattcttcatcgagaagttgcagaacgggcagaagaacagcgccgccagcaggccgcagacgaggaacagaaacgtgtagatgaagaattgacgaaggttcgggccgatgctgctgatgctcagcgtgctggcgacagcctgcagcagcagcttgccaaacttcgtatccagcccgcaggaagtgaaaccggccgcatttccgcagttgccgccacaggcgcggcaaaagccgagaccgccagaatgcttgccgagttgcttagcgaagctgaccgcagaacgggaatctatgcagaagaggctgaccgtgcttatgtcgccggtagcggttgcgagcgaacctacgacaaagtgacgaagcaatga

SEQ ID NO: 100479 - DNA, 270 bp, Enterobacter aerogenes
atgatcattattttgcataactaccagcgcaagtacggtttgaatacggtaagtgacattattaagcggtgggcaccgccgaacgagaataatacacaagcttatatcaatagcgtggctcaggcgacaggagttacccccgaacagcgcattgataccagtgacagccgattcatgatgaagctgttacaggccatcgttaaacatgagaacggcaaacaaccttactcgattgatgtgtttgttcaggcgatcaatctcgcggggtaa

SEQ ID NO: 100480 - DNA, 864 bp, Enterobacter aerogenes
gtgatcagaacgacaacttttaaagtcttctatgatgcagaggacacggaactttcacagcataaaatcgatgctaaaacactcagcatatcaattggttcgatggctgatcttatttctacagcagacaagaatctaaatgacggtcaagagactgttaagctgatggtcacaaacccagcagaggccggttcattaggtatcgcctatacaatggtcgaactgataccgaacgctgtagatgttgcaaaggtaattggtttaaccggtcttgctggtgctggagttggagcaaccgcactatcattgatccgtcaactaggtagtaaaaaggttttaactattactaaacgtgtcggaacttctgaatccgtacttgagttagatggtgaacaaattgtttgtaatgattatgttgcaaagttagtaacagatcctgtagtgcgcgaagcgattgtaaacgttattcgcgcccctttagatggtaaagacaacccagtcttcaaagttgtagactctaatggtgaagaggttatccggctagagggtgagcaaacagaagaagttaaaccattacccaaaggtacccttctcgaaaaagaagtaactgtcgaagaagtaaatgttcggtttgtgcaggttaattttgaagggtcgaaaggctggagaatggttcacatcgatgaagagcattcagttgctctggaagatgatgtattccttaaccaagtacaaacgggccaagttagctttactaaagaagatctttttgttgtggatcttgaaacaacaagaactttcaccgcacggaaactaaccgaaagatatgcaatcaaaagggtgaagagaaaacgtgcagcctga

SEQ ID NO: 100481 - DNA, 279 bp, Enterobacter aerogenes
gtggaagacattctgattgcctgtgtggacggactgaccgggttcccggacgcgataaacagcatttatccgcatacagaggttcagttatgcatcattcatcagatacgtaattcgattaagtatgttgcgtcaaaacaccataaagcgatcatggctgacctgaagctgtgtcgaaaggaggcagcggaaaaagcgctggatgagttggaggcaaaatggggtcagcagtatccggtagtgctccagtcgtggcgacgcaagtgggaaaatttgtaa

SEQ ID NO: 100482 - DNA, 633 bp, Enterobacter aerogenes
atgtcccaacccttcgatttcgacaaagcacttaaagcactccagtccggtcaggcactaaccggcaaggatggtgttttaataccgttaatcaaacagttaatcgaagcagctctggctgctgaacttgactcccatctggctcaggacgtcgaagctaaccgtaaaaacgtttccagtaaaaagaccatcaaagctccgaacagcagcttcgaattgtcgattccgcgcgatcgcaatggcacttttgagcctcagttagtcaaaaagcatcagaccacgctgtccgacgagattgagcgtaagatcattcgcctttttgcgctggggatgagctaccaggatatcagtcgggtaattgaagatttatatgctttcagcgtgtccacagccaccatcagcgccgttacggataaagttgtccctgaattaaaacagtggcagcagcgcccgctggagaaggtttatcccttcgtctggctggatgccattcactataaaatccgcgaggatggctgttatcagagcaaagcggtttataccgtgctggcactgaatctggaaggcaaaaaaatgttctgggcctgtatctgtcggaaagcgagggcgctaacttctggctgtcggtattaa

SEQ ID NO: 100483 - DNA, 255 bp, Enterobacter aerogenes
atgcacgataaaggtcgccaaaataagcaccaaaaatcaaaaaaaataatatttatatttaaaatcataggattaaaagcaagaaaatgtatagcactgaatggtaaaacaaaatcttccccgaagactaaaataatcatcgctatcatcattaactttatttattaccgtcattcagttctgaatgtctgtttacccctatttcaaccggatgcctcgcatccggttttttttacccttctttacgtatcttga

SEQ ID NO: 100484 - DNA, 480 bp, Enterobacter aerogenes
atggcaatctcaacgccgataaattacccgtatgaatatttaccaggccccttgaaagatggctttggccttaaacctgtctcttcgttaaaacgaactccgatggttacagggcgcgccaggcaaagacgatcttacatctccacgccaacggcaactgatgtatcttggatttttagcgatgttcaggctcaggcgttcgaggcctggtttagggatgtgctaaacgatggtgcatcttggttcaacctaccgttattaacaccgattggccaaaaaaattacgtttgcaggtttactgatatttatgaaggcccgacgccagaaggcggcatgttctggcgttacaccgcgcctatagagttatgggaacgaccaacactaccagtcggctggggtaattatcctgattggattgtaggtagttccctgcttgatatcgcgttaaacagggagtggccaaagcatgacggtgcttaa

SEQ ID NO: 100485 - DNA, 492 bp, Enterobacter aerogenes
atgtctgtattaacgcaaggcacacagttctttgtgctcaaatctggcgtggtcagcgaggttgaatgtattaccagtttcagccccggcggcaaccctgccgatcaaattgaagatacctgtctgagtgaacgggattccagaacctacaaaaaagggctgaaaacgccagcatctgcaacggttggactaaacgccgatccggcaaacgccagccatattatgttgcatggcttggctgaggctaatgaccagacgccattaacttttgttgtcggttggtctgatggtacgagcgttccgactgttgcagctgctggcgacgaagatgctgttgatggtcttgtcctgccatctgatcgcacctggtttgttttccaggggtatgtttccgatttcccgtttgattttcagggtaatgcagtggtgactacttcggccaccatccagcgttcaggttctgctgtgtgggttccaaaggcggcagcgtaa

SEQ ID NO: 100486 - DNA, 540 bp, Enterobacter aerogenes
atggctgatggcgtagatgtaaatttaaccgggcttgattctgtgcttgggaaaatggacgccgtttcgaaggttacccgcgataaagctggccgcgcagcactgcgaaaagcagcaaacattatcagggatcgcgcccggagcaatgcttctcgagtggatgaccctctgactaaagaagccatctataaaaatattacggttagctggagtagcaaagcttatcgcagaacaggcgatctgactttccgtgtgggtgttatgggtggtgccaggcagtatgcgaacactaaagccaacgtcaggaaaggcagagtcggcaaggggtataaaacgcttggcgataaaggcaaccccggcggtgatacctggtactggcgttttcttgaattcgggacagagcatgcagcggcacatcctatactgcgcccggcaatgaacggcgtcgatactgatgtgatttatacatttgcgtatgagttggaaaaagctatcgacagggcaatcagtaccgccgccaaaaaaggaactactgcatga

SEQ ID NO: 100487 - DNA, 318 bp, Enterobacter aerogenes
atgagcacaacgattgaaaagctaagggctcagtgtcggatcgatatcgacgacacaacggaagatgagtcgcttatgctctattatggggctgctcgccgtaaggcaaagaacttcattaaccgtaatctttatgaagatgaagtgccggaaactgatcctgatgggctggtgattgctgacgatgttttattggcattgatgctgctggttgggcactggttcaacagcagggaagaggcatccgatgttaataaaatgagtattccattcgggtttacctcgctgcttgagccctatcgattcattccgctctga

SEQ ID NO: 100488 - DNA, 1239 bp, Enterobacter aerogenes
atgaaactgcatgaaatgaagcaaaaacgtaacactatcgccaaagatatgcgtgccctgcatgacaaaattggcgattcgccatggacagatgagcagcgcactcagtggaacgctgcaaaatctgagcttgatggacttgatgagcgtattgctcgcgaagaagaactgcgccgccaggatcaggactatatcgacgaaaacgagcaggagcagcgtcagcaacagaaccgtgatccggctaacccatcagcgcaggctgatgaacgtcgcgcggctgcgtttaacgcctttctccgccgtggcttgggtgatatgagtgcggaagaacgccaggcgctgaaagaactgcgtgcgcaggggacgaccccggacgaaaaaggcggttataccgtacccactcagttccgcaacaaaattgtggatgcacttaaagattacagcggtattgccagcgtggcgcaaatcctgaatacgtctaacgggcaggatattgactgggctacctctgacggtaccgctgaagaaggtgaactgttgggtgaaaacaccgctgcatctgaagaagatgtaacctttggcggtgcaacgctgggggcgaaaaagttatcttcaaaaattatccgtgtatctaatgagttactccaggatagcggagtagatattgaagcattcctggcggggcgcattgcaacccgtattggccgcggtgaagctaagtacctggtgcttggtactggtgctggtactccattgcaacctaaagggctggctgcatcagtaactgggactaaaaataccgcctctgcaactgcgtttacctggaaagagctgaatgcgcttaagcactcggttgatcctgcatatcgcaacgggccgaaggttcgctttgcatttaacgacgctacgctgcaactggtggaagaaatggaagatggccagggccgtcctctctggttgccgaacattatcggtggagcacctgctactgttctgcaggtgccgtatgttgtggatcaggccattcctgatatcgcggctggtgccaaatttgcatacttcggcgattttaaccgctttatcgttcgtcgcgttacttacatgacgttgaaacggctggtggagcgttacgcagagtacgatcagactggcttcctggccttccatcgcttcgactgtgtgctggaagataccggagccatcaaagcgctggtgggtaaaccggcatctggcggctaa

SEQ ID NO: 100489 - DNA, 600 bp, Enterobacter aerogenes
atgaatgaccgtgaaacgcgctgctatagcggggaggttcgcgcggaacaacgcaccgatgaacctacccgcattctgggttacggatcagtgtttaacagtcgctctgaacctctctggggattccgtgaaatcatcaagccaggagcctttgacgatgtgctgaatgatgatgtccgtgggctatttaaccatgaccccaattttatcctcggacgtaccgccgccgggacactgtccttgtcagttgatgagcgtggcctgcgttacgacattactgcgccggatacgcaaactatccgcgatctggtactggctccgatgtatcgcggtgacattaaccagtcatcctttgcttttcgcgtagcgcgtgatggtgagcattggtatgaagacgacgaaggggtagttattcgtgaaatatcgaagttttctcgtctgtttgatgttagtccggtgacttatcccgcatatcaggaagccgattctggcgtccgatcgatgaaagcctggcaggaggcgcgcgacagcggtgcgctacataacgccattaatcaacgaatggcgcgtgagcgcctgctgacccttcttaacgcgtaa

SEQ ID NO: 100490 - DNA, 1227 bp, Enterobacter aerogenes
atgctgcttgatgccctgtttcgtagcgaaccgctggaaaaccctgcgctgccaattacaggggattcagcggaaacggacaatatttttgcccgtgatgtgtttgtcagcccggaaacagcgatgaaactggctgctgtgtatgcctgtatttacgttatttcgtcaaatattgctcagatgccgctgcatgttatgcgtaaaacaaacaaccaggttgaagcagcccgagatcatcctgttttttatcttgttcatgatgagccgaatatgtggcagacaagctataaatggcgcgagttaaagcagcgtcatatcctgggctggggaaatggttacacctgggtgaagcgttcccgtcgtggtgaagtttccgggctggaatgctgcatgccctgggaaacgacgctgcttaacacgggtggtcgatatacctatggtgtttacaacgaagagggggcgtttgccgtcaatcccgacgatatggtgcatatccgggcgctgggtaacaaccagaaaatggggctcagtccaattatgcagcatgccgagactatcgggatggggatgagcgggcaggcatacaccagttcattcttcaacggtaatgcacggccagcaggcattatttcggtgaaaaaccaacttaacgaagaaagttgggggcgattaaaaagtatgtggcaaaaggccaccgccgctttacgaagccaggagaataaaacaatgcttctcccggcagagctggattataaagcgctcaccgtttcccctgttgatgctcagatcattgatatgtcgaaactgaaccgctcaatgattgccggaatattcaatgttccggcacacatgattaacgatctcgaaaaagccacgttctcaaacattacgcagcaggccattcagtttgtccgctacacaatcatgccgtgggtgaccaactgggagcaggagcttaaccgtcgtctgtttacccgcgctgagctcgccgctggatattacgtccggttcaacctgacgggcttgcttcgtgggaccccacaggagcgcgcgcagttctaccacttcgctatcactgacggctggatgagccgcaatgaggcgcgagctttcgaagatatgaacccggtagatggcctggatgaaatgctggttagcgttaatgcggctaacccggcaaacgattttaaggcaccaaaaaccgatgaggaaaaaaccaatgaatga

SEQ ID NO: 100491 - DNA, 162 bp, Enterobacter aerogenes
atgaaaaatttaatcacagatgctatcgggctggccgggttcggttcgctcgctgctggcgtttacattgagttcgggattgcggcgtctttgatgatgtccggtagcctgctcctgctttatgcgctggtggcggcaatgagggggaaaaatgctgcttga

SEQ ID NO: 100492 - DNA, 1752 bp, Enterobacter aerogenes
atggcaaccgttgcagatggattccgctacgccgagcgcgtggtatctggcgatatcgtcgctggcgaactggtacgtcttgcgtgccagcggttctttcatgatttagagcacggcccgaagcgcggtgtttattttgatgaagaccgcgcccagcacgttctcgatttttataacttcgtccctcatgtgaaggggcatttgaccggcaaaccgatcgagttgatggattggcatatcttcatcctgatcaacctttttggctttgtcgtcccgctaatagatgaaataacgtttgaaagcattcttgatgacgatggcgaccccatgtttgtgcgtcgcttccgaaccgcctatgacgaagtagcgcgtaaaaatgccaaatcaacgctttcgtctggcatcgggctttatatgactggtgcagacggtgagggtggatctgaagtttattccgctgcaacaacccgcgatcaggctcgtatcgtgtttgatgatgcgaagcgcatgattaagcttgcgccgaaaacactgggccggttatttggtagtaacaagctaaatattcaccaggaacggacgggctcaaaatttgaacctgtagccagtgatgcgaataacctcgacggcctgaatattcactgcgggatcgttgatgaattgcacgcgcataaaacccgcgacgtatgggaagttctggaaacagcgaccggggcacgcttgcagtccctcatttttgcaatcactaccgcgggttttaataaagaaggtatctgctacgagcaacgtgattatgcgattaaggttctgaggaactttgataacccggacccgctttcaattaaggacgacagttattttgctctgatttacacccttgatgaaggtgatgaccctttcgatgaggccaactggccgaaagcaaatcccgggctgggtatttgtaagcgatgggatgacatgcggcgccttgccaaaaaggcaaaagagcaggtcgcggcccgtgtgggattttttaccaagcatctaaatatctgggtgcaaggtgaaaaagcatggatggacatggcgagatgggaaaaatgccgtgatacctgggaaagagcaacatcggcaaactggtctatgtggctcggtgtggacctttctaacaaaattgatatttcagcggcggtaaaagtctggctcgctccaaatggtgatgtttatgttcgctcccgattctggataccggagggaaggttggaagcatgttcgaagcaacaagcagacctttacagaaaatggaatcaggcgggttaccttgaatttacggatggtgatgttgttgatcatgccgtaatcaaagatgaaacaattgaatgggcgcaaggtgattcgctgaacgagtttgcttacgacccatggagtgccacccagtttgctttggcggtcgctgctgaaggcgtaccaattgtcgaagtccctcagacggtaaaaaacctgtctgaagcaatgaaggaaatagaggcgaaaatatactcaggccgctttcatcatgacggtaatccggtaatgacctggatgatgtcaaacgttaccgttaagcctgataaaaacgagaatattttccccaataaatccactcctgaaaacaaaatagatggaccagtcgcaatgtttattgcgatgagccgtttgcttgttaatggcggtggtgaggttgatttcctgtccacgatcgatcctgacgaagaccttttactcctatga

SEQ ID NO: 100493 - DNA, 474 bp, Enterobacter aerogenes
atgtcaggaccgccgaaaaccccgacgcatctggctttggtgaaggggaacccgtcaaaacgtccgatcaataggaacgagccaaaacccccttcaggggttcccccaataccgaaacatttcgctaagcagggtaagtattggtttaagcgaattggcgatgaacttgatgctatcggcgtgttaaccacgctggacgctaaggccctggaattactgattgaggcttacgtcgagtatcgccatcactgtgacattctcgaaatcgagggatacacctaccgtactgaaactcagacgggagatgtactaatcaaagcgcacccagcagcaattatgaaagctgatgcgtggaaacggattagagcgatgttgagtgaattcggtatgacacctgccagccgaacaaaggttggtgtaaatggcccggcggaagcagacccactggaagaatttcttaaaaagcgcaaatga

SEQ ID NO: 100494 - DNA, 291 bp, Enterobacter aerogenes
atgtcatttgaggcgttcacgccctgttttcgttcggtggcagggccagcacaggctttcgaggttcgaatcatcatcggtacccccatgagccttagtcttgatatggtccacggtctttgctgctaccgcacgcccatcacgcaggcagttctgacacaggtgattgtcacgcttcaggatgcgtgctcgcctgatatcccactggctaccatagccacgctcatgccgtgtcttaccctgctgatgctgttgccagccctcatggcgatgctgctcacagtagcctga

SEQ ID NO: 100495 - DNA, 291 bp, Enterobacter aerogenes
atgcataagccaaactatgagcatattgggcgctgtgtggtgttgagccagcaaattgaccagaatactaacaagcttcagcaaatgaagtacgacatagcagtagcgccatcgccgattctgcatggcaatgaattgacccttgatacaaaaacaatcgagcttattgagtcagtagccggacagtaccgcaatttgtttgacgaaacaaagcgcctggtggctgagcataatgaatatgcagtttcagcaggattagacccgataggttgcaaaacatgccagcgttaa

SEQ ID NO: 100496 - DNA, 486 bp, Enterobacter aerogenes
atgccagacctcgttgatccaaccgactcattaattagttttcaatacgctttttctaatggactgattaagccttctccatgcgtagttcacccaagtatgaaggtactcttggatgacgccgaaggtaccccacggtttacttatgcattctttgaaggagaaaaagttaaaggtgttgctgtatatatccctgaagaacctgtagaaggtaagccatgttttggtgttggctatgcagtagctgatgaatataaaatgcaaggcatcggtacccgacttctcatcgccagcatcgaagaaatgcaatacggatttagaaattccctcaatgaattctatgtagaggctattgtcggggttgataatcaggcctctaacaaattagctgcaaaagttttatctgatacacctgagccagggacagattcttactctggacaacctatcaatcagtacatgaaacttttcaaaaccacaaagtaa

SEQ ID NO: 100497 - DNA, 240 bp, Enterobacter aerogenes
atgtacagcagactgttagccatatgcctgatgacgatgttgatcgtgagctgcgcgagcaattcacccgcaaaacctgaagtcatcgacaccgcatgtgactgggtgcggatcatctacctgaccgaccacgacatcgacgtactggataagcagaccaagcgcgacattctggcgcataacaaagcatggcaggtgaactgcaaacctgaaaaggcgcaaagatatgcgcccgagtag

SEQ ID NO: 100498 - DNA, 387 bp, Enterobacter aerogenes
atgtccgaacctataaccggcacaggcttagctggtggcgctttaacgggggcgagtgtttacgggttattaaccggtactgattacggtgttgtgtttggggcgtttgcgggttctgtgttttatatagcgactgccgctgatttaagtgcgccacgcaggatggcttatttcgttgtgtcctatattgcgggggttctgtgttctgggctggtaggttcaaaactatcgacccttaccggatacactgataaacctctggatgctattggtgccgtaatcatttcggcattggctgtaaaaatactcacctttctaaataatcaggatattggctcgctggtggcgctaatcacgcgccggggaggttctggtggtactaaatga

SEQ ID NO: 100499 - DNA, 354 bp, Enterobacter aerogenes
atgactatcaaagctgagtatttacgtgatacatgccaattgcttgttattgaactgacaagacttcagcaattgaaccgaaagttaaccatcgctgatttcttccatctgagcgaaaacgggaaatttgttagcacggtaattaatagatatggcgaatacatgcgttcgaccaaacacttagccgacgaagaaagcagttatggaaaagagatgctttcttatcttgaagatgcttttgcacgccatgcgaacgttgttactgaaggtacctatggtgtagttgatgatgcatttcttttggctataaatgttactgtcgccatcatgcgtgaagctgaccaaatggattaa

SEQ ID NO: 100500 - DNA, 369 bp, Enterobacter aerogenes
atgcagcgtgatattcagcttgtactcgaaaggtggggtaactggtcaaaacatagagttgaaacggaagtaggatattcctctattgctgcagggttcaaagggcttcttccagaaggaggggcaacggttacatgtactgaagacgatgctctcattatcgatagctgcttagggcgtttaaagcaaaagagacccgacgaatacaacctactgttcgaccactacgttaaaaatatatctaagcgggctattgggcggaggcttaagttatcagaaggaatgataagaattaaattccagatggccgagggattcattgaaggttgcctggcgatgctaggtacaaggcttgaaatggaccaatag

SEQ ID NO: 100501 - DNA, 279 bp, Enterobacter aerogenes
gtgtaccaggacgaaaatatctacgtgactatgcccacggttttttctcgtgaggacgccccgtggattaaagagcagttagcaacactcccggcaggtatgcgggaaaaaatcgcgatggcgtatgcgcaggcgtaccaggaagcgttcgacgctgaaccggtgtcattccggcagcagaacgcagcacgccggacggcaaatcgccgattgcgagagttttgcacgaggtataccccagcggtcaggggatatacgtcgctcccacccagggtttga

SEQ ID NO: 100502 - DNA, 516 bp, Enterobacter aerogenes
gtgggtaatcaaccagattggaaaattgaaaaacagccagcgtggctggtggccgcaatcaaaaaaacgatagctgaattacctggcgggtatgccgaagcatctgaatggctagatgtaaccgagaactcgttatttaaccgacttcgtgcagatggcgatcaggtattcccatttggctgggcaatggttctacagcgcgctggtggttcacaccacattgcgaacgctattgctaaagcctcaggtggtgtttttgtaccccttgctgatgttgaagaggttgataacggtgacatcaatcaaaggctcatggaatcggttgaatggatagggaaacattctcaatacctccgaaaagcgactgctgacggtgttattgaccgtgatgaacgcgcacagattgaagcgaacagctatcaggtcatggctaagtggcaagagcatttaactctgcttttcagggtgttctgtgcccctgatgacatctctaatggaccatcaaattcagggtaa

SEQ ID NO: 100503 - DNA, 627 bp, Enterobacter aerogenes
atggaaactgttggccagcggatcaaatcgctgagaaaaatcaccaagacttcccaaaaggaattaggtaagttctgcggtgttagtgatgttgcagttggttattgggagaaagaccttaacctccctagcggggaggctttgtcaaaattggcgaagttctttaatacctcgatagactacatactttacgggacggagtttgaaggcaggctcataaccaatatgcgtaaagttcccgttctatcatgggttcaagcaggatttttcactgaaacaaaaccgtccgagattttgaacgatgcagatcggtgggtagaaacatcactgcgaattagtgacaactcttttgctcttgaagttaaaggggattcaatgacaaaccctaatgggttaccaactatacctgagggtgcaacagtcatcgtcgatccagatgcagaggtaatgcatggaaaaattgttgtggctcgggtcgatggtacgaatgaagctacagtgaaaaagcttgttattgacggtccacaaaaatttctcgtaccacttaaccctcgctatccaaacattcctatcaacggtaactgcgtaataatcggcgtagtcaaaggcgttcaatacgagctttaa

SEQ ID NO: 100504 - DNA, 225 bp, Enterobacter aerogenes
atgcattttgacttggattttagagctgctgatacctatcctgaagcaggagcggttgatcaatgcatattactcattaatcatgatggggattatgtggttggaacgcctttcttcagcgaggatatgcaatttatttgcgttatgagtagtatggggccgattcacccaaatgattatagtatgtgggcactgctgcccacaccggaagttagaattgattga

SEQ ID NO: 100505 - DNA, 915 bp, Enterobacter aerogenes
atgctttacatgaaagaaaatggtgtattgatcaaactggacagctgggaacaggtttattcaagacccaatttcattaaagatttagacctcaaagaaaaaaaattaaaagcacttattggctattacaaaaatgagcctccccgtaaatgtggaatcaaaagctgtcatagcagccacatgaaagggggcatcgtgctgactgaagatgattttgaagcctctatcggccatatgtgtggtagtaagatttttgaagaaaaatttgatgatcttatcaagcaacttgagaaggaagtcgatttcgaaatctataaagaagccgtagcgagccggaaagctcgtgtgttcgagtactggaacaaggcagctgcacttacttctggaaaaaatggtgttcttaagcttgctgaaaaaatctcagctcttaaagaccctttggttgctggacgattccctgtaatggaattaggccgtatggcagctaaccaacaaacaaaagtgaccaaagaaatctgggtagaaaaaaagaaaaaggaactcaccgaagaagaagcaaaaagcggtgagaaaaaatataaattagaaacagtagtctgtggtcagataaaaaatacagaagtcctgctatcagttaatgatttaggcaaaatttataaagaagatattgaatctgtgattcagggccttgaaaagttagacttacaaaaggctacagcaagacaaatccaaactataggacgtgctgcttcagccctggatgtccgacttgaaactgcatctaggttaaaggctcttgcgacggattttttaacccgtgaaaatctttacccaatgtacgaaaaaatgttttcgatggatacgattagccgaaaagaccttgaactgtacgaagagctaatcaatcaattctaa

SEQ ID NO: 100506 - DNA, 252 bp, Enterobacter aerogenes
atgaacgtatccgaaatggaaggttttctgcgcggtaaatgcttaccaggcgatatcaaggttaatgaatcaaacgctgaatacctggtaagaaaactcggagcagtatgcgagttacaaggagaaataacagccctggctgcaactttagagaaatgtcgcgaggtgtcaggctgtcctgttggcgtagacctgcaggatcatctgcagaaactggtatcagagctaagcgttgtagaggtagcgaaatga

SEQ ID NO: 100507 - DNA, 702 bp, Enterobacter aerogenes
atgaaacgtcgtaattttgaaaccgatacccgctttctgctggatacagcaaatcaccgccttgaaatcatccgtgatgacggtctttaccgccatctgcgcatgaaacagccgggtacgtccttctactactacgacgtgatcacctggcctggctacttgacggtaaccggtgacatgggaacctggacattctcccgtatcgccgacatgttcaacttttttggtgcctgggaagggctgatcaataccagttattgggctgaaaagttagaagctggcgcgggttgttctgcacgtgagttgctggcgaaagagtacagccacgaggaattctgcaaaagtctgaaagattcgctgagcgagtatctggaaatcggcgaagacgaggaaccagatcaggactgggacgacgatgacgatacccctgacagcgataaatctaaggtgcgagaaatcatcagtgaattatgtcgggctgagtttaacaacgactttgaagcctataacgctgtttatgatgccgactggccagaagggtttagcgcctgggatatctgcgacggcctgatctttaagacgtataccagccatttccgatggattttattcgctatcacctgggcaatcagcaaataccacaacgcgaagcttgttgataaagcgatggttacgtttctggctgttaagggggccaaatga

SEQ ID NO: 100508 - DNA, 207 bp, Enterobacter aerogenes
atgattaccggaaccacgaactacgacgaagttcctgatgttcgttgcgccttgtgcggcggttattacaaagccgacgatccggaaagtcacgaatgcgaggaggaagcacaatcccttgacgaaattgaatgtgatatctgcggtttcaaaagcacagacccggacggtgctcaccactgttgcgaggataactctgatgactga

SEQ ID NO: 100509 - DNA, 240 bp, Enterobacter aerogenes
atgactgatatcacccgactgttagccagcctcaagcgccgctctgcccacgtaaaagaattcggcgacgatattacgcttgtaaagcttgaagacctcgacgcgctggtagaatacgtggagttggcacgaaacagagccgcggattgggaggaaaaagcagtcatcaactatgcggaacgcacggccatgattcagcatattgccgaattggagactaagacagaaagaaaaaagtag

SEQ ID NO: 100510 - DNA, 1023 bp, Enterobacter aerogenes
atgtacgagttgggttgctcccgaaaggaagtatccagagccggggaacgtttagtgggctgttttacgcaaaaacagccttacgatgataaagatgtgcaaatactccatgattggcgtatgtgtcatgtgtacccattagaacagcttactaaatacttagagcgagaagccaaggccctgaacccaaatgcaattatatcttcaagaataaaaaggctcccttccattgtggaaaaattagccagatttccaagtatgcagcttggtcgtatgcaagatcttggtggatgccgtgctatcgttgataacatagaacaagcatacgctataaaagaaaaaataatatcccttacatttaaacatcaattacataaaattcacgactatatatctgaaacaaaagattctggttataggagcttgcatattgttcatgcatttcagaatcaaaagtaccctgacttaaacggtcttaaagttgaaatgcaaatacgaaccgcgatccaacatagttgggcaacagctgttgaaatggttggaatattcagaagggaatcattaaaatctagcatgggagatgcccgttggttacgcttttttattttagtgtcagagttattttacagaattgaatcaaaggacccgactttaaacaaaagtcataatattatctcagaagaattgaaactgctttcacaagagcttaacgtcaatagtgtactaaatgcgttcagtcaaattgcagagcatataacaaaaagcaaactttataacagtggatattgtgttattgtagtagatacaaacaaaaaaaacatctctgtcactggtttttcaaatcaaatgataaaaagagcatctgagttttatatgaatgcagaaaagaaatgtgctgaaaacaagcatcaagttgctgcaatggtttcagtaaattctattaatgatctaaaagccgcatatcccgcatttttcttggatactaaaacttttttaaataacttaagtcgatttattatataa

SEQ ID NO: 100511 - DNA, 576 bp, Enterobacter aerogenes
atgagaattgaaggtcttggtttaaacaatgaagaagtgctggacaggatttgcgaggcttacggattttctcagaaaattcaattagctagacacttcgaaattgcatcaagctctcttgctaacaggtacagtcgcgattccatttcttatgactttattgtgcattgcgccctagaaactggcgcaaatctcgcttggctactcaccggcaaagggtcacctacaaccggcaacatgaataccgatacccaaaatgtggagaaattcacattaagtgaagaatctctggttagtgatggcgatttgagtattgctggcaagttctttagcaagccgcttacaaatccaattgccgtctacgctgacggaaaactccatttcatcgaacgagacgcatccctttcagatggagaatggctcgttgatattgaaggtgctattagcattagagaattaacaaaattgcctggtagaaaactacatgtagcagggggcaaggttccctttgaatgtggatttgatgatattaaagcattaggtcgcgtgatgggtgtatacagcgaggttaactga

SEQ ID NO: 100512 - DNA, 2130 bp, Enterobacter aerogenes
atgttcgcggctttgctgcatgcgagaaaagtgctttctctccagcctgagtgtgtgcgttttgatgtttatcgaaccgctacggtgctggagcaaaatcagggcagtcaacgagctaatgcctttttaatcagcttttgtaaaaaggcattgccgcgtcttgaactggtcgcaaaaaaatacgagtgcgttggcatcaacagcaatgtatcaaccgctgttttcggcggtcatcttgatacccagcttatgcaatatctggcatcacgcatggtcaatatggtcgccagatttaaccgactcccggacatgtcccgcgccgatattgacttactggcctctgatatcgctaatttcatccggtcagagctggccgacattgatgacaccggattaagtgaactcaaaacgctgtacacgtggtacatgcaagctgggattatttccctgcaattcaatgttaccccgccacattgggagcgggtgacaaagaaatatgtcggcgaggacgaaatagccccggctatcacccgcatgtttaacgatgtgtggtggcgtggtcgtctgcgacgcattgcggctgcatggcgcgaacatctgcacattgccgtcggcaatgtcagcaaaaaaagacacgcatacgcgagtaaaaactgcgtgactgactggcgcgagcagaagcgccgcacgcgtgaatttctcaaggggctggatctcgaagacgaagacggcaaccgcatcagcctgattgaaaaatacgacggttcggtcgctaatcctgcgatacgccgctgcgaactgatgacccgcatccgtgggtttgaaaatatctgcaatgagcttggatacgtcggggagttttacaccctgactgcaccgtctaaatatcacgccacgactaaagcgggataccgtaacagcaaatggaacggtgccaacccgtcggacacgcaaagctatctcaccggcctttgggcgcgcattcgcgccaagctgcaccgggaagaaatccgcattttcggcatacgtgttgccgagcctcatcacgacggaacgccgcactggcacatgcttatgttcatgttgccggaagacgtcgagcgcgtgcgtctcatcatccgtgattatgcgtgggaggaagaccaccacgaactgagaagcgataaagccaaaaaagcgcgctttcatgccgaggccattgacccggaaaagggcagcgctaccggctatgttgctaaatacatttcgaaaaatatcgacggttatgctctcgatggtgaaaccgatgacgaaagcggtgagctgctcaaagagaccgcccccgccgtttcagcatgggcggcgcgctggcacatccgtcagtttcagtttattggtggtgcgccggtgacggtctaccgtgagttgcgtcgtctcgctgatacagagactgcgcacggtctgagcgttgagtttgccgccgtccatgatgcagccgatgccggtgactgggctggctacgttaatgcgcagggggggccgtttgttcgtcgcgatgatttgcaggtgcgcacgctgtatgaaccgcgcgccgagtttaaccagtacggtgaggaaaccgtctgcatccgtggtgtgtacgattccgctgtcggtgctggcaccccgattttaacccggctaacgcagtggaaaattgtgccgaagcgtgccgttgatttggccgttgacgttaagggcgcttctgcgccctctcggagttctgtcaataactgtacggggagcgaaagcgaaccaccggcactggatttaacaaaaccattgagtcgccgtgaaaaacgagagctgaccaaccgactcaggaagaaaaagccagcaacacggcgaaaattcatccacggaacggatgagcaaaacgcagcaatagcgaaaaccatagacgagatacatctgacaaccggcaacacaatcagccggggcgaagccctgcacctgatggcgggtggtaaaagctgttttgagggcaaatggctaagcgggacagcaagaggagagatattttccgcagcgccctcacatgaggccaaagccaggaaaatccttaatcgtgttgcggttatagctgaactggcaatgaaatgtaatcattaa

SEQ ID NO: 100513 - DNA, 819 bp, Enterobacter aerogenes
atgattctttcaagtgttactcacctctttaggtttcggggtgacaacattaacaccataaacgaacttgttaataatgagatttggcactcgaaaattagtggcctaaatgacccatttgagatgttttttaagtttgatgctgatgcattaaagcagcttgataaggccgatattgcaaccataataaaaaatactcactttcttaaagaaaacagggaagctgttgaagagtgtttctatagaaatgaattggaaccaatttacaagtacattactgacttttggggggagggttttgctgtcggtttgctcaatgagtttcacaaaagtattgcaaccgcatgttttacaaaaaaatatgatagtaggttaatgtgggggtattatggtaatggtatgaagggactatgtttggcgtacaataaagaaaagttgaaagctgcaggcattgaattctccgatgtgacctacacccctgaagctcccaaaattaatatatataaacatcttcttgagaaaatgcgaggcgagccagtaaccataaatggagatttttcattagttaaacattccgattggaggtgcgaggaagaggttaggagtttgaaatacatgaagggcacagacatctatgaacatttgcccggttttgcggttccgttacaaggacgttgcattgatgcaataatcatcggtgagcgtttggctggagatatgagagtttttatcgaaaattttgccaaaaataatggtattgaaatgctgatagcaaaggctgattttacaaactacaagatccagattgattcaaattaa

SEQ ID NO: 100514 - DNA, 819 bp, Enterobacter aerogenes
atgaaagttagttatgacgttgtcatcaaaagtggtgagcaagaagttgatatggagtatggccttgacaccctttcaggaacggctgaggtgacatgcatactagcagaggcgatactcagaaaaaaaatcattaagcgccgcacacatgttaaccctgctcgggcggttctcaaacaaagctttaaaagttcttatggacagaatttcgacttaattgttaatgaaccagaattagctgcagagttaaaaaaaatgacccgctccgtattttcggaagtcatggggtattttatttctgagtctctatacctagaaaccaaggggctatctccaaaagctgcaggtatagttgagggacttgaggagattgaagatgatctcattgaacgcatcagacaacctttgctgagaatgcacaggataaatcttcaaaaaaactttgatgttgaacttaattataaaaagcctgcaggcgagcaaagagtagcaaagttagacacaaagactgctacgaacttgacgcaatcaaaaataagcccggaacaagttaatatcaatgcagttattactcgttttaatgcgagaaccggtaacggcagattagttattgaaggagaagatgatacagtagcttttggtttttacatgcctttaaaagctatacctgctgctcaaaagagattggtatcattaaacttacataataataatggtaagcaggataactacacatatctcaaccttactgttagcaaagttgtagtaaaaagtggtgacgtagtgaagtatctaatccgtatggttgaagccgcatga

SEQ ID NO: 100515 - DNA, 726 bp, Enterobacter aerogenes
atgagaaaggtgttgctatcttcggctggtgtgattgtgactgtatgcgccatgtattatatcaacttcggtttaaacggccatttatccaacaagactgatgtttgggcacagtttggtgattatttgggaggtgttgtcaaccctatactttcatttattacaatttacctccttataaactcaataaaacttcagcgggaggctaactccagcctgattaatgaagttaaaaggcaggagtccttagaagagtataaaaagtttgaggtgagattttttcatttaattgaatgccaagattctaactttgaaaggtttaacatacaagttggggatgttgacgggcaaactgacgaggtggttgaagaattttcaaatggcgcagcagtaacttatcttgaggataatattgttattttagttaaagctcagattaaaaaagagttaataacaaagtggctaactgaagtggatgctaatgattgtattttttcagtggtacgtcgtttttatcttattgtgaaattgatagatgattgcggagttgaacgggaagattactatgaaacattagttaacttaaccgacataaaaataatatctttagttgcaatagcatgcacatattacgattgggatataataaagtacctccacaacagtaaaatacttgagcgagatggagttaaagaatttgtttcgcaaatatccactcacagttga

SEQ ID NO: 100516 - DNA, 1518 bp, Enterobacter aerogenes
atgacagcaaaatattatgccattctgaccaatcagggcgcggcacggctggcgaacgcgaccgcactcggcactaagctgaacctgacgcaaatggccgtgggcgatgccaacggcaaattaccgacgccagacccggcacaaacagcgcttatcaaccagcagcgcatcgcgccgctcaatatgctgaccgttgacccggccaatgccagccagattatcgcggaacaaattattcccgaaaatgagggcggtttctggatccgcgagattggtctctatgatgatgatggcgtgttgattgccgtggcgaactgccccgaaacctacaagccgaaactggcggaggggagcggccgcacgcagaccattcgcatgattctgattgtctccagtacgacggccatcacgctaaaaatcgacccgtcggtcgtgctggcaacccgcgaatatgtcgatgacgccatcgaggcgcatgccagaagccgaaaccatcctgacgccacgaccaaagaaaaggggttagtgcaactcagcagtgcgacagatagtgacagcgaaatggtagccgctacacctaaagcggttaaagctgtcaaagcggtcgcggatgccgcagtaaaaacagtgaacagtaaaaagcccgacacgacgggtaatgtaaaacttgggactgccgcaaacgtggataccggcaccagtggcgctaagattccgttattgaatgccgaaaatacatggtcgcagacgcagaaaattagtaatgccagcctgactattaccgcagatagtgccgttgcacgtttgcagtcttcaggcggtaattctgttcttttcttccagaatcaagatagtagtgaacgtgcagctatctattctggcatgaacacaacgacgacagcttcattatgttttcgtgcaaaaaccaccacgggggtatccgctggccagatggaattaaaaagtgatggttctctggctgtaccggggaataccactgttaagggaatggtcaagccaacgaattacagcaactttgatgaccgctatctgcttcgctctcaggacttgcctgtcggcatacctttgccgtggtcaactgcaaccgctccgaatggttggctgaagtgtaatggcgcgacctttgataaagcaaaatatccgggactggcctctgcctatccatcgggaaaattgccagacctgcgtggtgagtttatccgtggtcttgatgacgggcgcggtgttgatgctggccgcgctgtgttgtcttctcagggtgacgcagtacaaaaattcacagggaaaactgctggtattcagcattacattccgggaattcctcttgagggcgtttttgcccgaggcgaccttgttgccagtacagccggtctgacctccgtcgatacgggtgacggtgtatttcgcgtcgaaattgatgcctcgctacagatccgaacagcagcggaaacccgcccacgtaacatcgcattcaattacattgtgagagctgcataa

SEQ ID NO: 100517 - DNA, 564 bp, Enterobacter aerogenes
atggattactttcagactagtgggttattaataaatatattaacaatgttagttgccgttggctcatcatgtattagttaccttgtttacaaagagagcacctacccagacgtcattgtttaccttgaacaaaacaatgaagtcaaaactgttttaaatattgtaattaagaatataggtaaaagtgctgcaaaagatgtaagcttcagttttaatgaaaatacctttaagaattcactgcctaatggtgagcatagtgcgttaacgaaaggtgcattagtttcaggcataccattccttgcacctggttcaggcaggatattgaggcttggaaatttcgctgattcgaagaagattttaggtgaccacaaaattagagtaactacaactttccgtaaagctaatagcaagaaccctttcgcaaaaaatattactaatgaaagttatattgaattgttatcgttggctagggtggatgcctcagataacagtaatgagaaaaagattgctgaaaatctagccagaattgaaaaagctttgcttaatatcaaaacacaacactaa

SEQ ID NO: 100518 - DNA, 564 bp, Enterobacter aerogenes
gtgaccacactgacgctacagaaagcctttgaggcctgtcagacaaataaatccgcctggctgcaacgcagggaagaactgacacaggccgaacaggcataccgcgaacagcttgccggtagcggccacagcggtcggagcctgcaaacgctgcgcgagattatcgacgtgaaaaagtgggaaattaaccaggctgccgggcgttatatccgctcgcatgaggaggtgcagcgcatcagcatccgcgaccgattaaatgattttatgcaggcgcacggcgcggacctggccgccgccctcgcccccgagctgatgaattattccgggcaacattccgccgttcagcgctgcgccatgcagcactcactcgactatctgcgtgaggcgctgcagatctggctggccgcaggtgaaaaaattaattattcggtgcaggataatgacattttaacggtcatcggattcaggcctgacgcggcctcgcgtgatgatagccgtgaaaaattcgcgccagcacagagcctgaattacacccgccgccatgcagaactggccgtgcagtag

SEQ ID NO: 100519 - DNA, 2442 bp, Enterobacter aerogenes
atgaaaaaaatgattgattgtgaaacggccttaaaagaattagttgagacatacaccgacagcgagaaaataagaaacgaagctcaaactaggcatcatattatcaataaaataatttataatgtgcttggttggcctgaggctcaagttgaagttgaagactatgagcaaaaaacattcacagattatgaactaggaaaaccacgacaggttattattgaagcaaaaagagaaggccgtacatttgaaataccggcaggtatatctaagaaaaatataattgatatacctgctttattaaaatccaatgaagatttatctgatgctattaagcaggttcaattttattgttcttcaagaggtacgccaattgcgatagcgacaaatgggcaccagtacatatcatttattgcaagcaatcaaaacggttcatctcctctagatggcaaagcattagtttttgaaagcttggaaaatatgcttacaaacttcaccttagcatggaatatgctttcttattatggagtgaaagaacaacgtctcctgaagtatcttagctcagaagctagtggaatccccaataaattatcatcttacttgaccatgtatccaaaaataagatatgccagtgatattcaaacatcattacgtcaaatatctgaactaattatccaagatgcattagaaagtaaggaggtagaagaggttttttatcaaaaatgttattgcgaaagcggcgcattatctaaatatgctctattgagcaaagaaatgctgcaagcacgttatgctgcattgttcagtgatagtgaatcatcaccacaaattacatccgtcaaacctgacaggaaggaacaaagtttagatccaagtatcatggctgaagctttatcaaagcgcccaattgttttgatcggtgatgtaggtgttggaaaaacatcttttgttaaaaatctcatatactctagcgcctttaaggaatttaatgaagccatttacatatatatcgatttgggtgcaagcgctacactttcagataatcttcaaggtttcatccttaatcaaatagaggagcaactatatgataagtatgacactgacattaccgaatttaaattcatcaagggagtttactcgcgggacattcagcgcttctcatcaggaatatggggctcattgagagaaaccaatagagagaaatacgaagaaaagcaattagaaatgctttccgaaaaaatatctgttaaagatgaacatctcaaaaactcgatcaaccacatttccaaacaaaccaaaagacaagttattatttgcttagataatgctgatcaacgtgattttgaaacacaacagcgtgcctttgtcatatcacaagaattagctaaagaatggaattctttggttttcatttccgtacgcccacaaacattttttaaatcaaaatcatcaggagcacttaccgcatatccacacaaagtattcaccattgctccacctagaattgatcaagttcttgataaacgcctcatgtttgctcttgaaatgtccgaagggaaaattcctttagaacaggctgagtttgttagaatcaatatcaataacctttcagtttttattaaagtcctgcttgaatccctcagaaaaaacaaagctcttggcgagtttattgaaaacattacgggtgggaatgttagacaagcattaagttttatcactggttttattggtagccctaacgttgaggccgaaaagataattcgcacctttgaacaagagggacgataccaaataccggtacatgagttttcaaaacaagccctgctaggcgaattttcacacttcgaccccaatacgtctttagcaatgaatctattcgatgtatcaatagctgatgaatcagagcattttctagtccctatgatagtcgcgctgttatcagaaaaaaatgaaattcaagatagagatggtttttgtgaaacttcaaaaatagttgaagaaatgcaaatacttggttacatccctgaacaaactgagaatgcattaagacgctcgacaaacaaaaaacttatcgaaacatctcaacgatttacatttgaagaagatgaaacaggattaatcggtgagatgccaaacaaatttagaacgacctcaatcgggcaataccatttaaaacgctggattagcgacttcgcgtatcttgacgcaatgttatttgacactcctatattcaacccagaaatagttaatggcatgcgtacttcttgcgagtcttttaatatcgaagatagatttaatcggaccgtcgcattcaaaacctacctgacttccgcctggaataaactcataaacaaacctagttatttcgatatgatcgaatctttaaaaacgggcgatgcttcatttgagagcgtcaaacgggttgttgatgctaatcataaatag

SEQ ID NO: 100520 - DNA, 339 bp, Enterobacter aerogenes
atgcaagctgaagaaacacattggttagacaacgggtatgtttttaatattccgcctaaaaattaccatcgtcgggtgactgtaccgcttttgctggcaattgctccgaatggtaaggctaaggcaaagcataagctttactttggaggggcctgggtgacggaagctaaagctgaaggagctctttttcctgatggggcgcaggttccttcgacggcgtgtaattgttggaatggatttattgaacccaaccagcaggtttccatccaggctcagggtgagtcatctaatggcggatatgtgcttcagggaatcactgtcttcattgccaatgaataa

SEQ ID NO: 100521 - DNA, 225 bp, Enterobacter aerogenes
atgtatcgcatggaaaagataaccactggtgctgcttatggcgcttcagccgggagcatcctgaacggcatgcttaatgcctacagccccgagcagtggaatgccatcggcgtgctggtgggcattgtcattgccgtacttacgtacctgacgaatttgtatttcaaaatccgcgaagacaaccgacgaagcaggagcagtgatgaacccgacgctcaggaataa

SEQ ID NO: 100522 - DNA, 378 bp, Enterobacter aerogenes
atgagccgtttaacagtaatcacctgcgctgtcgttatctgcctgctagtttccatggcctgggcgattgaccactaccgcgacaacgccatcaccttcaaagagcagcgcgataaggcaacggtcagggccgacacatctgaggcgatcaccaacaacgtgatcaccacgatgaacctcatccgtgacatctcacaggctacacagaatgcaaagaacgaactggcccaaaaaggcgagacgcacattgtctatatcaggaaggcgcttgaaggtgatccgtgcgctaaccagcttgttccttctaccgctgctgacagcttgcgggaatacgcggacggtttacgtgccggcgccggtggctccgataagtactga

SEQ ID NO: 100523 - DNA, 408 bp, Enterobacter aerogenes
ttgccagtgcgtaatccagcgccactggcgacgccgcaagcgttaaaccagagctggtccatcgattttatgcacgacgccctggtctgcggcagacgatttcggaccttcaatgtggtggatgattttaaccgtgaagcactggcgatagaaatcgacctgaatatcccggctcagcgagtcatccgggtgctggacaggatcgtggcaaaccgcggctacccgctgaaaatgcggatggacaacgggccagagctggtctcgctggcgctggcacaatgggccgaagaacacggcgtgatgctcgaatttatcaagccggggaagcctacacaaaatgcttttatcgaacggttcaaccggacataccggacagaaatcctggattttacctgttcagaacactga

SEQ ID NO: 100524 - DNA, 564 bp, Enterobacter aerogenes
atgaccacgatgaaccagagtcagtacgcacaacattcaggcgttgaccgcaaaactattggccgctggattaaagccggtcggtttatcgttatggacggtgacttgatagatgttgaagccagcgatgcggcgttgaagaaaaagcgcgatggaaaagatccgcgggcatcaaacgcaaagaagaaaaaagcctcagcatcccggaatgatggcgacgatgaaattgatgtaaccgttcgccagataatgcttacagaaggtgctgacctttccagggaagaggccgcgcggatccgtgaaaattacatggccctgcaggcaaagctccagtatgaaaaagacagcgaccagacaattgaattggccatcgccgaggaggttctgtttaacgcctttcgccagcagcgtgatgcctggctgaactggccttcacgcgtggcaccgctgatagccgccgatctgaatgtgccggcggacaggatgacagaggtgctgattgaacatgtccacaaacatatctcagtcctcggagaaccagaatttaacccagcagaagattga

SEQ ID NO: 100525 - DNA, 498 bp, Enterobacter aerogenes
atgagaaaggttggaagtactacagatacggcagatacaaatggtgaatacactaatggtaatgttgcacaaggtgttcctcctacaattatcaatgctgagatgctcaatacgttccagcgcgagttaattagcgtggtcgaaggcgcaggaatggaattagatcctgctgatgataatcaggttgtaaagggaatagggaaaataatttccgatagtagtaagggggttctacaaccacgtggatatcaacttttgccgtctgggttgattattcaatggggtagtgagtattcagataatacttctatggagattagttatctaaaaccatattcaatagcaactttttttgcggtgacgacgaaaataacttcggaagatagccgttttgcaacaactggtgcgacgaccaaaacaggatttactgcttatggtctccttgaaggtaatactgcccctttaaataactttatgtggttatccattggggcgtag

SEQ ID NO: 100526 - DNA, 1062 bp, Enterobacter aerogenes
atggcaaagaatttaaacccttggcttgatgtgtgtagagcctcagcaatattcatggtgatgttatctcacagtagggggtttcttattcctattgtcccttcagctcaagaacttaaatttggaggattcttaggggttgagctatttttcgctttgtctggattccttattgggaaaataatattcgacaaatttaaaaactctaaaggaacgtttgaatggattccttcattttggtttcgtcgctggatgagaacatatccaagctatctcgttttcttgattttaaatttatcgataatcaacagtattagaccagaaacacacccaaatatcttggaattttcaacattcacacaaagcctaataacacctcacccttcattttttggtgaggcttggagccttgccgttgaggaggttttttattttttattcccaataacaatttcatccttttttttcatatgtagaagaaagacaacgagtcttatattagcaatatctactatacttttactatccttagcgctaagggtaaatgccgtcatgcaatctcaaataacatttaatgagataagatcaactgcattatatagattggattctctaatgattggtgttattttttcttggttgtttttatcaaaaaaaatcaacattgcagtaaaattaggaactatattaattccaatatcagtttacatatcatcaaagccagattcttttatggatagtagtgcattcctaaaagtatttctattttacatggcaagtatcggttctgcctgtcttatcgtttccttctatcatgtaaatttaccatctaagataagagttataacgtcaaacatggcaagatggtcatattccgcctacttaataaacctccctgttatttacaccattaactattacatccctaaacaaaattcatttttcggatgtattttgacatggttactatttatgatttcaacaattattttatctaaattaacctatcaactctttgaggaaagagttcttaaactaagagacagaatcaagggcgcgtga

SEQ ID NO: 100527 - DNA, 264 bp, Enterobacter aerogenes
atgagactgataaacgactacactcccccttccccagaagatctagagcggctgaaatcagagttgggttacaccggtaaccaaatggcagatatcgctggcgttgccagcaacagccagtggagaaaatacactggcggggcagaaccgcgagccatgtcaccacatatcctgttcttcatagcagctcggcttgccctgtcagaggatgatttaaagcgagtgttgaagaaaatgcaggaaatcggagctgagataaaataa

SEQ ID NO: 100528 - DNA, 462 bp, Enterobacter aerogenes
atggcccaaagatataatactggaaacccgcgtccttcaaacagcatgaaggatcttaacgataacgcccttgcatatgattatttcctgaacagcgaagccgacacgtttgttgatcgcatgggaaatatccaagattccctgcgtggcgaaaaggaaaaaatagctgcggctggcgcagctgttgtagatgaaacccggcggaaccttatccccctaagcaaccagtacgtgacgctagctgatgcgcaggcggataactcatctagcgtttcagtaggtggcgatggagcttcttctcaattgggtggtggaggaattggttccggtaattctggcaccaccggaactgtaggaagtggttttggtgctggcggcggcaacgcaagacagccgtcatctagtgcgataaacggttatcctggggcatcaggcgtaattattatttctgagtatgcttaa

SEQ ID NO: 100529 - DNA, 1068 bp, Enterobacter aerogenes
atgtataaaaatatctcaaccataatagagaaaggaaataataacctagatatcattaggctaatcgcggctttgtctgttgttacttatcattcattcgcaataaatcccgcatggggtttaacagatcctataaaaaatctattcggccataccagcacaggtggcattgctgtaaaaatttttttctttataagcggattgcttgtaacaaatagtttaataacaagaaaatcgactattgaatttttgatctcacggatgttaaggatcttccctggacttatcttcgtcacaataatatcttcattgatatttggcccactaattaccagcatgaaaccaagtgagtacttctcacaaattgagacatataactatataattgacaacatcattatgaacactcaatattttttacctggtgtatcttttgataatacttatggaataaatgggtctctttggacaatacgttatgaagttgcagcatacatagtattgcttttggtatttattgttggactcatgcgaaataatgtaatctcctcattgacttgtgtactcgtgatagtagaaccgataaccacactaaagggagtgttattcgcatcatcagatgatagcgcaattttccttttagcaccatgtttcgctcttgggagtctttttgccatcaacaaagagagaataaagtccacgttaattacaccactaattcttttttttgccagcatatccacccaaagcattacattgtcaccattattattttgcttttcactttgtattttatcattacacatcgcatcattaaaacctatgattaacctcagagtaagagaagatatctcttatggagtatatctttggggattcccaatccaacaaatactccataaatatttctcttctggtcctatcgttggaatcgcagaatcaattattatttcgtgtgcgatgggatacgtatcatggaagctaatagaaaaaccatgtataaaattatcaaagaaattttgtagttattactctgcatactgcttggttaagcatactcagaaataa

SEQ ID NO: 100530 - DNA, 234 bp, Enterobacter aerogenes
atgacccaaagatataacaccggaaacccgcgtccttcaaacagcatgaaggatcttaacgataacgcccttgcatatgatgatttcctgaacagcgaagccgacacgtttgttgatcgcatgggaagtacccaggattccctgcgtggcgcaaagaaaaaaatggctgcggctggcgcagctgttgtagatgaaacccggcagagcctgatcccctcagtcgccagtatatga

SEQ ID NO: 100531 - DNA, 1782 bp, Enterobacter aerogenes
atgaatctcagcagtaccattaaatccattcaagacatcatgcgcaaagatgacggtgtcgacggtgatgcacagcgtctcggccagctcacatggatgttgttcctcaaagtatttgaccagcgcgaggaggaatgggcggatgataacccagcgtatatctctcccttgcccaaagagtaccgttggcgtaactgggcagcttatacagcaggaactgatggcaaaaagaagccacaaattgacggtagtgaattgatcagcttcgtcaacaacgagttattcccgacgctaaaagagatcgatgctaacaaaagccctcagcataaagtcatccgtagtgtctttgaagatgcgaataactacatgaaatccggccctcagatgctggccgtgattgagaagctagaagatgctatcaatttccacgattttaccatccgtgcaaacattggcgatgtgtacgagcaattactcaacgatttgcgtggcgctggtaacgcaggggaattctacactccgcgtgctatcaccgcttttatggctgataggataaacccgcgtttagataagcgtgagaaagtaatggacccagcctgtggaacaggcggttttttgaccgctgccatagagcatttccgtaaccaactcgcgacaatgaaatcaccgcgtcctgaagacaaacgcgccattgaaacgctgatcctcggcatcgaaaaaaagcagttaccgcacctgctctgcaccacaaacatgctactgcatggaattgacgtacccagccagatcgagcacaaaaataccttaggcatcggatggaacgagtggaaggccagtgacaaggttgactgcattatcaccaaccccccattcggaggctatgaagacgatggtgtgggcagtgattatcctactgatctgcgtacccgcgaaaccgctgacatgttcatggcgctcatcatcaagaaattgttgaaggaaaagggtcgcgccgccgtggtgttacccgatgggtttctgtttggcgagggcatcaaaggtacgctgaaaaaactgctgcttcgcgattgcaaattgcacaccattatccgcttacctaaaggcgtttttgcgccatataccaccatcaagaccaacctgctgttcttcaccaagggtagcacggtggatgatggttccgaacacttccacaccgacaccatctggtattacgaacacccctacccaacgggctacaagagctactccaaaaccaaacccattcggctggaagagttcgaacccgagcgagactggtggggctcagaggaaaacgactttgccgaccgcgtagaaaacgaattcgcatggaaggtggatttcaaaactaagcgtgaactggccgaagcagctgcgcaaccgcattggcaacgcgctgaagagctgaataaacaggccgctgcgcttgaatgtgaagcgagtgacttgcgtagaagcctaatcggtactactaatgcagcataccgcgaaaagatcgacgcccaaatcgccgcgttacgcgcccaagccgaaccgctacgtttgcaagctcgcgacgcacaagccgctggcgaccgtatctattggccaatttttaacctcgatatcaaaaaccccaatacggtagaagaagaaacacacgacccagacgtactgctagagaaatacaaaaagctgctgggcgaaattgaagaaaccgagaatcagctcaaaagtgagttggcagccgtgctggcacatcactttatcggtggaggggcctga

SEQ ID NO: 100532 - DNA, 1914 bp, Enterobacter aerogenes
atggatgcacaacagtttttggcggagtttgggcatattgccaatgcgccgggggggattggcaaactgcgcgagttgatcctgcaacttgcggtgcaaggaaaactagtcgtatacacagcatctgatgtttcgtcgcgtgttttgctggacgaagttcgcgcgcttaaagcggagctggtttcctgtaaaaaactcccacgtcagaagccgtatccagaagtgttgaggagagaaatcgccgttgatgctccatcgcattgggagtgggctcgtttcggtgagctctggcaacttttatctggccgtgatctggagcctagtaagtacaacgattcaaaaaatggaattccgtatataacaggtgctagcaatattgtaaacgggatcattgtcgttaaccgttggaccccagatccagttgtgatttcaatcactggtgacttgttaataacatgtaagggtactattggaaaaacagtattcaatacccttggcgaagtccatattgctcgccaaatcatggcaataagggatttttcaaaaaaactagacacaggttttctgaaaatatggcttgatggctttgttagtcaactggtcgaaaagtccaagagcatgattccaggtttttcaagagatgatcttgagttggcggcttatccggtgctaccaatcgaagaacagtcccgcattgtcgccaaagtagaggagttgatggctttgtgcgacaagttggaggcgcagcagcaagctcgccgcaaactgcaaaacgcactgcgtcagtccatcctgcaagcagtcgccagcgccagcagcccgcatgaactccaaaccacctggactctcttggccgacaactttggttggctgtttcatacaccagaagatgtgaaagatctgcggaatctgattttccagcttggaatccaaggtctaatcgttgaacaatgtgaaactgattctgaaaaggccattgaattcatacgctctgtgcagacaaagaaggatcgattagtaaacagtggagtgattaggagaacaacttcatttcctaccgtcgaagaaaaagaagaaccttttacacttccgcggggatgggtgttttgccgactgggagaggtttcaatttgtagagacggtcagcgcatcccattgtcgaaatcggagcgagagcctagacgtggggaattcccctattatggtgcgtcggggatcattgaccatatcgatgactttatatttgaagaagatcttctactcgttggcgaagatggagcaaatcttgttaatcgaagcacaccgatcgcctttattgcgacgggtcgctactgggtaaacaaccatgcacacgtgcttgataccgtcaatggcgtcgcccttagataccttgagctgtatatcaatgcaattgatcttaagccttatgtaaccgggacagcgcagccaaagatgaatcaggagaaaatgaatctgatagttgttgcagtgccgccacctgaggagcaagcacttattgtcgaacgcattgataagttaatgcgcttctgtgacaccttggaaaagacactttttaatgcagtggaaactgtcgagcggtttgcaatatctaccgtcgccagcctcacagggatcgccatcgagcaagaggaggaacccatgaaagccccgcaaaccgagctgatcgctccactatgtttgggcacagcacccaacattaaagcccaagctccgcttgccaccattctggcccgccaccacggcgaaatgagcgccaaggatttgtggcaccgtttcggcggtgagatcgatgccttttacgcgcaactgaaaatagaagtgatgcacggctggattttggaaccagcccccgccgaagtgcgtgaaaaaccatccgatatgatgagcgcctga

SEQ ID NO: 100533 - DNA, 1749 bp, Enterobacter aerogenes
atgcaactgctgcgcatcctcatcccaaactttcgcaatctgcgcgatctcgacatcgctttcgcaacgtactcgcagccaacagcaagcgcaacagatgtaccaccgaaaccgatccgtagccatgccctgattggtcagaacggcatcggcaagtccaatttgatcgaagcattgatcaccatcttccgtgatgttgatctcgaccgtgaagccacctttgatttctcgctggaatacagtattcgcggccatgttgtgcgcattgaggccgataccgtcaagcagaaacgcccctatgtgtgggtggacggtaaagccgaatcacagggctatttgctgaaaaaccgtgagctgttgcctgcgcatatttttgcctattactcgggccgcaacgagcgcatcgaagttttgtttcaagagcaccagcgccgcttcaaccagcgccaggaaattactacagatgaagtgctgtctgagcaactgctggagaactttaccggctctgagtcagatattcgcgccgtcgaagaagccaaacgccgtcacgagtcgcggctgaagcaagcgggagacgatcgcttgcgtcggctgttctattgtcgcggtggccacagccaactggtgctgctggcttgtctactatcggatgacccagtgtttcagaaggtgctaaagaacctacacatcgagtcgctggaatccgcactgtttgtgctgaaagaaccgtaccgcttgcgtgaaaagcggcgcagcggcaaattcaacgagcaagaactgaacgagggtgatccgcgattttggtatgcgcgcggaaatgtggtgagcgaattccttgataagctctggcaagtggcttgggctccgattgagcaagaggcgaccaaacagatcgattttcgtggtcgaaacgagaaacaaaaacagttgtacctttttgtgcctagtcaggagaagcttaaattacttggcgagttgatcggcagtaccgatagtttcttccgctacgccgagggggcttacattggtgatctgatagacgaagtgcgcatcacagtgaagaagcgcgatgaacacggcggcaaagtaagcttcacacatctgtctgaaggtgagctgcaaatgctcaccgtgttggggctgatgcgcatcacccgtgaagacaattgcttgttcctgcttgatgagcctgatacccacctgaacccgatctggaaattgcgctacttcgacgatattgaaggcgtgctgagttccgaggatgcaacgagggtacaaagcgagtcgcaaataatcattaccactcatgaccccatgatggtgggcagcttgaagcgtgagcaagtatatattctgcgtcgtgatggtaaccgtacgttggtcgacatgccggatgagcacccgcaagggatgggcgttacagggctactcaagagcgaattgtttggtttgtcatccacgttggatatcgaaaccgagcgacgcctattccggcgcaatgaactgtttgtcctgtcacctcgctcccccgaagagaatgaggaactgaaccgcttgtcagccgagttggctgaccttggcttttcgaccgccgacttccgtgaccccgactacgcaatgtttgtgcgcaagatggcgcaacaccgccgtttccgcaaacccgtgctcacactcgaggaacaggccgaacaggacgccattgccgattcgatcattgatgagattttacgagaggaggacggcgagtga

SEQ ID NO: 100534 - DNA, 858 bp, Enterobacter aerogenes
gtgattttcatcgatcttgaaaataagctccctactgatgcagaccttcctgctgatattcgctggtcacaagccgattgggatgcttggttgaaagagtctgatcgccttgtaggtgaacttgccaagctcgttgctgcgggaacaattaaagagcgtaatgagttgatcgacaaacacagcagccattggggaaaactgaaaccttggttactggcgttgtctggggggaaatgctggttttcagaggtacgcgagctgtactcacattacgatgtggagcattttcggcccaagaaagaagcgaaggcattggatgcaagcctgcgtgatggttactggtggctggcattcgactacatgaatttccgcgtgtgcggcaatgtcggcaaccgtaaaaaaggtgggtggtttccactcaaggatggctcactttgttctacctactccgaaccttgtgaggaatccgaaacgccttatctactcgatccaattgatgacgatgacgttgcgcttatcgccttcgacgaagaagggaaggtcattcctatgccaggttcctctgcttgggagcaggagcgagtcaatgagacggtaaagcgactcaaactcaatgaacatccccccttggcagaagctcgtcgcaaagtctggcagcaagtagacaggctaatcgatgattttacaacagccaaagctcgctgcagaacaggcaataatccagtagccaaagcgaagttgaccgaagttcgagctaaagtgcgcgaaatgaccagcacaacagctgaattatcagctgttgctcgttggtgtttgctgatacgtaacgatccccagctttctagattggttgggtga

SEQ ID NO: 100535 - DNA, 1011 bp, Enterobacter aerogenes
atggaaaattatctggatgttgagtcaagtagtatgcatgctagagagagcggtactacgctcattgttactgaagactttgatatcctacaaacacagcgtcggttactttcagttttaaagaaaatactaggctctgaaagtgaggcttttagagtgactcagtccggaagttacaacagaatgggctatttactaaaggaagctatcggtgcattaactttactggaaagtagcatcagtaagtatcaacagttgcatcccacgatacgactattcagttcgattctcaaaacatataacctgacagaactgtcagtaatggaagccgcgaccataaacgatgtgttgagacgttttcgggaggaagcacaatcagtcactcataagaggcagctacgtaatttccagcgagctgccagtaaaaatctgaagggtgccatggactatgtggaccacctttttgagcaacattccaggttactggtggtccgtgttgacctgtcctggcggaaagactttgtaaaaaatcagaccatttcaaccgctatggcacgtcagcatcgccagcgcttatttaaacgagtgaagtcacatccattgtttcagcattgtctggggtatatctggaagcttgaatacggacaatacaaaggttttcattatcatacgtgctttttctttgatggcagtaaagtcaggggagatatcgcgctggccagacgaataggggaattatgggaaaaagagattacagatggtcagggactgtattttaactgtaatgctataacgagtgcttacgctcagtcgggaattggtgacatccactatactaaccagactaaacgcacggccttgcagaaggcaattgcttatatcgctaaagtggatacggcagtaaggctgactatgccgcagggggcacgtacattcgggcgtagtgaatatttattacaaacagggagaaaacgagggaggacaaggaaacgcgtattagctaagatttga

SEQ ID NO: 100536 - DNA, 204 bp, Enterobacter aerogenes
atgaaacatgaacatctgaacgatacgaacccactcaagctggtggacctgaaatttatctgcgaaagtacgggactttccccggcttatatttacaaactgatgagtaatgacctgttcccgaaacccctgaagctgggacgtgcgagccgctggtatctcagtgaatttaaggactggctgaaaagtcgtcaccggatgtaa

SEQ ID NO: 100537 - DNA, 1023 bp, Enterobacter aerogenes
atgcgggaagacaggaaaaagaaaaacacagccgggaaacagattcgctcagacagctattaccagcggttattaaatattggcggatgtcgggagtcgccccccgttgaacagaaggatctcgcatggtttgatctcagccactacgattatgtgcgtcatctgagcctcaggcaactgatgacggaactgatagtccgtggttcgctgtgttccgcacccgatatcgtgacgtgggatggcgctgtgctgggacctggagagatttttcagacctgttatccagaaatcattgcgggtaaccccgcactacacccgttgtttatctctcatgagcagataccggaacttaactatttgcccggccaagatgcgccagcgtcgccgatactcaccctaccggtccgggaactgaatatcggtgatattgatacctgctatcatgcactgtctgctgccgacatggataaggagttttttttacttgaagagtcccggcatccctgttacctggaacgtataagcaaaagcgatattgagcctgacacaccgttgaccacacttcagacacaagcttctggtagtcatattgaacagatttatctggctgttgacccttcgttttcaaagtctcagcttatcgacgccttcagggtgttattaacagaccttgataaccagtacgggatttttaaaccgtctgccgggcaaaataacggaatacgccagaagctgctgtacgacatccaggcttatcagctcattcctctgattgacttgttgctgtggcagctcaacaacaggaagaagataccgttaaggaaaatctataaccttctgcaaaatcaggcatttgatgcttcgtcagtcagaacaggttattccgaaactaatttccggagcagttatctgaggaccttcgacctggtgatgaaccagggaaaccccggtgagattttaagtaaacttttagagaaaacagaggattatgatacatcgtattacgatgctacccatgtataa

SEQ ID NO: 100538 - DNA, 1455 bp, Enterobacter aerogenes
gtgagtcacgcatatatatctggttcgttaaatggagggccatctttcccacttgagtgtgttccggacattatccgtcatgccattacgggagcggccagtaaaaccaaagctcctgtagcgctgatttttgcatccgccatggcaccggtgtctctgctttgtcaggggttatcggatgtcagtccggtggaagggctgacatttccggtatcctgtaatttttgcaccgtagcggaatcgggagagcgtaagtctacggtggataagctttttatggcccaggtacatgattacgaacgtgaagccgggttacggcacgaaaacgccatgcagcagtatgagactgaacgggatatatgggaggaagagcttaaggcgctgaaaagcgtactgaaaaaacagacaaaacatcaacaaccactggaggagataaaagaacgtatccgggagcaccggtgcgacagaccggaggagcctgcccggatacagttgctaggcagtgacatcaccccggcggcattgcagtatcagctgcacaaaggcggtggttccatggcgttgcattcggctgagggggatatcattctgggcggacaggccatacagaacctggggatgctgaatgacctgtgggacggggccccgtttacggtgtcccggcggacttccgaaagcttcacggtccacggagccagactcagtgccagcctgatggtgcaggatgcgccactgcgtaagtatttcagccgggcgcagcagcaggccaggggcagcggttttctcgcccgcttcttttttgcccgtccggaaagtgccatcggaacccggacaggccatacgctggaaaattaccgacaactgatggcaccttatcacaagcgtatcagggcattactggagacttacacagagcaaacggtaaacgtcctgccatccccccggcagaaactgactttcactccggaggctcagctgcggtggatggatatgggggagtattttgaacgccagatggcagaaagtggccggtattatcatttacgcgattttgcgtcaaaggagggcaataaagtggcacgactggcggcgctattccatctcttcagtggtgatgaaggaggtatctctgaaacgacgttaatgcatgcgcagaaaatcagcgaatggtacctgaacgaggcgcttgtcctgttcgggccggggccggatttgcctcagcatatccgggatgcagagttattatggcaatggctggaggagcgttttatcgataataacgctcaggctttgaaacggagctgggtcagcccccgggtaccaaaccgactccgtcagcccgggcgccttcagccggcgttgttgtatctgcaccagcaccggcgtatcacgttgtggcaggatcagcatacaactctgattgctccttacgactgggttccgtatacacgctga

SEQ ID NO: 100539 - DNA, 468 bp, Enterobacter aerogenes
atgatgaaagtaaaaataatgcttccactgttctctctttttgccctgaccccggccgcctgcctagcattcggaaacaacagtgcctggagcagtggatggaaccagggcatcactgaattcaccattctcggtaaaggtcagtctcagctctatctagcctgtgacaatgaggggggcagccctgccacccttatttatactgatacgaaaggccaccaggtcagtatggatactgatgctcagttgcaggttgaaattgacgggaatgaagctattgacatcagtgagtcaggcagccgggctggagaaaacaaccttgcgctggcctggacgcaactgcgtaacggtactcaggtgacggtttcaggcgctcacctcagtaagaccacgtttacgctaaaaggggcacgcaaggcgttgcctgaatttggtacccacggctgcatctcaaaagcctcactatga

SEQ ID NO: 100540 - DNA, 213 bp, Enterobacter aerogenes
atgacctttcttaaaatgctggtgaccgctctgggtcaggtactgtcctggcgcggcggacatcaggccagactgtatattgaaacccgatttcgtcaggccggttacgatgacgacagtattgatgcggccagagaggcggtgacactgctggttagcgcactgataaccgcgctgatagcgcaaatcctgcgtcttctgaatactccctga

SEQ ID NO: 100541 - DNA, 483 bp, Enterobacter aerogenes
atgaaccactcactcagtctggccggtactgtggctgaatcgctcacctcaccacaacgtgatacagacggtatcctgtgctcccgcgtacccgatgaacagcgtatcgtcttctggccgcagtattttggcaatatcccgcagtggatatttattgaaccccttatctttgcctggatggaccggctttgcgatgcatactgcggcggtatctggaacctttacacgctcagcaacggtggtgcgtttatggcaccggagcctgacgcagatacctgcgataaatggacgctgttcaacagtatgaacggcaacggtgcagagcttaccagtgaagcggcaggtatcgtcgcctgcctgatgggctacagccaccacgcctgccgcaccgagtgtgatgcgatgactgagcattattatcgcttacgtgacttcgcgctaaatcatccggaatgcagcgccattatgcatctaatcgactga

SEQ ID NO: 100542 - DNA, 543 bp, Enterobacter aerogenes
atgaataccgcatcatccccgctgtcatctcagcctaaactctttccaatggcgattatggcccagcatggttgttttctccccacgacctccgaattaaccccctatgcccaacgcaccattcgtcgtgctatcaaactgctggataaatatctgcgccagcctggaatagcttttagctcaagtactgctgcccgtaactggcttcggttacagctggcaggacaagaacgggaagtgtttatggtgctctatctcgataaccagcaccgtttactggagagtgaaacgctatttgccggttcggttaaccatgtccaggtccatccccgcgaggtagtgaagtcagcgcttcgcttcaatgctgcggccgttgtgttggcgcataaccatccatcaggtgacccggagcccagccaatgtgaccgcaacattacgggcaggcttaaagaagcgctggcactggttgatgtgaacactctcgatcatctggttatcggatcagatggaattgtgtcgtttgcagagcgaggctggatatga

SEQ ID NO: 100543 - DNA, 1476 bp, Enterobacter aerogenes
atgagtttatggattaacggcgaatggcagagcgggcgcggcccgcagcgcagtaaatataacccggtcaaccaggcgctgctgtggcagggaaatgacgccgacgccgggcaggtcgcgcaggcggttagcgccgcgcgtcaggcttttcccgcctgggcccgcctgccatttagtgcgcgtcaggggatcgtcgagaagtttgcggcgctgctggaagcgaacaaaagccagctgacggcgattattgccgctgagaccggtaaaccacgctgggaggcggccacggaaattaccgccatgataaataaggtggcgatctcggtgcgtgcttaccatagccgcaccggcgagagcgagacggcgatggcagacggcgccgccacgttgcgccaccgtccccacggggtgctggcggtgttcgggccgtataacttcccgggccatttacctaacggacacatcgtaccggcgctactcgccggtaataccatcgtctttaagcccagcgagcttacgccgcaaagtggcgaagcggtggttaaactgtgggctgaggcgggcttacccgctggagtcgtgaatctactgcagggcggccgggagaccggtgaggcgctgagcgggcaggcggatatcgacgggttgttgttcaccggtagctccgcgaccggcttccaactgcatcgtcaactggccgggcagccgcaaaaaatcctcgcccttgaaatgggcggcaataacccgctgattgttgacgagccgcaggatattgacgcagcggttcacctgactatcctgtcggcatttatcaccgccgggcagcgttgtacctgcgcgcgccgcctgttggtcaagcgcggcacgacgggcgatgcgtttttgcagcgtttagtgacggtgtcacaacgtcttattcccggcgagtgggatgcgcagccgcagccgttcctgggcgggctggtatcgccgcaggccgcgcaaaaggtgcatcaggcctggcttgggcacgtggcgagcggcggacagacgttactggagccgcgtctgttgcgcgacggcacttcgctgctgacgccggggatcatcgacatgagcaacgtgcagcaggtggcggatgaagaagtctttggcccgctgttgtgcgtgtggcgctatgacgatttcgcgcaagcgatcgcgatggctaacgccacccgttttggtctctcctgcggattgatttcctccgagcgtgataagttcgagcgcctgttgctggaagcccgcgccgggatagtcaactggaacaagccgctgaccggcgccgccagtaccgcgccgtttggcggaaccggcgcctcgggaaatcatcgtccaggcgcctggtacgccgccgattattgcgcctggccgatggccagcctggaatctgccgaactggcgctaccggagacgctcagtccgggtctggatttttcattgcaggcaagttga

SEQ ID NO: 100544 - DNA, 945 bp, Enterobacter aerogenes
  misc_feature (932)..(941): n is a, c, g, or t
atgaagacaattataaagtttgatagattgtttgttgtctctgaaagtcataatttatatttcgaccaaaagttttcaaataaaataaacataataagtgggtgtaatacctcaggtaaaagtactttaatacagagtattttatttacctttggaattaacgatgttaaagatggcttgagcgaaattattcgatacaaccctacgttcagattggatttcagcatcactaaaggaggcgtagataaaaaatatataatagtaagagagcttggtagcatatatttaaaagaggatgggggaaatgtttttagttttcatggaattgactctgatggtcgagttgaacatgtgaaacttaaggagatgttatctcaattatttgattttaacatgcttttagaacagaagggtgagctaaaaaaagcatcgatagaatgcatgttcctgccttattatatttctcaatctgtagggtgggtttatttaagagagtcattctctaatcttggtttttataaagactttaaagatacgtatcttgattattatcttggcatagaaaattcttttgataaagaatatttttataaattaacaaaagagcgggcacaacttcagtcgaagatctcctcattgaataaatatagcgccgagcctcactttgttgtttctaaattactggatgaagagtttggtgatgaggctcagaagtatatagatggttatataaaattagtagcatcattagacgaagaacgtgatgtatatactggtttgtgtaataagttatccttaactaaaaatcatgtcaagatactaagaagaactaaaagaaatattaaaaaccaaaactataacaatattgatcgttgtcctgcatgtacgcaaatacttccttattccttagaagggttatatggttattatcnnnnnnnnnnctga

SEQ ID NO: 100545 - DNA, 840 bp, Enterobacter aerogenes
  misc_feature (13)..(22): n is a, c, g, or t
atggttattatcnnnnnnnnnnctgataaactatcggagcaaataaataataaaatacaaaaaatacagtctgacattaatagttcacttgcgaagattaaaaagttagaaattgatatatcttcaaagtattcatattttattgagaaaaaatcacaaaatttatctgttaacacatggatcgataataaagcaaacatacgtctgttaggcaatattcatgaagagatagaagaatatacaaaaaggtctgatgaaattaaaggattaattgatgggatgggagaggagcagtctctttttgtcgagcggtttaacaaagaaaaagatttcaaggaaatatttaaaaaatatcttaatgatatgcagttgttcaatgtaacagaacctagatatacagatctttataaaataaattcatttccttttcaaggggttgaacttcataaaactgtaatgtcatatcattttgcattaaattctttaataagaaaaacagacaatatacatcgacttccatttatgcttgacgcaattcttaaggaagatatcgatgacagaaattttgatctcatactgtcgtttgtgggaaaaaatcttccgactgatactcaatcatttatatcaatgtctgagtatgctgaagataacctcttgaaagatggtaaagagataagtgcattccgaagagccaaggttaaagatattaaaaatcgatacttccctgatggtacgaatttattctttattggtgatgggaagcatgagagaacatttttatcaaaacctttggatttaaacctcgatatttttgtcgatacttgtcggcttactgaatga

SEQ ID NO: 100546 - DNA, 537 bp, Enterobacter aerogenes
atgcacattatcaaagctgaagaacagcacattaccgcgatacgcaatatctatgctcaccatgttctgcatggtacaggtagcttcgaaaccgaacctccggatacgcaggaaatgcttaaccgactgaggagcattcagtctcgaggattcccatggtatgtcgccctgcagggcgatacgatcatcggctactgttatatttcccgttaccgcgaacgccatgcttatcggttcacggttgaaaattcgatatatattgatccggtttatcagcgacagggcgtcggaaaagcactgctcgatcatgcattaaaatgggccgaatctcagggatatcgtcagatgattgctgttgtgggtgacagcgctaacgtcgcttctgttgcgctgcatattcgcgcaggatttactgaaataggcacattaaaggacattggtttcaaacatggccgctggcttgacacggttttgctgcaaatgaaacttggtgaagggaatagtactctgccagaagattcagatcttatgctctga

SEQ ID NO: 100547 - DNA, 399 bp, Enterobacter aerogenes
atgtacgcaaaatcctttatcgctctcgatggtaatggtcgtctgattggtgcacgtaccgcgcagacagccccttatgatcgctatacatgccacctctgcggcagcacgctgcaataccatccagaatacgacacggagcgcccatggtttgaacatatcagccacaacttgacggaaaatggacagcaacattgcccttacgcaaagcctgacaagaatgagattagattggtacatcgtttgcgaatatttgtgcctaacgtcacccctatagtgttaagagacagctggcattgttcgctatgtgattcagattatcatggggaacgttactgccttagctgccaaacagggcgttttagcctcaagctgagagcagaatcatgctatgtgtga

SEQ ID NO: 100548 - DNA, 570 bp, Enterobacter aerogenes
atgaagccttacaacgccaatcccaactacgtcatgaacggtcctctcctggaggacataaacgcccacatggaagcgatgtttcagcgttttgctaagctgttacccttcaggattgattttgcttaccggaaaaacactgccagtttcgggcatgcctgtaaacacactatgtgtacagaaatccgtcacctgcttgccgaaacagaaaacgccctggcaggtttttactgggtgatggaatacacgccgaagaaaggtctgcatatccatttactcggttatctgaacgggcaatatcaccagaacccttacctgctctcccgaacgatggggaatatctggaaaagtgcaaccgaaggagacggataccactacctgtgccggactaaagagaattacccggtccgagtcgaccaggttatccactataccgatacccctgcaattaaagccctgcggtatgccatcagctatctcgcgaaagttaaacagaaagagaatggcctgattctggggcgaagtacggtaccggataaaagcagcaggggcaggccgcggcagggctga

SEQ ID NO: 100549 - DNA, 1053 bp, Enterobacter aerogenes
atgaaagtagtgaaggggttggtaagagaactaagttggttaaaaaaagaacagagagcgtgtcacttttttttgttccatttgattacggatttttcagcacgggcaaaacagggcattgctctgcaggttaaggacagttcagatttgagcgaacaacaagactgggctcaatcattgatgtcagagtttgatggccctttacagcaggcagaagctggggagcttccacctccaccagaattaccagaggtattaattccacaaccaggtcattatcttggaattgaaactgcacatgaaaaaaccgtgtccctggagaattcttcgatagtaaatattaatttcatcgatggtaaaaaagtggttgacagtaagaattataacaaccttccgccagtaaacttaatccatgcaaatggtgtttctaatacgtattcaaagaacagcaaaattatacaagatagttttcttagtgttattgatcaattacgcatcagatatagaactaataatcagatcctaaaattaatatctgaaatcactgccttatggacagagcaatataacagattcccgtcccctttttcctggcttaattataaaaacaaagatcattgccagtggctttgggatgaaatgcataaacgttgtattggcattccatttcaaccccggaatcaaacccagagatggaattttgttatcgcgacattcgataactggaaaggctggacaatacctcaggaggagtatttaacaataaaaaatccaaagcgaaaaccaggaaagctactatctggcggtctggatccaagcaacaaagaaattggacacaaaatgatcctgcttgaagaactcaaaaatgcatgggagcaaaaggaaagaagagccagaagagcgaaggaaccaaccgctgcgaagttgacaaaagcggctcaaaaaaagcttgagtttattgcgcacttagagaaaagcacatcaaaggacattcttaatgacctgattaataatgcttttaatgatgcgaagagtaaatcccggcaatcataa

SEQ ID NO: 100550 - DNA, 876 bp, Enterobacter aerogenes
atgactaaacctcacggccttcaggccttcgaacaaccgctggcgtcgctgcccgatacgcttcgccagcttattcttgaacgcattcagagcctcacccactacgagccggtgattggcatcatgggcaaaagcggggccggtaagtcctcgctctgtaatgaactcttccggggtgaggtctcccccgtcagcgatgtaaacgcctgtacccgcgacgtactgcgattccggttacgcagcgggcgtcacagcctggtgattgtcgatttgccgggcgtgggagaaagcggacagcgggaccatgaatatcgcgccttgtaccggcgtatgctaccagaactggacctggtgctgtgggtcatgaaggctgatgaccgggcgctgtcggtggacgagcagttctggctcggagtaatgcagccttatcagcaacaggtgctgtttgtgctgaaccaggccgacaaaatcgaaccctgccacgaatgggatacccgtaccagcacgccttcagcacagcaacgggttaatcttcaggaaaagcaggccgccattgctgcgatgtttcgcccccgtcatccggtctgtgtggtgtcagcctgtagtggatggggcgttgaggagatggtggcaaccatgatgcgctgcctgccggatcgagccaccagtccggtagcgacgcaactgcacgggaggctatgcacagagccggtaaagtcgcaagcccgtaacgatttcggtgaagcggtggggagggtgtttgatacggcagaatcatcgtcgctcctgcccgctcccctgaaaactgtgattcgtaccgtacgtgatgctgtgttatcggttgcccggggcgtctgggactggattttcttctga

SEQ ID NO: 100551 - DNA, 708 bp, Enterobacter aerogenes
atgactcaggctgaacgtcgccatgaccggcttgcggtcagactgtcgatgattattggtcgtctggtggcgggtgaaacgctggatatgtgcaaactggccgccgagtttggtgtgtcggtccgcaccctgcgccgggatttccgcgaacggctgatgtatctggacctcgagtatcgtcagggccggtgccgtctgctgtccggcagtcgccagcgggaattggtagtgatggcttttgcccgccagtcaggcgtcgaatcgctgtttccggaactggatggtcatcttgtcagttcacttctgagtggctcgggcgaatctccctgcctcatctggcaggggagcccttctccggcagtcaccgatagtggagtctttacccggctggtgaatgccgtccaggaatgcaggaaagtgaccctgcgatgtaacgggtgttgctatacagatgtcgctccctaccgactggttctgtatgacggtggctggtatctgacaggaacgcaccagactcgcatcatcgcgctgccactggcggatattcgggctgtcacttcccatcccgacagttttactcctgaagccaatgtgcgggacatcctgtctcgctccgaatttttacaagcgctacctcattttcatgtttttcattcactgctcggtgacggcagttacgggcaacttatccataaggaacaggtatga

SEQ ID NO: 100552 - DNA, 459 bp, Enterobacter aerogenes
atgaaattactcacttcagccttaatggctattgccgttgggtttaacatcaaccatgtgcaggctgatgtcttcagtggcttccaggggagtatcgatggcgggatccctgcctacactcgcgatatcaatgcgaacaataagccttactggtgtacccagcgtaagttgctgcagaagagttgttccgttgtctccatctcttccaataagcgggttgccattgttaccagccacactggtagtaaggcctgcgcaggtggcttctacggcgtcgtagaccgtgctaacggtgacgcgatggatgtctttccaaccaaaggtcaactgaacatcgaccaggtctgttctaccgattttaaagtgggctttattaaacctactaaccgtaacaccctggcgtctgttgctttgtactacaaaggcaaaatcgtcgaggttctcgactattcagaataa

SEQ ID NO: 100553 - DNA, 471 bp, Enterobacter aerogenes
atgaaacgttacttatctgtcttgttcgccttactggcattcactggcgtcgcacacgcgatccccaatatgtgggccagcggttttggtatgggggtgacggaatacattatcagtagccctgagaaggtgatttttaacctcaactgtactggtaatcccgatgaacagaacattctgcagcatggcgtattagtaaccctgcccaatggtacgatgctggattctcacgacgacgggacagaaataacggtggtcatggataacagccagtatccgttaccttcgtccctcggctggaggaatggcgataacgcctgggtgtcatttattgacgcgctgggtcagtcgtctcatttcgatgtctacgtcaacgataacaaagttggctcctttagtccgggcctgaaaaatacgcaaaaagagctgtctgacctcagtgagtgtcggaccacacactacagcgattaa

SEQ ID NO: 100554 - DNA, 444 bp, Enterobacter aerogenes
atgaatacacaaaactttgagttcgctgagcaggcagcaattactgcctcggtagtccctgacgagttacgcatcggcttctggccgcagcattttggctccatcccacaatggataacccttgagccccgaatttttggctggatgagccgtctgtgtgtcgattaccacggtggtatctggaacttttcgacgctcagcaacggcggtgctttcatggctcctgagtcagagcacgataagacgtgggcattgttcaacagcatgaacggcaacggcgctgaacttactggcgaagcggcagggatagtcgcctgtctgatggcatacagccaccacgcctgtcgtaccgaatgtgatgcgatgactgagcactattatcgcttacgtgacttcgcgctacaccatccagagtgcagcgccattatgcatctcatcgactga

SEQ ID NO: 100555 - DNA, 324 bp, Enterobacter aerogenes
atgaaatttctacctacaacaaatatgcgggcggcgaagccatgcctgtcgcccgtgactatctggcaaatgctacttagtcgtctgctggaacagcattatggcttgacactaaacgatacacctttctgtgatgaaaccgtcatacaggaacatatagatgccggtatcactctcgctaatgccattaactttctagtcgaaaagtacgaactggttcgtatcgatcgcagagggtttagctggcaagaacaaacgccatatctcacgattattgatatcatgagggcccgtcgcgatctgggtttaatgaatcgtaattag

SEQ ID NO: 100556 - DNA, 192 bp, Enterobacter aerogenes
atgagcgcccaggcagaggaaggaacattacgccggatgacgttaggcgagatagcaatggctcgtagggtattcggtgattcgatagtttatagccgtgtctggattcattgcgacagctatttaccgttcggcctccagaaacagaactacgcgatgacttccaacggggagttgtggtacagagaatag

SEQ ID NO: 100557 - DNA, 168 bp, Enterobacter aerogenes
atgcgccttttccgggctaccggccgtgggacgctgcgaatccgtagccccggtaagcgaagcgccaccggggacgttgaactcaagcttcgtgccagtcgtttcccgggggcggcgcctgacgcgccttttccgggctaccggccgtgggacgctgcgaacccgtag

SEQ ID NO: 100558 - DNA, 1203 bp, Enterobacter aerogenes
atgacttacaagcgtgacagatatctgattcttgaccattgtggggtttacatggtgcgaatcgttataccgtcctacatgaagccttacttcaacggtaagcgctactacatgaaatccacagccaccaaagatatcaggcaagcaaggcttttcagggatgctgtagcggtagagttcatcaagctaagggaacagctcaaaccaaaacaaaacggctcaaaggttgagcagataatcaatgaactacgtggtatcagcaactttgcaaaggaatcaccagtgaattacggggctaatatcgagcgctgtcctacactaatacaaatacgtgacctttatttgctgcaatatagcgataaacgcaaactaacaacgctttcaaagataactaaagccgttgagttgattctttctcacattaagcaacgtgattcacagcttcaggatattaacagaacggtagtaaccggatggcttgaccaactgaaaaaagagaaagcaactcaaacgctacaaaactatataagcgcactggctcaactattcgattttgcaaagaatcgctatcatgatgcgcctaaagataatcctttcagagggcataggttagaggccaagagttcacatgatagttatgagcctttccttatttctgagttaaacaaggtctttgggttactcaatgaagaaatgaaacaggttaccttaattggcctttattcagggatgagattgaatgaaatttgtagcctcaccactgatgatattgttacagaggaaagcgtaaggtgtttacgcatctcaaaaggcaaaacaaagaatgcagcccgattagttcccgttcatccttcaattaacggacttattgacacgctgattcaaaaccatacggataagtttcttttcagacatgcagcgttaacagacagggctgatggtaagcgctctacatggcatacacagcaattcaccagagcaaagcgcaaggctttaggcgagaaaacaacggagaggaaagtttttcactcgttgcgtgggatgttcatcaccgaacttgaccgcctcaaagtgcctgaagaccggatagcgcttcttgtaggtcacgaaagggggagtacagagtctttcaagacttacagtcaaggggcttcactcaaagagcttgctcagtacgtgaaaaaggtcaattttgacctgtaa

SEQ ID NO: 100559 - DNA, 1035 bp, Enterobacter aerogenes
atggatgatggtttgaaggagtcggtaactctggctctcaaagagaggctatccaacccgttatggggttatatattactatcatggacagggttcaactggcagaacatcgcaaagttgtttatgagcaagaaaacagtagaagagcgaataactgatattatatctcaggattggttttatgttcattttcttgtcgcacctttaatactgggtgttttcttggctattatatcaccctatttgaaacaatggctttccgcagcccataaacgcgcagataaaaaacaacgagaagaactgaaacaaaaaatcatagataaatatgatgatgatattgctatagccgaaaagaaagttgaggcaaataaagcccaagagcttgctgaggaaaaggagcatacaaaggtcattcaggagcaagaaaaacagaaaagagaagttctcgacacaaacgtaattgaagaaaatctcaagcaattggaaaagagaaaatacgaagttgaatccgcaataaaaaaaatagaagagcaaggggaaaatagaaggcatgaaattgaatcctcgataaaaaatctagagggacaacgagagagtgttcagaaagagactgacttctggaggaatagagtttttgaggtcataaaattagttaatagattcaataatgtttcagatagccgctcactgaacagtatcaaagatgagctttccagcctattcagtgatgaagagttagaaattgctggctatgtcgtagagtatcaggaagaacgaaacaaaatcctcatcgatacagtatcgaatgccttatctcttgttaagggaatccgtgaatcttatagccaagagcttgattatggtgttaccacgaacgtcagcaaacacaaagaaatggatttacttataaatgagcttgcatcaacactgaaaattatcagtaaaaatgttcatacgaataaccctaaaaacaaaaagagcagtataaacaacatcaaaaattggagtacaattaatgggagggcagtgaggtaa

SEQ ID NO: 100560 - DNA, 624 bp, Enterobacter aerogenes
atgacttcacgtgtctatgcttacctcagagcttccaccactcagcaagacgcaacacgcgccaaaggtcagttggatgagttcgctacagccaacggtatgaccatttcaagctactttacagagaatgaatcaggtgcatctctacagcgccctgagttgttcagactgcttgagattgcacagaaggaagatgttctcttagtggagcaggtagaccgcctgtcacgtttgagcggtgaagactggaacaagttacggtcactgattaatgagaaaggtgtgagagtggttgccttagacctgccaacaagccaccagcttattcagtcaggggatgagttcaccagcagaatgctggaagcattgaacggaatgatgttggacatgttagcagccattgccagaaaggattacacagaccgtaagagaagacaggctcagggcattgtaaaggccaaatcagacggtaagtacaaaggccgtccagaggacacacagcgcaatgagagaatagccaagctgttacaggctggtatgtcctacagtgacgtaatggaaacggtgaattgctcaagggcaacggtggcaaaggtcagtaagagtctcaaagagatggcttaa

SEQ ID NO: 100561 - DNA, 363 bp, Enterobacter aerogenes
atgaataaaattaaggctatcattttcggcgctatgatgtccgctgctataactgccaatgctgcaaacgaaactaccactgtaacaggtgaagtcggtaaagatgtcaaactatcccttgagtccaatccgactacgggttacggctggatgattaaagaccttcctgatggattgattttcgtttctggaggatatgagcagtcaaaagactgtccgaaaggtgccgtagggtgcggtggtgaagaagtgcttcacttcattggtgagaagaaaggggaaagcacactaaaactcatttacggtcagtcatttgataaatcaagctggcaggaaaaagaagttaaagttgtgattaagtaa

SEQ ID NO: 100562 - DNA, 180 bp, Enterobacter aerogenes
atgaagaaatactttatcgttgtagcggaaaagacacatcaattctacatgcagtataagagcctttccgaattaacaggaattacacctccctctggttacaccccgcctcgtatgatgactaaaaccagacggtatgaaatcattaaagctatttgtcagaaaactgaaaccccttga

SEQ ID NO: 100563 - DNA, 564 bp, Enterobacter aerogenes
atgacaaccttgaataaagccgtatcaattaaccaacccatcgcaagtattaaccatctgctaccttttgaacagcgccagcatattgaacgcttgtatttcccaaaggtacaacaggctactgacagaatgaataaagctgaatctgaatatcaagatgctgtagaatctcgttcagtgttgattaatcagaaagctgctgaatatctggctaatccttcagaacgtcacggattcattgtgaagcaggtttatccaactaaccagcaacaagtgattcaaagcatggctgaacagggttatatggttcaccgtgtaggtatgggcttaatctatttcatctcaactaaaaagaatgctctgaaagatgcaactgataaggccactgctgaggctgaaatgtcaattgacaaaatgattgaacgtctgaaggtaaaagcctctgaagcaattcaccagcgaaacagggttgtaattgaagcccgcagagccatcgaatctgtgaaagattttaccgattacctgaacgtgattgtaactgactctgaaggggcaaccgaataa

SEQ ID NO: 100564 - DNA, 177 bp, Enterobacter aerogenes
atgaatcaacttttcaatgaatatggtcagaaagtaagttgtaatcttctgatgacgctgcacccatcgcttatcacaaagctggaaaagctttctgaacagattggtcaaggtgtggtatcagaagaccagcgtttaacactggcaatcggtgagatgctcaggaggcttgaatga

SEQ ID NO: 100565 - DNA, 204 bp, Enterobacter aerogenes
atgacgctttatccgtgtaatcctctgaagtctcaaggggatgccattccgttaactcaaaatctcgccctgaatattcctgtcccaatgctacagaagctggacagggtaggttatgaacttgcgggacgttacaaattgggcggattatcagagcagcgcgtgagattgctggcattggctcacctgattgaatcggcatga

SEQ ID NO: 100566 - DNA, 558 bp, Enterobacter aerogenes
atggcgttactgggctatgccagggtatcaaccagccaccagaagctgacgctccaggtggctgaactgaaaagtgccggtgtgcgtgaagaccggatttttaccgacatgatgaccggggccactgacgagcgtgaaggactgcaacgactgcttggccgtgctgaaaaagatgacatcatcatctgtaccaaaatggaccgcctcggacgcaacacggctgatatgatccatatcgttgacgcctgctataaaaaggggatcgccatccggtttctggaaaacggcctcagtacggaaggtacgatggggaaaatggtcattcagatcctggccgctgttgctgaagcagagcgcgagcgcattctggagcgaaccaatgacggacggattgctgcaatggcttctggcgtcaaatttggacgaaagccacaccctaaaacgacaactgcacaatttcttataaaacaaggtgaatcattcaaaatgatatatgaaaaaacaggaatatctcgggcaacatattttagattgaaaaaacaaacacaatccgcataa

SEQ ID NO: 100567 - DNA, 864 bp, Enterobacter aerogenes
atgaatattcaataccctcatctatatgaaattactaatgagcgctcagcaaaaaatcagtggtattttttaaatggagtgagagcagaatatgcattgctaatattcactgctgttaactcatctttatcttacgatgggaaatatattactaatttagcattattcatcttattgattatattgctactagttaggaatgttataaattttgaacaaaaatggtataaatatagagcggttaccgaatcaataaaaaccacaacatggaaatttgcaatgaaagcggagccttttaatggcgatgaagaaacacataatgcaaaacaatatgttgaatacttaaaaaatatcttaaaagatagtaaatatgcgattcagacaaaagcgctaaataatcttgaaggagaccaattcagcatttgtttaaaaactattagaaaaatgagctatgaacaaagaagagatctttacgtagaacaaagaattgaagatcaacggacatggtatgctaaaaaatctctattcaacaaaaggattggtaaggggtgggcggtggctatactgattctctatgttttatcccttgctatgacagcataccttgctaaagaaccaagtcaatctacctcgttaccaacagagctaattacaacaataatttctgctctcataggctgggtgcaaattaaaaagtataatgaactttcggcatcgtatgcccttacagcacatgaaattggtctaataaaagagcaatcttattatatttctagcgaaaaagattttttagattttattcgtgatgctgagacagcattttcacgggaacatacacaatggcaagcgagacgaattgtataa

SEQ ID NO: 100568 - DNA, 159 bp, Enterobacter aerogenes
atggcaagcgagacgaattgtataaaatctgacaaagggaactgtaaagttccccttattgtattatttggcacgtcgacgaatagcatcaacaatactttctgtgctccaccgaacctgttcgacagaacgattagctacaacctgagatactcttga

SEQ ID NO: 100569 - DNA, 534 bp, Enterobacter aerogenes
atgaaagtcaacatcagcatggaagacctgttcggcgacagcctcagagagatgcgggagcgggataaaaagtctttacctaaaccagaatggttctccaggattgagactgacctggacacctttatgcatacccatatgacgaagtatccttttacgtcctttgaggccatcccccgtgacgagtcgggcctcacgtacccggattttgaggacctgcagttttatccaccgcatctgcttcgccatcagccgacgaagattgttgaagtcgacggactggcctttctcagcgttcttggtgacggtgcattctgcatcgacccgcgcaggtggcacagaatcaaaacctacatagcgaaaggcacagttgaatacccgcaggtttcagacaatcactctggcgtatcggacggccgccatcgcacactgttgctgatgcaactgtacaaccgcagaacaatcccggtcgtcgtcccagaaagccattacgggacgtttatggctgaagcgaaaaaaatgggtgcgatttga

SEQ ID NO: 100570 - DNA, 300 bp, Enterobacter aerogenes
atgatggtataccttgccggaataccggcactggcgaacgcagaccatcagttgaagatctccacctcccagggttaccagggcgcactgaaacgttgggtgacctgcagtcacgccggcatgctggaaacgctcaacacaaactttaccgcgctgaacatcagtctggccggaagtctggtagaccaactggtggccagtcgcgttgacatgaatgataaaaaagagaaggaacgcatgcttaaaagccccctgctctggcagaaaaacaccctgtatgccgtcgctattagtaattaa

SEQ ID NO: 100571 - DNA, 432 bp, Enterobacter aerogenes
atgaaaaatatcgtattagcatccttgctgggctttggcttaatttcttcggcctgggccactgaaaccgtagatattcatgagagagtcaacaatgcacaggctcctgctcatcagatgcaatctatctctgcgcctgctgagatccagggtatcgccccaagtatggctggtatggatcagcatgagcaggctattattgctcatgaaaccatgactaacggatcagccgatgctcatcagaaaatggtagaaagccaccagaagatgatgggaagtaacatcgtgactcttaccaggtcgtcaacgtcgtacgcatcgttggatgagcatgaaagagcagcagtggcccatgaattcatgaataatggtcagtccggtcctcatcaggacatggccgaagcgcatcgtcgcatggtcaatgcaggctga

SEQ ID NO: 100572 - DNA, 351 bp, Enterobacter aerogenes
atgaaagccagaaacgctttatttacagtattaatgttatccctgccagcgatttcagcagaacattcagggatggaaatgactgatatgtccaaatcagcttcttcacaggaatatatggccggcatgagcgatatgcataacaaaatgatggccgcagttaatgaatccgatcccgacaaggcttttgcgaaaggcatggtagcacaccatgaaggggcaattgcaatggctgagaccgaactaaaatacggtaaaaatccagaaatgagaaagctcgcacagaacatcattaaagctcaaaaaggagaaattgagcagatgaataaatggcttgatagtcaaaaataa

SEQ ID NO: 100573 - DNA, 900 bp, Enterobacter aerogenes
gtgatctataaaatttgccaggtaattgacggggagtacgtttgcgacattgatataagtgtgggagaatggaaagctctattactgaacgaaaaggtttttgactctaaaagtattgaggcgttaaaaaaatggtatattgaaccaaatcattcctgcacatgtttcgatataggaaaaaagtacgaccagcacagtatgagtgctaatggtgttattaacggactaggtggtagagttcaaaaagagcttggcagattcgaagttatagggatcggcaatatagcccccggaacaaaattcattacagtcatgaaaagtaaagaaaacggtgaaaaaccaaaaagatacttatggacaattcgtgatgaactggttcaggcaattaaagaactgaatttttttgatgaagcagaaacaacaaataatgaattttactctgacaatgaattaatcaatgctatgaatgaacacaataactttgatgccacccaggtatttgaatatacaggagaagctaaaccaaagaaaaatgcaatagaagtcaaaaatggcttttcgtatccaaggaataaaggggtgtccaaaaatgcactgaataaagcaggttacaaatgtgaagtcgatagccagcacccaaccttcaaaagacgtaactctcctctgaattacactgaaccacatcatattgtacctatgtccaggcaggatgactttgataattcgcttgacgtcgaagaaaatataatatctctgtgttgtaattgtcataaacaaattcacctcggccatggatatgaagaaatgctggaaaaaatatataacgagagaaaggagttattaaaacaggtagctatcaatatatcactggaggatttgattcgttattataagggatag

SEQ ID NO: 100574 - DNA, 1023 bp, Enterobacter aerogenes
atggataagagagtgatatttgcggttgccggctcgggcaagaccacgctgctgatacggcggttgagtgaggaccggagaacgctgatcctgaccttcaccgtgaataatgaagcgcatctgcgggcgcagattatcagacgttttggctttatcccggacgggatcagggtgatgacctggtttgagtttctgcacggtttttgcttccggcctttcctgcaggagcggctggcatcgcgtggcctgagcttcgaccgaccccctcccggaataccgcgcacgaatgcccggcattatcaggatcccgccggacggctatatcaccggaggctcgcacacttgctgacagcccgggggctgctgccggatatccgtacccggcttgcccgttactacgatgaactgcttgtcgatgaagtccaggactttgccggacatgactttgattttctgctggagctctgccgtgcggaaatcactgtgctgtgttgcggtgatttttatcagcatacctttgatacaagccgtgacggcaacgttaattcaacgctgcacgatgacattacgcgatatgaggcccgcttcgccgcagcaggtttcatggttgaccgcaacacgctcaaccgaacatggcgttgctcggcttcggtgtgcgagtttatcaccgggcaactgaacatccgtatcgctgcccatgggatacatgccaccctgattgaaacgatcacagatgcagagcgcacagccaccctgcacgccgataatacggtgattaagctcttctatcgtgaacatcaccgttacggctgctattccatgaactggggcgtcagcaaagggctcgatcactttcaggatgtctgcattgtgatggggcccgcccactggaagcttctgacccgtcaggaactggcagcccttccaccgtcgtcccgtaacaggctgtacgtggcatgctcacgggcgcgcggcaacatttattttgttccggaaactcatctgcgccgattccgaaactga

SEQ ID NO: 100575 - DNA, 411 bp, Enterobacter aerogenes
gtgaacaaaatgtatatgctcgacaccaacatctgctcattcatcatgcgcgagcagccggaagctgtcctgaagcgccttgagcaggcggtgctgcgcggccagcgcatcgttgtctcggccatcacctgggccgaagtttcactggcatcacaggaagcaggaccagccgcacagaagctggctgacgcattcgctgcccgcctcgatgctgtcctgccctgggatcgcgctgcggtggatgcaaccacggagctgaaagtggcgctgcgcctcgccggcacgccgatcggtccgaacgacacggcgattgccgggcatgccatcgccgccggtgccgtgctggtgacgaataatgtgcgggaatttgagcgggtgccgggtcttgtgctggaagactgggtaagataa

SEQ ID NO: 100576 - DNA, 303 bp, Enterobacter aerogenes
atgcaggtatcgaaatacataacagctgacgtgttaattcaggaactccatgatgaaggacacgatgtcatctatgagcgaattactgaatatccggttctgaaaggggtcgcccagatcccaccggcaaaacatttactcactcaggaaggatacgtcgtcgggatcttcgttgaacctatgggaggatggcgccggcgtgaaagcgatgactgcgtcagtgatgaacctggtattgaagacaaccctttcaaggtgaagcacgatgttaatgcgtcccggaaaataatccgacgcctgtag

SEQ ID NO: 100577 - DNA, 804 bp, Enterobacter aerogenes
gtggatctaccaaaatttgatgaagccaataatgcctggctgctgaccctgcctgagagccgcacaggtggtcgatatcagccagcatgcagagtggtcgtcatcagaaccctgaaggaaacctactctcctgccagtggcagtcttgacgtgaaaagaaaactggctggccgcacatgcactctttccctgtactggaacgggggaggctggcatcaggagcctcaatacaaagcggagtggactgtaaatatatgggatggcacgaccgaactggacctgacgaattcggattttatgcttgactacaatttgcggggacgaggacttggctcctggatcatgatacagctgatttcctgggcaaagacgcttccggctgatacccccgtgaaacgtatccgtacatctcctgtcgatgaagatgacagggaaaatatgcttcgtcgggatcgcttctggaacggtatcggattcaggttcgaaccagccggaagactatccatccccttaaccgtaggcgagcttcagtaccctaaaggtcttcattgtcaccttatcgctgtgcctttgcataagggagttgatgagctacaccgtctgtgtgagagccagaagctggaaattgatagactgaaatccagtcagtcatatcaggcaaaacaaatccggtatctgaccgaacgtcagtgggacgtattactgataaaattcatatgcttcattattttctctcccatttttattccctgctggctctacagcaaactgaaacaaagccgtgagacaccccatgaaaaatga

SEQ ID NO: 100578 - DNA, 192 bp, Enterobacter aerogenes
atgaaacttgcaccacaaagccgtgagatcctgcgacagtacaaggccctgattaatgcccgccgacgtgatgccggtcagcgggaactgaccaccgcgcaggtgatggatgaaatttgttactacatgacctgtcagtgtgccgtgtacatcggcggttttttcatcttacagggtggaaaaggccagtaa

SEQ ID NO: 100579 - DNA, 363 bp, Enterobacter aerogenes
atgatggcaggcgtccgggccggagggcgcctgtcagcccgcgcgaaaacctgggcaggctgcgcctgccggagagaaacttcgccgcgcctccggcgccgcgcactctcctctccattgtcagtcgctgaagccctggagtgcgcgtattatcagggatatcttcctgtaaagcagaccggtaaactgcgtctctggagtggcgttgcatggattatcgttgccggcatcatcataacgttgatgctgaaggggagggagccgggggacgaattacgagtgctgatcaccgtttttgctttcctggcttcggcctggtacagcgttgtgcagtacagaaaagaaaagcattttcgctcctga

SEQ ID NO: 100580 - DNA, 558 bp, Enterobacter aerogenes
atgacagtacgcggcatcaacaaagtcatcatcgtgggtaatctgggccaggacccggaagtccgttatatgcccaatggcggcgcggtcgctaatctcagcctcgctacctctgagtcctggcgcgataaacagaccggagagatgcgcgaaaacaccgaatggcatcgcgtggtgctgtttggcaagctcgcggaagtggccagcgagtatctgcgcaagggcgctcaggtgtacgtcgaagggcagttacgtacccgaaactggcaggacgacagcggcgtaacgcgctatgtcactgaaatcgtggtcggacagaacggtactatgcagatgctgggcggtcgtcgtgacggcggtcagccacagaacacggctccgcagcaacccgcacaaccgcagacaccagccactccggcacaacctgctggcactcctgaaaaatccccgaaagcgaagggcggcagaaaaccccgtcagactacaccgccgtctcagcaagccccacagccgttaccggacgattatccgccgatggatgatgatgccccgttctga

SEQ ID NO: 100581 - DNA, 309 bp, Enterobacter aerogenes
atgccccgttctgacctgcatgatgaaaacgccccgcaaccagcggggcaggaaaaggagatgtacatgaccagcaacgttataccgccccttcagtcactgcctgatggcacattcacccgcgagcaggctaaagcggttgcagcgcagtatcagaatgtcgcgattgaagacgatcaggggacgcactttcgcctggtggttcgtcaggacggcgaaatggtgtggcgggtatggaattttgaaccaggtggtgagtacctgatgaaccgttatatccgggactacggcatccctaaacagcagtaa

SEQ ID NO: 100582 - DNA, 432 bp, Enterobacter aerogenes
atgcgcactattctgacccccgatgtactgaaaacgatgtcctgtgatgagtttgaggactggcgggacagcggcgaagacttccgccgcgaactgacccacgccgtcatgcgtgacctgtcctgccctgaacactgggatgtgaacggcgagtaccgcagcgagttcggcggcttcttccccgtgcaggtccgctttacgcccccgcacggcaactaccatattgctgtgtgcagtccaggtgccatcagtccggtgtggatggtggtgttcgttcccgccagcggtcgcccgttttctgttatcagcaccctgcctgcatattcgccggaggctatttctcatactctcagtctgacagcgagcctcgatgccgatggctacagtcaggccagcattatcagtgtcctggcgatggagggtgcacaatga

SEQ ID NO: 100583 - DNA, 729 bp, Enterobacter aerogenes
atgatcccgacgagtatgtcactggtacccctgagtcatgagcgtcgtgctgcaatgcaggccatcgcagaagtggagaagaaatatgagcgtggcgttcatattgctgagtttgcctacgcccatgccttcttccgcatcctgaacggtagcaaacgtgtcaccgtaaaagatatcggctggttttctccggggatgacagcacagaacctgcgggggaaaaagcaggactggctggcagcgattgatcggctgattgaaagccgtggcgcatgttgctggttacccctgtcggtgtcggacggctggcgactgttcccggaaacgaagtttcagacgtcagagcgccggcgcaggcaaagtgaactgagcgccgaaaaatacacccgccagcgccgaaaagaggcgtgccagcgcgaaacagcgtatcaggcgctggcggggcaggcggagatcgagctggcttttcataccccggagacggtcagcagctggagcgcacgctggtcgggtactgaactgcgccagtacgacctggaggaaatgttctggcgctggagtgagcgtttcccgtcacttgagccaatggagcgctggatgatgacgaaccagcctttctggaccgtcatggttgaatcggcggcgctggcaagtgagagttctgaagctgtccgtcaactggagcgctggatggtaccgaacaagctgacaatacgggagcgggtatga

SEQ ID NO: 100584 - DNA, 327 bp, Enterobacter aerogenes
atgaagtggcgttactcgctgcgctggaagctggcgcataaaccgtgccctggtccgtatgaactggcatgtgaggtggtggaagcgggggcgtcagcgcccgcatccgttatgtccctgtgggttccgggtgcaggttatgccgtctgcgtggattttctctgtgacacaccgattcgccgctggagcgatgaacgtaaggcggcaacccgcaggcgtaatcttgaaaaacgtattaaccgggctgccccgctttttgccgatgaacttattgagcgggaactgacggcgcgaccggattattttcggggaaagtcgcctcactga

SEQ ID NO: 100585 - DNA, 399 bp, Enterobacter aerogenes
atgtctattgaaaatatgtgtgcggaggaactggaacatcagcgtcgaaagggatttattgctcgtcgtgcattgtctgaatcggtcatcgcagacctgattataccgaatggctggcatgccgccgctgaatatcagcaggagttcggcgggctgtatcccgtgcaggtcaggttctggccttcccatgggcgttttagcctggtgctttgtagccctggtgcggtgagttcacactggaaaatgttgctcatttctggaagtgcacaacgagtggagctactgcgtcagttccagaaatattgtttcacgcaaatcagcaatgttcttatcaggactaaccagcttgaccgggacggctacatttttgacgggatagccggaagcttcaggacataa

SEQ ID NO: 100586 - DNA, 207 bp, Enterobacter aerogenes
atgtgtttttctccatttctggtgcataacatattagcttcgttgttggtcgtttgtatcatgcagggtgaactaacaatttgtccacgaatggaaatagttccgtttatttgtgctgatgtgctcaagggcattgcggcgcaaactaagacccataaccacgcttcttttttaacctttttcatcatagattcaaacatgggctga

SEQ ID NO: 100587 - DNA, 216 bp, Enterobacter aerogenes
atgctagacacatctagattagccgcttacccgccgaaaggcaaggagaagaaggctatgaagctaccacgcagtccccttatctggtgcgtactgatagtgtgtttaacactactggcattcaccttcctgacacggaaatcgctctgcgaaatccggtaccgggacggagacagggaggtggcggctttcatggcctacgaatccggtaagtag

SEQ ID NO: 100588 - DNA, 201 bp, Enterobacter aerogenes
atgggatgtaatctggtgctcagagaagcaattcagagtggaggattggaggcgctgagcgcctctcccccgcccttccagctgggcgccctgcagcaggttgttcatgccaggccagacagggaaaagggcctccctgcgaacagggaagcccttctaaaagcgcttgtggcaatggttcgacaacatacgaagctctga

SEQ ID NO: 100589 - DNA, 399 bp, Enterobacter aerogenes
atgcacacacaaaacgtcaaaaccgccgctgccgaatcttccggaagatggggtacagacccaaaagcccgactggcctgtgttattgctgagcaaaaagcatatctctcgcggttgcggggcgtctgggagttgcaactctcagaggacgaagaagcagagcaggtattcggcatcctgtatgccatgagcgaaaacgttcacaaagagggagtactcaactggcgctccgtgacaccgcttgtctcgtttcatgttgtccagccgtggttacaggcgaaagcctgtgtgatccgtggctacggtgatacgggtgtggctgcgtgggagtatgcgagtaagcacctgaaagacagtatgaattttgcggtggcgatgctcgatgtagaaacctgctga

SEQ ID NO: 100590 - DNA, 474 bp, Enterobacter aerogenes
atgaaacggatagcagccattctaatggctttctttttttcaggttcgctgcatgcagctgactgttttgaacttgcaggaagagattacaaaatagatcctgacctgttgcgtgcgatatcctggaatgagtcaaacttccgggtaaacgtaaagggttacaatccggtatccggtttcggctcaggactcatgcaggttgattcgcaacatttcaatgaactcgcgcgttatggaattacgccgcagcaacttctggaagatccatgcatgaatatttacaccggagcttattatcttgccatcgcgtttaaaaagtgggggacaaattggcaggcagtcggagcatataatgctggattcaaacagtcagatacgcaggcgttaaggcgatacagctatgcaactaaaatcgaggcaacgtataaagctatcaaagagaatcgtaagcgagagcgaaacgcaacccgatag

SEQ ID NO: 100591 - DNA, 396 bp, Enterobacter aerogenes
atggctaagattcaggtgtacataaacgataatgttgcagagaaaattaatgctattgcagagcaaagacgtgctgaaggtgctaaggaaaaagatgtcagctattccagtattgcatcgatgttgctcgaacttggactgcgagtttatgaagctcagatggaaagaaagtcatcgtcttttaatcagatgcatttcaacaaaactttactagaaaacgttttaaaaacacagctaatatctagcaagttgttgggaatggtttcactaagccctcatctggagggaaatgatagatttgtgtttaaagagatggttgctactatacgagaagatactgaagaaatcatatcccatttctttcctaaggaagatgatgaggatatggaagaataa

SEQ ID NO: 100592 - DNA, 717 bp, Enterobacter aerogenes
atgagtgcgcgtgatcttatgcgttattcagatttgagtcaatcaccacaaatccattcctgttttgagatcttctcacaaatggaagttcctgtatgtataaggaattcccatggtgagtttgttttctccaactctcttttttctgaatacataaagggaagtgagtacgaagcttccttctggtttggaaagctaccgtttgagcttcagtgtgccattcttaataaagagcttgatgcacaggctaacccacaaatgaccgttataaagagcgtaatcatcgatgatacttttcattggtatatactctttcaggtaataaaatctgagtctgagtcattcattgtctggtcttttgtcaaagatcttgtttttagcgggggaagtcttaggtctatcgaaaatactaagttaaagataaaagactcacttaatccggccctggttttggagccgggtgtgtacaaaacattttgtctctatttttccggatttagccatgagtttatagctaaacttctaggtgttggggttggaacttccaagaataggatctcaaagtcatactccttaatgggtatctatggccgggattcaatgattatttatttgcagtctaattcctacttacatggtattcagatgtatgctttcgaactgattaatgctcaatttagtaaaagtaataatattccaaatatatataaagcttga

SEQ ID NO: 100593 - DNA, 375 bp, Enterobacter aerogenes
atgaagagatatagcagttccccggctctgggaaatacagtccgggtaagacttgattccgaaacagaagctcttttaagtgctgctgttgccagaagtgggagaagtcgtggctttgaggtttttttcagaattaaagatcatctgaatcgtttccctatgttcagagtgatggataaccccgactttcaacgagaagtctatgtgacagtcaggtttgatgatgataccaacctgaaattaattaatgccaaaaatcgtaccgggtggtgtaagacgtatgaagtcagagaaagacttcatgatcacttgaccaaatttcccgatttttacaacgcagagatggtggaggtgatacccaataactttgactaa

SEQ ID NO: 100594 - DNA, 351 bp, Enterobacter aerogenes
atgactgaaattagtgttgttaactcagttgaaccatgttcactgaagaaaaaattcagtaaaacgggtttgctgaaagctgttaagtatgcattacctattgcggcaattgctgtgtttttccctgaaacggttctggcctcgactacgggtaaagatttgatgtccagcggcgatgcaaccgttaaaggaacatttggtaaagattcaagcgtggttaagtgggttattcttgccgaagtcctggtaggggccgtgatgtatatgacgaccaagaacctcaagttcctggcgggctttgcgatcttgtccgtattcgtcacggtaggtatgtctgtcgcaggatactaa

SEQ ID NO: 100595 - DNA, 222 bp, Enterobacter aerogenes
atgacgcagtcaaaaaaatcagggaatttcatggtagtaggaaagacaggagaaggtaaaacggaatctatggcgcagatggttcgcatttttatggctcagtctgacgtcagccagatcaaagatcagtatgacaatgaagacggtaaaaagcggatacaagccatctttgataactgcagcaccaggattacgctgaatcccggaggcaaccgtgagtaa

SEQ ID NO: 100596 - DNA, 603 bp, Enterobacter aerogenes
atggccactgatttgggaacatggggcgatctctggccggttgatgaaccggatatgctgacagttattgaaacccgcctgcaggcgttacagcagtccggcgagatggacaaaaagatggcggaatttaaggagcgtgtggtacgcaacagccagcgtcctccaccggttgacggtatcaggcaggccacccgctatgagcggcgctggtttgatccgagtgtcagggtggataaggatctggcggaccatcaggggaggatatttgcccggtcggggcaggtattcaatccattggaaatagtgccgtttaacgagactctttacttcattaatgccgacgacccggatcagattacctgggtacaacgacagaaaccggacacattaatatcccgcatcatcttagtccggggcgatattcccgaaacatccgacaagctggaccgccggattttctttgaccagaacggtgcactgacaactcgttttggtatcagcgcggtaccggcccgcgttactgcagcgcccagcgggctacgccttcaggttgaaatcattccagcgtcaatgacgcaatatgacagtcggggggcacagtga

SEQ ID NO: 100597 - DNA, 960 bp, Enterobacter aerogenes
atgctcggcatgggccaggcggcacgggcttccgatgtggcctgtgaaggccgttttgttaaccctgttacggatatctgctggcgttgtatgtttccgctgtcactgggtagttcgcaggtcaccggcggtgacttgccggataccgcaaatccatcgagtccggttcagatttgcccaatgcccccgccgatatttcagcgcatcggtctggccattggctattgggaaccgatggccatgacggatgtcactcgctcacctggctgcatggtgaatttgggcggattctccatcaatctcggcaagatggggatgggcaccgcgaagaaggatgataagcaggtcaacggcgcgttttatcacgtccactggtacaaatatccgctgacctactggctcaatatcatcacttctctcggctgtcttcagggaggtgatatggatattgcttacctctcagagattgatcccacctggggtgacagcgagctaacgtcaatcctgaacccggaagcggttatttttgccaatccaatagcacagggtgcctgcgcggcagatgccattgccagcgcagcgggtaaaccgattgatgcattgttctggtgtgccggctctcagggttcaatgtatcccttcaacggctgggtgagtaacgagtccagtccgctccagtcttctgttctggtcagtgagcgtatggcattcaagctgcatcggcagggacaaattctggagagcgttggggccgacgtggcggtctgctacgaatatccgtcgcctatcatgcccaaagaacgctggcgatatcagatggtgaatatgttcccggatgttgcccagtgccatccgctggggcgaacggtgatgcgctgggagaccgggcgaaatccaccatccacccgaaaaaactttggctacgtaatgtggcgcaaacgtaactgcgtctatctctga

SEQ ID NO: 100598 - DNA, 621 bp, Enterobacter aerogenes
atgcttacccgactaactgtggcactgctggcatgcactgccagcgctacggtgctggctgatgaggatgcggctaatcaggcttttatccgtcaacaggaatcgttcagccatcaactgagacagcaagacaatgccccattgcgtcagatgcttgagcagcaggttcgccagaaccccctctccgatgacgatacgcgttttattggcgagctgaaaaaaaaacagcagggggcgaaccaggaaaaaccagattatggtgcgctctattttgtttctttttcaatcccgccatcaggtctgaaacggatgctggctgaggccagaacattcagcattccggccacgctgcgtggcatggtaaagaatgatatggctacaaccgccaacgccgttacggcgctggttaaagacggcacgacaacaggcatctccattgacccgacacgttttcgcgagttcagcattagcagcgtgccgaccctggtggtgtattgcgcgtcagggcatgacgttgttcgcggcaacatacatttgaagcaggcactgaagaaagtcgtagaaaaaggtgaatgccgggaacaggcgcagcagttgcttcaggcgggagagtcaaaatga

SEQ ID NO: 100599 - DNA, 1857 bp, Enterobacter aerogenes
atgagagggatgacactaatatcattcatgctggctggtatgacggttcttaacagtttgtctgtccgggctgacgcagatgcacaatacaaagcaggatcggattacgcgcatcagattaaggggcagggagagagtagcctgaagaatttcaacccgaccgccacacttcctggttacacggcatcgccaacggagaaaaaatactacggtggggtgaccgccagcggagatggtgcgctgaaggccgatggaacgcagacctggacgacgaacgaagcaaccagggcggtcaccgattccttcattaataaccctaaagagaccatttctcctgacgcaccgttcgtacaggccagtaaagacgtgcaatcccgcgcggatactatcattggaaagaccggtcaaacgcaatgctctgcgcagaatattaatcgcagtgagttcactaactatacctgtgagcgcgaccttctggttgagcaggcctgtaccaggaccgccagtatcaccggtgactggaaggaaaccactgagaataaaacctacaccgttacttcatttaattttagtcgctccggcaagcagatcgtctttagcttcacagccccgcaggaagggctgatcctcagtgggagcctgacaataaaagcgggctatgcatttctgaattcaaaaatgaacctgcttaatacaacttttaactccagtctgctgaccggtcagtcaaatacggtttctttgtcaggtgcggctggaatgcgattatcagaaggccagttcctgtcaggaacaagctgtagcggaaatggcagctgtatcggaacggttgatgatcatatctataacagcttcctgaacggcagttccactatgacgctgaagttgtatatgcaggtgaaaagccgggtatggataccgagagtggaatggggtgaatcctgcccgtttagcaaaagcgaaggtacgctcaagaaaactgagtgtattgaaccgggcagtactaagactgtcgtggttgagggcaagtcctaccaggttacccaggcatgctggaagtacaaagacacatatatgacccagtctgctgacaatggcacatgcaaaacctacatgaacaatccggcctgtacgcttgcctcacgcacctgcgcctttactgcagaagacggcagcggctgcctgcatgaatacgcgacgtactcctgtgaaactcgtacttccggccaggtgatgatatgtggcggtgacactttctgcctggatggcgattgtgaacgcgcgcagaacggtaaaaataatgactttgcgccagtagtatcggcactcgcagctctcgccgctgccggcaaagatgttgccgaattaaacgcggccaatgtgcgtgcctttacaggcagtgcgaagttctgcaagaagtttgcggccggctttagcaattgctgcaaggactctggctggggacaggatgtggggctggcgagctgcagcactgaagagaaagcgttgggtaaggcgaaagagaaaaaactgaccgtcagcgttggagagttctgctcgaaaaaagtgctgggtgtttgcctcgagaagaaacgcgggtattgccagttcgactctaaactggcgcagatagtccagcagcaggggcgtaacggacagttgcacataggtttcggaaaggccaagagccctgattgccgtggcataacgcaaacagaactgcagcaaatcaagttcgataaactggatttcaccaacttctatgaagatctacagaataatcagaacatcccggataacaacgccctgactcagcgtatccgtgagcagatcgctgcccagctgaagagtcagtaa

SEQ ID NO: 100600 - DNA, 2823 bp, Enterobacter aerogenes
atgcaggaaatctatgtcatcgcgggcggcgactggctgacgcagacgttgaatgcgatcgtcacgttcatgtcgacggagaactgggttgttattcggcgtattgcgacggctttctctgtgctggttgtggccatttcgtggatacgacgtcacaacattatggatatgctgggctgggcaggcgtcattgtgctgatgtcgctgctggtcagtgttcgcacctccgtacaaataatcgatatcagtaatcagacaaaggtctataaagtcgataacgtgcccgtcgggctggcactgcctgcatcgctgaccaccaaaatcggatatgcccttgttcaggggtatgaaatggtcttttcacagcccgacagcatcacctacagcaaaaccggcatgatatttggggcgaatctggtttcacgcagtacggactttttatcacagaacccagagataacgacgatattcacggactatgtgcagaactgcgtgatgggcgatattttcctgaatggaaaatataccatggaagagctgatgaacagcgcagacccgtatacgctaattttctcaaagccgagtccgctgagggggatattcaacaacaataatcagtttttaacctgtgaagaagccgctgcggtaattaagccaaagcttgccctggatactcagaccggaggaaaaacctggagttactacgtgcgtcagctttttggcggacgtccgaatcctgacattttgttcagccagatgatcggggacagctataactatttctatggagccggtcagagcgccgcgtcgattgtccgtcagaatgtgacgatgaacgctttgcgaaatggcatcatgagctatgcagcccgcaacggtgacacctcaagcctgctgaatatcgccactacgtcatcaatggagaagcagcggctggcgcatgcgacggtcggtcaggtggcattacgctcactacctatgtctcagacgttgattgtcggtctgaccatcggaatattccccctgatggtgctgggcgggatgtttaatgccgttacccttaatgtgctgaaggggtacgtgctggctatcatgtgggtgcagagctggccgctgctttacgccatcctcaacagctgcatgaccttctatgcgaaggcaaacggttcaccagtggttctctcggagttgtcgcaggtgcagataaaatactcagacctcgctaccacggcaggctatctgtccatgctaatccccccgcttgcatggggaatgctgaaggggctgggggcggggttctcaaatctctacagccaccttgcctcttccgctatcagccctgcagccactgcagcctctggtgctgttgatggtaactactcctacgccaacatgcagaccgagaacgtgagcggcaacagctggaacaccaacagttcgaccatgttcggacagatgagtcagcaactgggtaatggtgcgacgtccacacagatgcgtgacggcagtacggtgacagactccactcaggccacgagtaagctgcccgtgagtattaattttgcccgtcaactggcctcagcgcagcaggagatggctcgcgaggcccagacgcagtcccagagcgcgatgcagagctttagtagcagtatgtcaagcacgtggcagactctcagccagtttggtactaaccgggggagcagcgactcgatgacgcagggggccgacagcacgatgagcgcgcaggactccatgatggccagcaagatgcgcactgcggtggagagctatgcgaaggcgcataacatcagtaatgatcaggcgactcaggaactggcttcacgtagttctcgcgcttccgctggtctttatggtgatgcaagtgcacatggtggtatagggattaaggctttcggtacaggtggtggagttagtttcagggcaggtgctaaagccagcgtcgactttgatgatttagactctcatcaggcaagcagcagctcgcgagcgagccaggatgcgcgtcatgatattgatgcaaaatccaccaaagacttcaaggaggccagcgattactttaccagccgcaagataaatgaatcaggcagtcatacggataacaacgccgcatcacgtgcggaccagttgtctgcatcactgagttctgcaaaacaaagccttgaacagtactcgaccagccaggcacgcagcaaggaatatgctgaaatggcatcccgaaccgaaaccatgagcgggcagattaacgaagatctcaaccagcagtttgcccaatacgttcgtaaacaggcaccgcatgatgccgattctttgctgacggatacgggttcaccagaggttgcagcgaaacgaagagaactggcatggtcatttgtacaaagtcaggttcagccttcggtggataatgcgtattcggatgcgaaagacgggctggggcaaagtatggaaaatgtgtcagccggaggcgggcgtcaggaggtgttatctgaccatgcggcgcataaggcttccattgaaagtgcaacgtcagacgcaggtattaaagggaatgtgaaaggctcggtagacggcatgatgactgagacgcgaaataatatctcaggaacacaaagtgaaataaagggagcttcagcgtccgtcgataatcagtattcagcactggagcgtcatcaccagtcagaagcaaataatcagggaactatgtacaataacgagaaagcatcacaaaacgctattccgggagctgacagttctgaagaacttctggaaaaagcaaagaaactggagaataatcgtaagaaatga

SEQ ID NO: 100601 - DNA, 498 bp, Enterobacter aerogenes
atgaaagagctgatgcgaattatgtgggttctgcttatacagtatatcgcctgctcgcttgcagggtgggcaacatccttcacgctcctgatacttgcgttgttaattatgtgggaaagtatatttgcatggataaattatcgagttcgcaagcagaagtctttgcatagtcagaaagatgtttcaccggtaatgtacatggttctttcggtacccgcactctgttttcctatgttggcactactgatatttttcgggctctcgatctacagggtctgtgtaataagtggtgtaactgttggagatgaatctctaaaagatcagttttattttgaccgtgcgtttcaaagtgatccatttccttatgaatcagaactacacgattctacgggagctggattgaatccagctacaggattgccaatgtgcgggctagttgatacttctggtaatttttatgggtgttcatctgaatcatacagacgctcggacagttag

SEQ ID NO: 100602 - DNA, 144 bp, Enterobacter aerogenes
atgagcgaaaaggtctggcttgaaccatcaagcgagcgtaccgtttttctgcagatcaaaaacacgtctgataaagacatgagcggtctccagtctaaagcgaacaaagttaatctgaaattctccgaagcccagcagtgttag

SEQ ID NO: 100603 - DNA, 1377 bp, Enterobacter aerogenes
gtggccaacggggcgtacgctaaagctgataactacggtatcgcaaccggatctggcgcttcagcaggccttattggcattgccactggctcaaattctaaagctggagactacggtatagccacaggcctgaatgcaaatgcagacaaatatggcatttcaagtggatatgccgcaaatgctgctacttacggtgttgcaagcggatatgcagcatatgccggagatagcggggttgcgatggggacacaagcgactgcaggggttggagcacaggccgttggctcccgcgctgttgctgatgattatggtgttgccagtggatcgagtgctaacgctggcttacgtggggtagccatcggcgtttcctccatagctggcgagtatggtacagctattggttcaaatgctaatgtcaacggccggttcagtagcgcacttggcgccaatagcttagcaaatgctgattacagtacagcagtaggagggggcagagcgcaggccgaaaatagtgttgcaatcgggaacaacgcaaccgcagctaaagccaatagcgttgcgataggttcaggttcagtagctgaccgtgagaacacggtatcaattggagatatcggtagtgaacgtcaacttacaaacgtcgcggcgggtacggcagacactgatgcagtaaatgtcgcacagctgaatcaaaaggcgacagatacactgaatgccgctaacacctataccgatcagagagcaaaggagacgctggattctgcaaataactacactgacaagaagtcgcaagacacactggcttcagcaaatgcctatacggataagcagatttcaagtgcctctgatgttgccatcaaagaggctaacacctataccgacaagaaagctggcgaggcactcacttctgccaaccagtttgcccggaatgctgctgatacagctgagaagaacgcaaatcagtttacccgcacggagatagccactgcctccagcgcaacgctggacaaagccaacacatacactgaaacccgcgcgcgtgagacgctttcgtctgctaacagctataccaataataaattttcggcactttcagactcggtgaacagtcgctttaagcacctcagcaagcgtatgacccgcatggaaaacaaactcaatgcgggtgttgccggtgtcactgcaatcgcgagcattccttatgttgccgaaaacaatttttcttacggcgttgggctggggaattaccagaacggcaacgcattagcagcggggatgcagtacaaaacctcccccaatactaacgttcgtcttaatgtgtcctgggattcttcaagcaattccgcactgggtgttggtttggctggaggatggtag

SEQ ID NO: 100604 - DNA, 435 bp, Enterobacter aerogenes
atgtgtcctgggattcttcaagcaattccgcactgggtgttggtttggctggaggatggtagtagggggctgaagcgggcgtcaatacagctttctcttttctacattatgggtatgaccatgaataaaactattgagacgtcatacgcaaacaacctgagtgtgcttattcatatcgaaagtgagctggtcagagcaaccagctggttgcgggtgctgggttcgcttcctgaggaccatagccaggacaccatcgcgtactgggcaggatatcgattcacattcctgaatatagcgttcgaggaataccatcccctccatctaagggaggtgtgtgcatccattcggaccctggccgttagtatcaacgaatcagactggcatgaaggttgccgacaggctgaatttgaacttgaaactttcaattgcgcctga

SEQ ID NO: 100605 - DNA, 255 bp, Enterobacter aerogenes
atgtcgcaagctgaaaatgcagtgacttcctcatcgaaacgtgcttatagaaaaggtaatccgatgactgcttctgagaagcagttagcggctgtagctcgaaagcggattacacacaaagaagtgaaagtctttatccgtaaccctcttaaagatcgcatgattgcgctgtgtgatcaggaagggataactcaggcacagttcattgaaaaactcatcgagcgagaactgaatgagcatggactgctgaagtaa

SEQ ID NO: 100606 - DNA, 1647 bp, Enterobacter aerogenes
atgcctgacggaaccgctagtttttcctctaaagaagaggagaaaaaagcggaaataaaacttaagaggcttcatcgttctattaacctcttcgaagacattcagatggaagagaaaactggtaatcagtttccgctttcaaaagtaatgcttgctgaaatgtattcgtttatggttagtgatggaaacatgactggtgacggttctaatatcgtttcctacattgaaatgtatattttaaacaagcttcgtgtaaatcagcttgggcaagaaggcgttcctgaaatattgaatgatttttttgctcttgctgatactgttctattcgacatgaaagaccgttttgattctttgattctcgaagccacaggggttaattcaactcttatggcatgtgagttaggattgaaactatatgaagaactagaaaagttacgtgatgatctaaaagataaagaagaacaaaaccgattagatgactctgatgactctgacggctctgatgactctgacggctctgatgactctgacggctctgacggctctgatgactctgacggctctgatgactctgacggctctgatgactctgatgactctgacggctctgatgactctgacggctctgatgactctgacggctctgacggctctgatgactctgacagctctgatgactctgacggctctgatgactctgacggctctgacggctctgatggttctgtaacttctgcacgtacaacacaaagtttctcaccagcgcaattaagaaaggcgattgaagatcttgatgaatacctagacacagaggctgaacaggataattctcatgattttcatgaagctataaaaaaatccatatctcaaatggcatcttctttcagtgatgctgaaattcaaaactttggttttcgttttggttttatcactctgaccgaggaggactataataatgctctagctcactctcgtgagctaagaaagttactttcttctttaaataagcaaactgtacggcgtaacaacaggctaactgatcgtggatctcgtattcatagtagaaagcttgttgaagtacctatgggtgcaacttctgtgtttaagaaaaacggggagggatacaaaaggtctgatgtaggtgtaataaacctgcgtgatatctctgtatcaatgcatgacgtatcagttttagccttaaaagcaaatcttgcatttacccttgcttgtgaatcggtgaacaatattgatgttgctgatcttgtttatccagttcaaaaagaaggttatatagatatacttaagttttttaataaatctgtatctagttgcttttcaaattatgaaaatgtttctagcggattacataccccaactgcgacagcgattaattcatgcgtggaatatttctcacgtttgaatttctcacgtaaagttatctttattgcgactgatggtgacccatctgaatcaatagatgatgtatgctcagcagttaaaaatgctaaaaaacatggcatagatattgtttgtgtcggttatggcattgataaacctctaggctttgatggtgtttattttaaaaaaataaacgatatctctgaattaaattctttgtataaagatttaatcagaagcctagtttaa

SEQ ID NO: 100607 - DNA, 195 bp, Enterobacter aerogenes
gtgctcatcctcaacgctggcgggcaaacagggccgctgccggtgctcatcctcaacgctggcgggcaaacggggccgctgcaggtgctaatcatcaacgctggcgggcaaacggggctgctgcaggtgctcatcctcaacgctggcgggcaaacggggccgctgcaggtgctcatcctcaacgctggtgggtaa

SEQ ID NO: 100608 - DNA, 501 bp, Enterobacter aerogenes
atgagcaccggcagcggatccgtttacccgccagcgttgaggatgagcaccggcagcggcccactttccccgccagcgttgaggatagccaccgtcagcggccccgtttacccgcctgcgttgaggttgagcaccggcagcggccacgcttacccgccagcgttgaggatgactaccggcagcggccacgcttacccgccagcgttgaggatagccaccgtcagcggccccgtttgcccgccagcgttgaggatgagcaccgacagcagccccgtttgcccgccagcgttgaggatagccaccgtcagcggccccgcttacccgccagcgttgaggatgagcaccgtcagcggccccctttacccgccagcgttgaggatgagcaccggcagcggccccgcttacccgccagcgttgaggatagccaccgtcagcggccacgtttacccgccagcgttgaggataagcaccacagcggtcccgtttacccaccagcgttga

SEQ ID NO: 100609 - DNA, 612 bp, Enterobacter aerogenes
atgtttaaagagattaaaaaatggtttgttaagggcgtcaattatgagactgagttcatcgcagccgtaaagcgatccaagaagtggaaacttgaagttcctaatatctctttaaaaaagactccatttcttgctggggaaagggctgctatagctttaaaagttattcaggactatgcttcaatgcatagcccggaggaagtatctcaacaatgttttgggtatatgtatggaattcagagtgctttggaaaacgctttacaaactccactatattatacattaggttatattgaatttgaaaagagaccagtgtttcatacagaaattccaaaattagaaaggaatttgtataatccagtttcaggcgttggggcgattgatttacatgcctggctgacgactcctaatcttgaaatcattgatcttactttcgcaacaacatatggtattgtgaatgatattccatcagtaattggacgttcttcctttcaacattactctgagtttaatgataacatggtctatcatcctcaattaatcggcgacgattatttgaagaagattggagccatcgttgattatagttcgttgaatattattattacgtag

SEQ ID NO: 100610 - DNA, 129 bp, Enterobacter aerogenes
atgaaagtaaaaggcatcccatttaaccgggtcaaagaaagtctgctcaactccccggaggcaatccgggcttaccaaagagcagttaaagaactgtcactggtcgaaatactgtacgacatgcgataa

SEQ ID NO: 100611 - DNA, 357 bp, Enterobacter aerogenes
atgacatttctcaaatctctggactcgccgccgttcatcgcaacatatcgttgggcggggtcattcgatggacggtatatgccacaggcatattcgcttttgctggaactgaatcaacacacgtatctgccggtggttaaagccgagtttgatatctgtatcatcagctgcggtaaggagtggtggcgcttcaggctggtggatgtgaaatctgatgaacgtcaggaaggaatggtaacccggacggcataccggctaaaaccgtcaatggggatcgctgagcaaatggttaacatgatccgcgcctggcagtccgtaccgtaccttaatcctcctgcatctgactactttaggtaa

SEQ ID NO: 100612 - DNA, 288 bp, Enterobacter aerogenes
atgatgtacgaactgtttggttttgaccttgccgacttcaaagagctcttctatgtcttttgcctggcagtgcttgtttaccgctacatcactgttggtcgtaagcatccgctctttcggagtacagctaaatcagaacagagttctgaaaattcagtaatttcttcccaagcccctctcccggactcgtttagaattcgtcattgggatatgtccgatccgcgctctaatgaatacaattacaacatgaaaaggaatgaagaaatctttagcccggatgataagtga

SEQ ID NO: 100613 - DNA, 3939 bp, Enterobacter aerogenes
atgagtaatttcactatttataccattggtgatatcgattttgtttacacggcctttaacgggatcgcactgattttttcctctcatggttccaatgaatggctcagatttgctgcatatgcagcagcaattggccttttttataaatccctgcggtgggtccttgcacccacaaaaaacgatgtcccgatcttctcctggataatggggttattgttctattccattgccgtaattaaagccgatgtcacactggaatcggttaaaacgggggaagtcaggaacatagacgatgttccgttatttatcgcgtcaaccggtgaactgactaccggattactgcacgggctcattacggactggcgagcagcgtttgatccgcttacgccggtgggccaggtcactgacacgctcgatgacagcctgacgctgggtccaatgaccaaaatggtcaaatacatggagtggggcggggaatccagtgggttctgtcaggctttcccgaatacgatgagcgggagcgagaaacctgtcacctttgatgtttgcagaatcatccagtcaatagcccgcgactgtattaaaacgacccaggactcagaggttaatacgcccctcagaggcgtggcattaaatgaaatatatgctacagaccttggctcaatagaaacggtgatggattcaatgacggcgaacagcctgaagacggccagcgtccccatggtgacatccaccggtctgcagtatgcctcctgtacagacgcctgggcggcggtgaaggcttcttttgcatcgccgcagggcgtatcgatcatgaaacatatagggcagatgaatcagtttgttgaaccggctaaagaagaatccggacaaaaaagtgactttctcgcagggacggctaccacgcttttcgggagcgctggtcaggctcataatatcaccaccggggcttttgtcctcaaccagatagataaaggcgtactccagtatcgcaagtccctgggtatttcagcggattatcagctgtttgaggcgagtatgaaacgaaccaacgccatggtcagtcaggggcaactctggctgaacatctcaggtgctgcaatcagttttctcgagatgttcagttatatggtcgcccctttcgctctgattgccatcttatttttaggcggggaaggtataacttcagccgctaagtatctgcagcttatagtattcgttaacatgtggccgataacagcggtcatggtcaatgcatacgtaaaaatggtattaaatcagcagtttgacacatggtcatcactgggtgtacagaccactatgaactgggcgaatatggggagtattcaggagacgtacggtagctacctgtcagtagcttcagctctgtattgcatggtgccgatgctgacgctgttcctgttgaccaccagcatccacccgatgatgggggcgttgaaaaatgtgacgccggatgctcctgccaatactggtcatgtcacaccagaagtgtggtcggcgggtaacgcgggtaaacagtcctttggtgaccagacacacaccgcagccacttcaaccggtgccggtatgtcatcaggcgggcttctgaattctccgaccaggatgatgccgacgcttggcctcggttcagcccttcaggatactgtatctgcatcaggtaaaaatgaaattgggactacaagacaatcaaccaggaccgcttcacaggctttaaacgaagcctgggccaacgcgtcacagggaagccggacacagaccggatcaagcacaactcagggtggaatgaaactacttcaggatattggtacagctttaagcaatggggttggaagcgatgtaggattatccgttgatgctaaagaagctaaatcattccaggcagtatttggaggtggggctgacatatctcttggcttaggtagcggaggtaagggtggaagtaccggtaccggtggcagtctccttggaaaaatgattaatgcagctggcggattacaagcatctatacaagggagaattatgaatgactcgggtttaaccgatagtcagaaaaaagcctttaccgacagtctgaataacttatttaaagacggcagttcgtttgccaaagatatcgctaaattcgaagcaaacagtattcagaacggatttactgattcagatagttatcagaaagttgcgcaacagatgcaacaatatgctcagtctatcagtaattctgaaactaatgcgttcagtaaaacaggtggtcaggcttctcagctttcaatgagcagcagcctcaacatcgacggaggagtgctgtctgacacgatgagcaaacctgccaccgagaaatctgttggcgacttttgggcgtcacttggcggaaaccgcgaagctgcagttgcagaatggaaatccatgaaggatacattgaacagtagcaatacactgggagacactaagaatggtaatgatgcatttgttaaacaaatgtttaacaaagcagatcagttgaccaagatgggctccggtgaaacagtggcgcaaaatcttcgtgacattcagcaaacatcgcaaatgtttaaaaatgcaataagtatgatgggagctaatgccgggattcttgcaccagcagctgaaaaactggatcagttcgttggtctcggtagtggaggcaactatgccagccaccaggagcaaacgcagaaagcccctgatacttctgctgtaccgggagctggcgacatttcaggcaacttcaataatcagcgcagtcaggttacaggtggactaggcgcacgccaggacgcagcgaaagcacagcctggtacaactatcgggggtatgtcagcacaatctctcaaagaagatgatgcgaaacagtttatcgctaatcggtctggtgagaatgagggcaggatcctttctacaagtcagagagaatcgcttgacaatgtccgggagcaattgcctgagagcaaccaaaaaggaaccctcgaaaaagctcttcagacagctgataaagactccctgccggtaaaaatcgccggtggcgttcagtctataatactgggtgatgcagagtcagtagattacgactcagcaacacaacaaacaatgagtaatttgcaatcaagagaaccgccaaaaaatgctgaatcattccttccttctggagataaaacagaggatgctaaagctacattaacccaggcggcattgcatagcgaaaatgcccgacatcagactggcgaggccagagagaaaagccttgcccagagtgaagcctatcgcgagtcatataacaatttaaccggtgaaaatctgacaacgtctgatgtgtctcgtgttgctcgattaggcgcagacggaaaaaacaatggatttgaaaatgggttatcagatgtcgttaaatccgttgtcagtggttcgggaacgacaggtgcgcgtcctgccaccggtacagctgattataatctgggtgaaggcatacgtgataacaatgggcatgcgccagggataatgaacaaaattggagcggcggctgagaaggtggtcgataattcaccagtttcgcagcgactcttaactggagctggttcggatcgtcatgttgctgattcaatgaaaatcggtagtgggccttctcaggcaacactcataggtaatatggctaataacattcaactggaacagacaatcgctagcgcacaaagcagtccaggtattacggaagataaattcaacaggatgtcagatcagagtcaacatatgatgagtaatatacaacgccgtttatctgaagaccccagatatggacctgaggcagccgcagaatatccccaatttgtaggtagcttacctggaaatctgagcgaaacggagtcatctgacagggcaaaagagtttcttgataagcatagaaaatcttag

SEQ ID NO: 100614 - DNA, 723 bp, Enterobacter aerogenes
atggcggaaacggcaacccctcatgatgcagtctttaagacctttctgtcgcgggtcgaaacggcgcgcgattttatcgagatccaccttcctccggcgttaattaaggtttgcaaactggatacgctgcgcctggaatccgggagttttctggaagatgacctgcggccctactacagcgatattctttattcgctggagacaaaccgcggcccggggtatatccatgttctgatagaacaccagagttcacctgataaactgatggcgtttcgtctgatgcgctacgccatcgccgccatgcagaggcatctggataatggtcataaaacgttaccgctggtaattcccattctcttttatcaaggacgtcgcagcccctatccctggtcgctgaactggctggataattttgacgactcgatgcttgcccatcagctctattcaggtgcatttccgctggtcgatattacggtgatccctgatgacgaaattatgcgccaccgcagtatggcggcgcttacgctggtacaaaaacatattcgccagcgcgatatggcacagctgcttgacaagttgacccacctcttaatgttggagcagatgagcggacaacaaatcgccgtgctgataaaatatatggctcaggcgggagaagctcaggatattcggcgctattgtatgggctggcacagcgtgtgccgcagcatggaggaatgctaa

SEQ ID NO: 100615 - DNA, 444 bp, Enterobacter aerogenes
  misc_feature (414)..(423): n is a, c, g, or t
atgaaaacatctactacagatgtcgtagaaaatggaatgtatgagcgagaactattgaaagaactcgaagaattgaagctaaaaaatcgtgagttgaataatattgtgagcaggctagaatcagaattacagcaagaaaagtcgttacaaatggaaaatgacaataatgatatactcgttgatgttattgtacctgtttatggtggtttacaggaaactcaggaatgcatagagtcggctatatctacactcccttcatgggctgaactaatagttattaatgatgcttcgcctgaacctgaattgacagactggctacgtaaccgcgcaaaagataaaaaatttaaactacttgagaacgaaaataatttaggttttgttgcaactgtcaaccgtggtatgaaactacattcnnnnnnnnnnggatgttctccttttaaatag

SEQ ID NO: 100616 - DNA, 1611 bp, Enterobacter aerogenes
atgtttaaccgaatccgtatctctaccagtcttttcctgctgctgatctccttttgcatcatgcaactgatcagcaccgggctctcttacgtcgcgctacgcgccgacaaccacaatcttgaacgtattaccgtcagtagccagcagcgcgatgcgcttagcctgagctgggtatcgctgctacaggcgcgaaatacccttaaccgcgccggtacccgcgcggcgctgaaggtgccgcaggagcaggtggatgcgctgatgggcggcgcccgcagctcgctgcaaaaagccgatctctattttaaccagttcctcgacacgcctcgcgcggatgagcaggaacagcagttggccgatgccacgcgtgatagctacgagaatctacgcggcgcgctgcgcgaactgatcgtgttcctcgaaaatcgcaacctgcaggcctttatggaccagccgacgcagaaaatacaggaccgcttcgaggccgactttgtgcaatatctgcagctggcgaaggcgacgaccgatgaagccagcgcctccagccagcaggcctacggctggtcaatctggttggttgccggggcggtgctgatgctcttggtagtcaccctcagcgcgatgtggtggctacgaaccatgctggtgcagccgctgaatactattcgcggccatttcgaacgtatcgccagcggcgatctttccgcaccgattgaggtctatggccgtaacgaaatcagccagctatttgccagcctgcagcgcatgcaacagtcgctgattggtaccgtcggcgcggtgcgcgacggcgcggagtcgattcttatcggcctgcaggagattgccgaaggcaacaacgatctctcctcgcgcaccgaacaacaagcggcttcgctggaagagaccgccgccagtatggaacagctaacggcgacggtaaaacagaatgccgataacgcccgccaggcatcgcagctggcgcgtgatgcctcctccaccgccgccaaaggcggcgagctggcggatgacgtggtcaccacgatgcacgacatcgccaacagttcgcaaaaaatcggcgccattaccagcgtcatcgacggcatcgctttccagaccaatattctggcgcttaacgcggcggtggaggcggcgcgcgccggtgaacaggggcgcggctttgcggtggtggccggtgaagtacgcaacctggccagccgcagcgcccaggcggcaaaagaaattaagctactgatcgatgaatccgtcagccgcgtcaaacacggctcggtgctggtggagaattccggcgccaccatgcaggacatcgtgcgctcggtcacccgggtgaccgacatcatgggcgaaatcgcctccgcctccgatgagcagagccgcggcattgagcaggtgacgcaggcggttacccagatggatcaggtcacgcaacagaacgccgccctggtggtggaatcggcttccgccgccgctgcgctggaagagcaggcgattaccctcgccgatgcagtggcggtattccgtctggcggacgacaacttcgtcgcgccggaaacctcatccacggtaaaggagaccctggattgtcaaaccgcataa

SEQ ID NO: 100617 - DNA, 1050 bp, Enterobacter aerogenes
atgagtaaaatcagagtgttatgtgttgatgattcggccctgatgcgccagttgatgaccgagatcgtcaatggccacgccgatatggagatggtggcggtggccccggacccgctggtcgcacgggatctgatcaaaaaatttaacccacaggtgctgacgctggacgtcgaaatgccgcgtatggacggcctcgatttcctcgaaaagctgatgcgcctgcggccgatgccggtggtgatggtttcatcgctgaccggtaaaggttcggaaattaccctgcgcgcgctggagctgggggcggtggatttcgtcaccaaaccgcagctcgggatccgcgaaggcatgctggcctacagcgaactgataggcgaaaagatccgcaccgccgcgcgggcgcggctgccgcagcgcgccaatgaccagccgccggccattttaagccacggaccgctgctgagcagcgagaagctgatcgccattggcgcttccaccggcggcaccgaagcgattcgtcaggtgctacaaccgttgccggccaccagtccggcgctgcttatcacccagcatatgccgccgggatttacccgctcgtttgccgaacggttgaataagctgtgccagatcacggtgaaagaggcggaagagggcgaacgcgtgctcccgggacacgcctatattgcgccaggggatcgccatctggagctggcgcgtagcggcgctaactatcaggtcaagttgcacgacggcccggcggtaaatcgccatcgtccctcggtggatgtgctgtttcgctcggtggcccgccacgccgggcgcaatgcggtgggggtgatcctcaccggcatgggcaacgacggcgcgcaggggatgctggagatgcatcgcgccggggcctataccctggcgcagagtgaggcgagctgcgtggtgttcggcatgccgcgcgaggccatcgccagcggtggggtcaacgaagtggttgaactggagcgcatgagccaacgcatgctggcgcagatcgccggcggccaggcgctgcgaatttaa

SEQ ID NO: 100618 - DNA, 1707 bp, Enterobacter aerogenes
atgtttgatgagggtatcaaaggtctgagctggttctctctgttaaaaatcaaatgggttggctttctgtttaaatacgatattctgcccgaaagtacgccgggtattttcagtattaatgagactaatgactatgtttttgtcgaccgcaaagggaatgacacactttacgtacgccctcttgttaatggaacaaaatcaatccgtcttggagtaactcaatccactgataacgctgcagtctcaacggctgatacacaacctgcagcggaaagtaacagtacagtttcagatacagataatactgctgattctgaaaatgatgagacgacttccggtgagaatcagcaggttcaggaaaacactaataaaacaacccttagaacagatgcatctgaacctgagacacaagaacctgattctaaaaaacctgttaaaacccgccgtaaaaaaggtgaagtgagtcctgatgagtacatttccagactcctgcatcagttcaaaaataatgccattaatgctaatgaactggctttaatcgatggggtcctgtatgtatcagaaactcatattcgctccatagcgccgcttgaagagccgcgcttaatggagaccggtctttttgatctttctttacggtcaggaagcctcgatgaagaattcagcattccgtgcaatgacgggaaacggtatgttcagttaactgacgaagtatctcttgtccagttacgtcatcaacctgatattagagaggttgagatgctgcctttgctttctccagatttatttggtggggttaagactgatgatgaaggggtgtctttcacttttccgccgccactggctgaggtgaaacctgagccactccctccggaacgttatgaagagcaaacgcctgaacagactcgaactgaacatgaacctactgacataccatcagcggaattttccgatgatcaggaagatgatgttgaacaattctgggcggattacgcttcatattcgtacggtgatggctgtataaacccgttaaatcaaaccattgagagcactgatgttgatctagcacaggtcaaaaagtcactttcagagcatacaccggatgttagtacctctgtttacggaaaacacctggcagaggaggatgatttcgaccaaacggaagaggaagcgcaagaggaagattctggtgaggggatcggtgacattaacagcgactttgaagcgctgttttcccgtcagagtcaaattatcactgatccggctgtcgtcattgcagacaacatagaacagttaaaatccagtactccacccattcaggcgcatgctgatgccggaaacatcgaaacgcttcattctgatattgatacgattattattcagttaaacaaaatacgactgaataactcgccaattcagaccagagagttacgtcttgctattgttgtaactgatatcaatttttgcatgaggttgagaatctctgaagacattgcttcatggggttttcgtcaggaggagttaactgaactgcgtgctgctttcgcgcattttcctgtcgcgaaattaaaggtgggtataggcaggcctatcagtcactacatggttcgactgagtgaccttcaacaaggtgcgctgcgtaataacattttctacgaagaatttatttcgttttttaaccatcaggaagtaagccatgaaacgtag

SEQ ID NO: 100619 - DNA, 390 bp, Enterobacter aerogenes
atgttgatgcagcatatcggtgtcggctattttgggtattaccgagcaactgcttatgcgatgaaacactctcttatgcccgagattgcgaagttaagaatgaaggctctgaacttctgggataagcacgggatccgtgccgcagctgatgcttttgacgtatcaacgcgaacactctactggtggcgccggttactgcgcaccggtggtccagaagcactaattccaagaagcaaagcccctctggttcgccgttcaaggcactggcatcctgatgtactcaaggagatcaggcgtctgagaactgagttacccaatctcggcaaagagcagatttttgtcaggctgaaaccatggtgtgaagcgcggcattttacctcattgctataa

SEQ ID NO: 100620 - DNA, 315 bp, Enterobacter aerogenes
atgacggaaagaaaatcctacaacttgggtgatctcgtgtcccagtgtgacccagacgccccgattccagacacgcttcgagagtgggaacggatggtgccgattggattggaactggtcatcacgcggcactcagtcgacgttgttcatcagtcgatacgaatcttggaatctcgggaacaagcactggagtggatccagcgcccgattccagggcttgaagatgaaagaccttgcgacctgctgggtacccctgacggttgttgctggatagcgtcggtgcttcaaaaaattgagcatggtgatttcagttga

SEQ ID NO: 100621 - DNA, 594 bp, Enterobacter aerogenes
atgaagaatctatctgtggtacttctcatgctcttgatgacagggtgtgcgacaacgaagatgcaaacgcacatcgacccggagcacaaagatcgcacctacacgaagatattggtagatgcgccgaatgcgaattttgaattcaaagacttaatgatcaccgagttgtgcagtgagctgagagagagatctgtcggatgcgtaaccaaggatgagttgttccctcctaccagagaatattcagagcctcgaatttttgaaatcattgatcagaatgctgtcgatggttggctaattgttggaataggatcgggtgcgaccaacagccagtatatggggtcacaaacgtttggatctgcgactgtttacggcaatacggtttcgggcagtgcgaactccatggcgctgtactccttcagtcgtcagcaaggttactcgataaccatgtttgatatggagacgaagcataaagctttcatcatggaggccagtacatctgcatccgggctagctaacataaccaactctgttttcgcagagagtttggcaaacaaaataattaatgagatgtccgctgccggtttcatcgagtag

SEQ ID NO: 100622 - DNA, 312 bp, Enterobacter aerogenes
gtgagcgacgaaaaagaaacgaagattctccgggaagttctcaaaaaagttgaggacacgaagcctgccatcatcacaaaatcctggttcaattttggattgtggattacaagcgttcttatcctggcggccttttttcagtggtatgagtccgcagggaatccagccattttattagctggaggagggttgatcggcatacttgtgggcgctatctcagtcatgcaggccggcgagaaaaactggcgtgtcatcaaaggatatatggatgcaccggccatcaggaaaaagctcgatgactcagccacataa

SEQ ID NO: 100623 - DNA, 414 bp, Enterobacter aerogenes
atggaatggcgcaaggacgattacctaatcactgacgacgtatccaaggtgcaactggatgtcgtccaccgcttgcttgctgcaacctattggggtggtcgccgccccagggaaatcgtagagcgcatggttgcaggctccatctgcttcagtctttaccgtggtcccacacagatcggttttgggcgggcagtcaccgatagtgctacttttacctgggtggcggatattgtggttgaacccgaatttcgcggtagcggtctcggtaagtggatcatggattgtttgctagtgcacccggccataaagggaacccagatggtgttgcaaacccgagatgcacaagggctctacgagcagtttgggttctctggaaacagtgctctcatgagcaccaaagtcactgatttataa

SEQ ID NO: 100624 - DNA, 969 bp, Enterobacter aerogenes
gtgtcgaaatcaccgtttctacaatcggtccgcacagaaattaggacaaagcagtacagctaccgaaccgagaagtcctatctttactgggttcgtcagttcatcattttcaatgacaagaagcacccaaaagtcatgggtaatcacgaaattgagcgtttcctgaatcacctcgccgtcaatcggggagtcagtccgggcactcaaaatcaggcgctatgcgcgattatttttgtctacaagcatgtgctgaagcgggagattgaaaacctacagtacaagatgacgaaaacgcctcgacgcatgccaaccgttctgagtcccgatgaagttgcttctattcttcaaaacatggatgcagagtattggctcatcactgcgcttctttatggatgcggtttgagaatcaacgaagctctttcgcttcgcgtgaaagacatcgacctaaaaagccgcagtttgctcgtattcaacggtaagggacgaaaagatcgatacacactgattccaggcaatctaagagaaaacatggagcgacaattcgcccatgtcagggctgtacatgagtccgatctggccgatggattcgggcttacgtcagtgccggcctcacttcacaagaagtatggaccggccatgaaggactttggttggcagtacctgttcccatccgtaacaagatgcgttcatcccatcgctggttatgtgtgccgccaccatcttcatcattcatcgtactcgcggcgattgaggcaggccgttctggccacggaaatcaccaagcgtgtgacggctcatacctttcggcatgcctttgcgacagagttattgagatcggggagcgatatcaggacggttcaggaaattcttgggcatagcgacattcgaacgacagaaatctacacgcatgtcattggcgatcgacgtgctggaaccgtcagcccttttgatcgtttgccaagttcttga

SEQ ID NO: 100625 - DNA, 2178 bp, Enterobacter aerogenes
atgcatgaagactattttcgtgttaccagctgccaacacagtggctcaaagtatacgatcttcacaggcatccccatcaaagccgacagttacaaaatcaattcgggcaaatacattgtcagcatccgatgcgaaaaccagtctctaccgatccagccttcggtggggcagcagtggcgggttcgcggccagcgggcccttgaggccgtccaggcgggcgattatgagcttcagcagcatctgtataacgatccggctgagatggaatgcacgctgccggaaacgggtgaagcgctcattcgcttcatcgctaccgagaaagccttcactggaattggtgagtcgaaagctcgcgccctctgggaagccttcgggagcgacctgcactcgttgctccaaacggacacggaagagcacagagagtgtcttagagacgttctgagcgacgcatcaattgaagccctgtataacggctacgccaagtatcggaatctcgcacacgcgaactggctcgcttcactgggcattccgctgcgtattcagcagcgtattctcaaatatcacgatgagcgcactgtcgatatcctaaaagccaatccctgggctctgctgggctttgggatgccgttcgccgacatcgatacgatgtccgagcaattgggctttgagaaatcagctccggtgaggctcgcagctgccctggaaagcgcaatccgcaggcaggtcgaaaaaggtcacacctacgcaacgcatcaagttttaaggcccgagatcataaagcttctgggcgataaagacctggttgccgaggtctttgccaatggctatctcaatggccagttcattctcaggccacagaccggcacctatcacccgactgcacagataataatggaatcggtggtcgccaagcggctcaaaacactggcaaccatcacggacgaagatgaatccgttttcaaagcactgaccgaagccgcccgggagttgccttacgatcttactgagcatcaactggaggcggttgaatccagtctcaccaacggtgtgtcctgcattacgggcggtgccggtactggaaaaaccacggtgcttcggaccgtattaaaggcttacgccgcactgggctatgaaatacacgccgtggcgttgtctgggcgggctgccatgcgactgcacgaaagcatcggttttttcaccatgacgattgctcgcatgttgcgggaggagccgatctcaccctctctggttcagcccaagcacctcttggttatcgacgaaagcagcatgatcgacctgccgaccatgtaccggatcgtcacgcaccttgatccgtcggtacgtattattctgacgggcgacccaaaccaactgccgcccataggctgtggcaaagtcctctcagacataatcgaatctggcgcagttgccaatgttgagctgaatatcgtgaagcgtcaggaaggctcaacgggtatccctgaatactctgccaccatcaaccggggcgatgttcctccatcgttatcatttggtgcaatcacgttccacgagacgcctccggagcgtgtagtcgataagtgcaagaccctgtatgccgaatccgctcacaatacccagattatcggtgcaacgaaggccctggttggcgagttaaacctggaatgtcaacggctaatcaatccaggcggccagaggctggagttcaagctgcatggggatgatttctttattgatctgagggtaggcgacccgatcctattcactaggaacaactatactgtcggcatccagaacggatctcttggtgtcctatcctcagcagaccgcgcttttcaaggcgaccaggagacatttggtgtcgtaactctggataccggagaggagatagacatcaccgaggatgtgttcgactgcatggaacttggctatgcgatcacgctccacaaggctcagggtagccagttcccaagaattatcgtggtagtacagaagggccgcatttccgaccgagcatggctttacaccgcgattacccgcgccgaggcagaaatccatattgttgggcaagttagcgatttcgaggtaataacaaaagcggaaagccatgcgaatcggcgagcgagttttttgagagaactactgacagagaggaaaagggattcgggggttgtctga

SEQ ID NO: 100626 - DNA, 441 bp, Enterobacter aerogenes
atgtctaatggacaagagaaagctcgccagaacctcgttggcttccaacgctgggcggccacgcaaacggacgaggattttgagcaaatcgttcaccggggccagttaaaccgtggcgagctagcgaaagccattggcatcggcaaaagcgctctgcgtcagaatccagccatcaaggacgcactggaaacgttagagcaaggtctacgtgagcggggtgtactgccaccacttactcaggaggcttcggttcagaggtctcaacctaaacgctatgatcccacggtcaaccagaaagctttggagtcccggcgtctctcggcactggagcaggaaaacatcgagctgaaagctcgtgtggcaaccctcgaagccaagctcaaacgttacggcgagctatcggaggtactaaccgagttcggggtagcgcccgatgcatga

SEQ ID NO: 100627 - DNA, 636 bp, Enterobacter aerogenes
atgagtgatccaaacgaagtctacgaggcggtactgagccaactaaaaagcgctcgctcaagaaaatccctggaagcactgcatgaggtctgtcaggagcatcatagctcgggtgccgttgattttagaatcgcaacgattgccaagctcggcgataaccgtggggttccgagtgctcaaacgatccggaataaaacgggcgaaccgtatcgagctttgattgatgcatggcaggcgcttggcgatcagaagaaaaaagaaatcaaaggtcgcatgacgccgtctgggaaatatgattgggtggatgatctgggaaacccgactcaccgttaccttgtcctcgatttgattgcgcaagtgcgtcacctgagagccgaaaataaagggtttgcgtcgattaaaaagctggaaattgactgccgttccggttcggaagttgcggttgaatcacaacttccaaatttcctgagtcatgagttggacgcactgaaggaagcgatttctgatgagttcctgatgcgacagggttgggttcgaggggaacgtggaagtatcaaggaccaaaacggcaaggtgatcttccgtaatggcttcgttgacatcattgaaaaagtgctgagtttaaagcatgtctaa

SEQ ID NO: 100628 - DNA, 3288 bp, Enterobacter aerogenes
atgacgactaaatacgccacctacgccgaagcgtgcgaggccgcgcagaagttgggttttaagacggcggcagaataccaaaagggctataaggaagacgacaggctgcgaagaatgccggacaaagcctacccagatgagtgggtaagctggcctcattttctccgtaatgcacaacaaaaatacattaccctcgacgaagcgtcagcggccgcacgggcgctgggtttgatgagtcagaaagaatactacatggggtataaagatgaccccaaactgccgagtagccccgaacagtcctaccccaatgagtgggtgggctggtacgagtttttgggtacagagcgtccggttgagaaatactccaccctggccgaagcatcagaggccgcgcgggcgctaggtttcaagagccagaaagaatacaacacggggtatcgagacgatcccaagctctcgcgcactccccagcagtcctaccccgatgagtgggtgggctggtacgagtttttgggaacagagcgtccggttgagaaatacgccaccgtggccgaagcgtcacaggccgcgagggcgctaggtttcaagagttcgaaagaatatcgggcggggtaccgggacgatccaaagcttccgcaccttccccagcagtcctacccggatgagtgggtggactggtgcgagtttttgggaacagagcgtccggctgagaaatatgccaccttggccgaagcgtctcaggccgcgcaggcgcaaggtttcaaaagtataaataaataccaggcggggtatcggaacgaccccaagctgccgggtcgccccgaccaggtgtacgccgatgagtgggtaggctggtttagctttttgggaaacgaaagcgcgttcgatccagaattactcaccgtttatccgaggttctgggaagcaatccagagatatgtggaagcagggaccaaccaaaacactaaatactatcagttaagagccttcttaaaagacgttgttgcgaagcaaaacctacctgacaatcccggcgccatgctgtcgaaggacataccgttcaacgaacgcatttatgaggcgttcgtccagtcgacgggagatacccaaaaaaggacaaggcacaacatttgtgcggatttctttgactgggctttagacacctattgttccgatgaggacgatgagggcgtgctgcttctcttgccaggatatcgcaacccattgcggaccgttctcaaaggctacttggaccagttgccaaccataagacgcagcgagtccaacaaaccgccgctcccaatggactctatcgtccgcgccagaaagcatctgattccttcggagatcaaatctttccgcgatctgcatcagttacattgctttttggaggactgctggtttgagtgcgatcccgaattaattgatgagaccgatccaaactgcatttatcggaccgtgactaaggatcgtagaaagtcggatggtgagcggtattttgaggaggccgtcgaactctggtcgccggtcaaggttgtggcgaactacatgttgttgtcgatgccgctgcgcgggcagcaaatctgttggctggacagtggcgagggcgacgagatcattcctgtctggcacgacggtgaggttcgatgggtcaaaaataccagtcatcttgccactccgaagcgcaaccagggcttcctgcgaagaggcgaagacggggaactgagttcctacatcacgacgaacaaaaccggaaagaaactcgggggctacagcgtgccctatatgcccgatgacctggcctactgggtgatccaattacgggaatggcaagccaagtacaacccaatcgaaaggttaaccccttggactgcaatcaaacttcgacaaaaaactaacaaggacatcctcaagagaagggggacgcaggcgtttttgtttcgcgatccggcttcgttggcttgcgaagacaaagtttcgcccatgttcacgacaaccgccttcgcacgcaccttgcctgcgttgctattctatagccagaaactaggggaagacctcgctgagaaaattgagaaaaagaacagtgtggagtacaagagccaatttaccccccacgctctgcgggtcagcctgattacggcgtacattgtcgatgggggaatgcccatcactgtgatctcaaagttggttggccatgcgtcactcgtaatgacaatttactacacgaaagttggccatagcctgatgcgaaaggagttggctgctgccgagaaacgggcgatcgaacaaagtctggaccgctaccaggacctcatcatccagaagaagattgatgaggctcgaccagagctcattgccacagatcgaaccactctggatcagtgtttgaattcggactggccggccgccgcctttcaattgatgagtatcggaatttgtcccgtgggcggagccaagtgtgacgaaggtggtgaaccattggtcgagcggaaggccgaggctttttacgcgccggttcccagtggctatctgggaacgagaaactgcccccgatgccggttcttcatcacgggcccagctttccttgggggcttatcggccatcgccaacgaagtcattctcgaaattaacgtcatccgcaaggaataccacgagctggaggaacaaaggcaggcgttcgatgacgagcggtacgatgccgagagtgcaggcaaggtgtttgggaacgcaagaaaactcaaaaaagtcactgctgcttacgaagaaaaagccaaaaaactcgacatgctggcgtgcgacctccagcacttataccggctcatcactcaatctacggcactcttgagcaaaactgagacggataaacagcaattgattgtcagcgaaaattacgtggaaatgggcatgcatctggaagagcagcaaagcgatttcaggctattggctgaagtttgcgcgaacgccgaaatctacgaaagcgcgagtgcgtccagagcacagcctttgctcagtcagatgttagataaacttgctgacaccaatgggatcgctccggcaatgttcaggctaaccgaagaccaacagctcaaggctgccaaccaggttgttcaattgcttatgaaggaaacagggaatgactggcaccttgctgacaggttggtgaacggtcaaatctcgctggaagacctggctgaaccattgagattcgctgacatacgcaaagagatcgaatcggtcatgaatgggtctctgaaattcgcgttaggaatcgagagctgccatgagtga

SEQ ID NO: 100629 - DNA, 1380 bp, Enterobacter aerogenes
gtgcttaatagtgtttgtgtggaagcgaacatcagaatggataacaccggactccaggtcagtcttccggtaatcgtgacgcacgatggcctgctgagaagttatctggactatttgatcgtccatcggaataagtcacggagttggaaagacagaagcgccttcgcagtccggcttttgatcgattacacgaagcaaaatgagggctgcttcgataaaccttatgaactttttcgagagttttccaacagcctttacacgggaacgattggcgaggacggtaatgaccccagttggttgcgctggaaaccacgctcagataacgatgcggcctttttgatcaagctcattacaagttacaccgactggttggctcgccaacacgaagaaaaaaaattccagataaacccgaaggtcaaaccaactcgttacgaggaatggatggggttggcagcccactatcagaaaaagcgccgtgcctttttatcccatctttgggcaaacaatccggatccctcttattctcgatatgtcatgcccaggaaggtttctggctctaagggtaccgaaagcaagaaaagttttccggaaggacggattgatgatttgctttgggatggattcgttcgatacggcttcgagaccagcgataggattcatgagcggctcgacctaaaaaatgtactgatcacgatgctgatgcactatggagggctgcgccttagcgaatgctttcacctttgggtagaagacattatcccctgggaagatggaacggcgcttgtaaaagtctttcaccccgacaaaggaaaagtcggtcagaacagcccaagcaggcgagaagaactgcgtcagcggttcggcctaaagccgcgattcgagtacccgaaatcccacaccctgcatgcgggctggaaagatccgaaagaagacaatgaaaataggcacttcttacaggtttggtggtttccacaatctgcgggcgaaaccttcaatgagttatggcggctttacctgacctatcagcggtattcggacgatgacaatcatccgtttgcgtttacaacacgcactggggctcctcactcgatcaaaggctacaaccagtcgctcaaaagagcagtagaacgaatcggcctgccattctcaaaagaagctggaacgacggcccatgcccatcgtcactcatacgggcaggcgttgtctgacgccaaatccagctccctgatcattaaaaatgctctccatcataaatcgatagaaagtcagcaagtatacaccgaactgtccgagaaacagatgcgagcgcacttgaagaggctctcacccgaacagcactcgatatctgccatttcgaagggaatttcacatgacgactaa

SEQ ID NO: 100630 - DNA, 489 bp, Enterobacter aerogenes
atgtggtggagcaccgctggaagtcgtaaagcgctacattcagcaccagcgcggctaaatgttcctttaacgctatcgcgtcaattcaaattcccctcccacctgccacggtgggagtaccctttgagacaaaagatggcagaaagtgggttatccaggaaagtaactttccttgattgtaaaaagtcccatctgcttgtaggggcacatgacaaaagccccaccattgcggtttctatgtcgatacccccacatgctgggggaatacaccacactctcgcagtggttctcgctcatgccccgataacccccgcaagcggggggaatacgccctgcacctgtttcgcaaaatccgaaccggccaataacccccgcatgcggggggagtacgtggcgaccaccagcgtcttagtgcagggaaccgataacccccgtacgcggggggaatactattcagccagttctcctgggcaccgggtcggccgataa

SEQ ID NO: 100631 - DNA, 198 bp, Enterobacter aerogenes
atgcgtaagatccgattaactgaacaccagatcatcgccgtattgaagtccgtcgaagccggacgtaccgtcagggatatgtgttgtgtggctgctctttcggaagccggcaagtgcaactggatggcgaagtatagcgggatggaagcggccgatataaaaaaatcaaagagcttgaggatgagaatcaatatttaa

SEQ ID NO: 100632 - DNA, 231 bp, Enterobacter aerogenes
atgcgaactgtatcgatttttaaaaacggcaataaccgcgccatccgtctgccgcgcgatctggattttgacggcgtcaatgagctggagattgtccgcgaaggggacagtattatcctgcgtcccgtccggccgacctggggctcattcacgcagttcgaaaaagccgatgcgaactttatggcggagcgtgaggagattgtcagcgacgaagggcgggtagacctgtga

SEQ ID NO: 100633 - DNA, 267 bp, Enterobacter aerogenes
atggccagaacaatgacagtggatctcggagatgaactccgggagttcatagaatctctcatagaatcaggtgattatcgtacacagagtgaagtaatccgcgagtcacttcgtctcctgcgcgagaaacaggcagagtcacgtctgcagaccctgcgggatttactggcagaaggcctgagcagcggcgaacctgtggcgtgggaaaaggatacatttctgaaaaaattgaaagcaggcacgagggctgccggtgaaaaccgttaa

SEQ ID NO: 100634 - DNA, 291 bp, Enterobacter aerogenes
gtgaaaaccgttaaaatcacacctagagcgagtcaggatctggaggatatctggtattacggggacctccatttaggtgaagagcaagccgacaaatatattaatcagatatccgatatttttcaggttatgagcgatcataatatcggtactccccgtcctgaactaggggaatacatatgcgcattactcgttgaacggcatatcatttattttctacagactgatactgaaattgttattatctgtatattaagtcagcatcaggatgccggccgtcatctcaactag

SEQ ID NO: 100635 - DNA, 423 bp, Enterobacter aerogenes
gtggtcccggtcggcactcataccaccatgccggcaggtgggaccgtggtcccggccgatactcataccaccatgccggcagatggaaccgtggtcccggtcgatactcataccaccatgccagtaggtgggaccgtggtcccggtcgacactcataccaccatgccagtaggtgggaccgtggtcccggtcgggactcataccaccatgcaggcaggtgggaccgtggtcccggccgatactcacaccaccatgacggcagatgggatcgtgatcccggtcgggactcataccaccatgccggtaggtgggatcgtggtcccggttggtattcataccactataccggcgactgggaccatggtcccagtcggtactcaggaactatctaaaagctcgaaccatagttccattcaacactaa

SEQ ID NO: 100636 - DNA, 243 bp, Enterobacter aerogenes
atgaggttacgccagacggttgccggtgacgcggtgaagctgccgctggatgacggtcattacaccatcagggaaacggcctacgtgatccgtctggatggtactacctgtctgcagctgacggatgacggaggtatacgccagacaaaagagggcgatcccctcctggaggctagctggtatcagacctgttttgatgcaggactgccggtcaccacccaggtgaatgagagtcgtgactga

SEQ ID NO: 100637 - DNA, 483 bp, Enterobacter aerogenes
atgaaattaacagaatccagactgaatacgctgatcgataatctgaatgccctgatttgcgaggacaacctactgacgcgccaggagcgcgaggatttggtccgggccgtcgctgccatcggtgccatgaaagcgcgcgtcagtatgaagaagtccaacgttccggcagcgtcgaaaccaaaggaagagaaaaaggaacgagtgcccgacccacgttttccgcatgcaggcgaaccctggcgggaagaagaggggactatgctgcttgatgccctagaatacgtacctgacgaagcgttgggcgttcatctgttctggctggccgaaaagctgggtcgtaccccctacagtgtggcctgtaagatagcggctctccgggacatgccagaagagtggaaagatcagtaccgcaaggtttcggatgatattcgcaagtcaggcctgagcgtcagcgattatgttcagcatcacgggctgaattaa

SEQ ID NO: 100638 - DNA, 285 bp, Enterobacter aerogenes
atgaggaaaaaattaacttggttgtttatgtttctggaattatgtctcggtatttctctcattatttacgggctggttaaatattttgttaaaccctcggtatctgacaattgtttagaggcaacactgtgtgctacagaaactataagctttttcacattttggatataccttacggtaggcgtcatgctgatatgcctgtggtatatgactacctggcgagcttaccagcataaggagaaggaagtgaaatcgaaactcaaccccgaagactttgtcaaataa

SEQ ID NO: 100639 - DNA, 426 bp, Enterobacter aerogenes
atgtatcacgtccatcaaaccatgctgaatgttgaagagtccgaccgtctgtcgttcctgccggatctgtttggtaaagattttctggccggagagatgcaggtctatgcgctcgctgagaaacacatcaccgattactgcggaggattctggcatttcattcgtattccggaggggggcggctacatgatgccggacggtgatcgtttccatctgactaatccggaaaactggtttgatcgttctgtcagtgccgatgcggcaggaatcattattacggcgctggcgatcaaccgccgaatctggttgcaccatgaacgcggcgacgcagctctgacacgtcacctgatgctgcgggaatctcagttgtggaatttcatcgactcccatgacgaatgcgctgctatttacgcggctctggactga

SEQ ID NO: 100640 - DNA, 2439 bp, Enterobacter aerogenes
atgcgcttttcactattcttaaatcattctgctttagctttgagtctctcaatagccacgagcatgttttccaacgcccaggcccgggtatacgagtacacctttacagttatcaatggggcgcaaaaaagtgtccctgaaagtgcgccctatcttaatccacatgggaattttaacgctctcctcattggtggcttggaccaacaaatccgcttaaccgtaactcgcgatgctgataacagtgctgtttacagcacaacaacaagtatcatctctgttgatgacaggatttcttccgctaatggaaatatgttttacggaaagactgtcactattccacctatcagtgatggtcgttacaccataaaatctgagattttagactcaaaatcgaccgttgtttcaacaacatcccatccttttataatagatacggtaggccctacgtctgataacttctctgtaccatggattcctgggtacaacatggttgtaacgggacctcgctgggaacttggccaaggtcaagaatctgccataaatcttgcaattaagaatatcaatgatctatctggttttgataaggctattgttcaaataataaaaccagatggatcaatacaatccagctatacaatggcctacgacgatgggtcaagagctgctacagcccctataactaaaggtggtggagcgatagctaaagctacatggatgccagtgtcggatgccgatgtagagtttcgctttcgagcattcctttatgataaagccggaaatgttactcaagtccccgaccaaaaatttgtatttgattcttctgcaggtgaatatgagctatttgcagttgcagaccccaattcttcaactagtgttgttcccggcatttcgtctggctacattaaatattcagcagggatgactgttaatactaaccctgttactcttgtgtacaagattcccaaacataattatagggcttataacaaagctggtttatccttcggttctttgcttactgaagataatagttatgtatatataaaacaatccaccccagttggtacatcatttactattcataatggataccaatacggaggaggtaacgcttcgtataatgttaagttaagttcaatcgctccgaaatccccatcaataaaatcctactcagcaaacttttcaacaattggcgatttttctgctggcacaatgaaattcacaaacatagatttgccaggtgagtatcaaagtataactgtgtttgtagaccctagggattatgtgcagtcattttataaccttacacaaggctacgaagtttgtactattgagcccggagaaagttcttgcactggtcctttttcatacgcaataaataaggggaatggttacatagctcattattttatagttcgcaatcaagataagacacttacatcaaatcaatttgagattcgtagcatctggaatacggatttaatacctaagatcacagggtatgattacaaagaagagaataaatctgtccttgtttatgtcacacaacccggcaatggcaattggcgtgatgtcttgatgctttctaagctagagatactggatacaatttctaatacggttcttctgacgggcacaaaagccgcgatgtctggagaggactatacttatgcatttgatttatcggctatacctgaagggaagtatgatttaaccttcagggccactgatacttttaacaacagttctcagttgccgttcagatctcttattatagataactcccctccttcaatttcattttcgtatgaagggaaaccactgttatcagaaagtacagtctatggattagaaaacatctcagtagctgtatctgatgctttaagtaagtccaagatctctcaaatggttcttcaaggaggccctgcatcagatgatgtagaattaggatttacccataacacagatggttcatacacaccactttatcctcgtttgtttccttcacttgatgaaaaaactgataaatacacacttgtagttaaagctatagatgatgcaggtaatgaatcatcaaaatctatccgttttgcatattatcctaagaatctcattgttcttgataaacttaatacccttgcggttaacaaacctttaaacctttcttcaggtgaacctctggctgttcttaaagcaagtcagttacgccgtaatgatggttccttagcaaaaggcgtacagacagctttaattactgttaggggtgactcagcattcccaattagtgttattggaaaccttgtttctccaggtgaaacgaaagaaattcaaatagatttaggttctgtaggaaatgacgttgttgtccctatattcccaggagtatctggcgttgtcggtgcctccggttttattgttgaattccctcaactaaaataa

SEQ ID NO: 100641 - DNA, 1332 bp, Enterobacter aerogenes
atgtcctctaatgaaatcgcgatcaaggtaactaatttaagcaagtgctaccaaatatatactaagccatgggacagattgaagcaattctttgcaccaaaaataaagagcgtaattcggcgtgaaagtcgcagttattttaaagagttttgggcactgcgagatgtttctttttcgataaatcgtggggaaaccgttggtatcattggacgaaacggtgcaggaaagtcaacattattacaaatgatttgcggtacgctaactccaactgtcggtgacattgaagttaatggccgtgtagctgcattacttgagttaggggctggttttaaccctgagttttcaggccgtgataatgtttatttaaatggtagtgtattaggtttaagtaaatcagaaattgaacaaaaattccaggaaatattagattttgcagatattggtgattttattgatcaaccggttaaaacctattctagtggcatgtatgtacgcttggcatttgcagttcaggcctgcattgaccccgaaatactgattgttgatgaagcattggctgtaggtgatattggttttcaatataaatgctttaagcgtatggaaacgcttaaacaaaaaggaacgaccattattatggtcacgcattcaacgggtagcatattggaatatgcagatcgctgtcttgtaatgagtgacggcatgttggtcggtaatactacggatgtattggctgccgttcttgcctatgagaaaggcatgctaatgaccgagcgcactgacataacagagaaaaaagaatccatttcccagacaggggaaatagcctcggctgaggaattagctgcaatacaaaatacgcaaaccaatgctgaggttgatgaaaaacgttttggaagcggtcgagctataattgaggacttctcaatttttaaagcggatggcacacctctttctgaaaaaccattagtaaaaccaaatgaagagatttatttttcctttagaataaattcatcagaaaagataaatgatgttgttttaggtgtttcactatcgcggacccaggggggagatatctggggggataataatatttttgctggacataagatagacttgattcctggggagcggaagcttaaatataaagttaagcttcctatcaatactggcgattatctcgttcactgtggtttagcttgctttaataatggtgagcgcgaggaactcgaccagcgacgcccaattgctagagtaaaattctggtcatcaagggaactgggtggtgttattcattctcctgtaaatgtcatagaaggagatgaactattatga

SEQ ID NO: 100642 - DNA, 834 bp, Enterobacter aerogenes
atgaaaaatccacatcagaaaccgtcattatctccaatagatatagttaagactatgtatactcaccgtagtataattttgcaaatgactaagcgagatgttatcggcagatataaaggttcaattatgggcgttttatggtcatttttgaatccgttattcatgttgactgtatacacctttgtcttttcggtagtatttaaagccagatggtcaactggtggggatgaaagtagaacgcaatttgcaataatattatttgtcggcatgattgtccatggtttttttggtgaggtgattaaccgtgcaccacaaataatacttaataataccaactatgtaaaaaaagttatatttcctttggaaacattatctatcatttccttggtagctgcattatttcatactgctattagcttgcttgttttattaaccgcctttgttttatttaatggttttatacactggactataatatttatcccattggtttttcttccgcttgttatttttagtcttggtttatcatggatcttggcttcacttggtgtatttttgagagatgtgagccaaactactgtcattataacgacggttttaatgtttttgtctccagtatttttccccattagtgctcttcctgaaaaatatcatatttggatcatgcttaatcctgtgacgttcattattgagcaggctcggactgtattgatttggggtggagtacctaattttataggtattttactctacactgttggtgcatcaattgtcgcctggcttggctttgtgtttttccagaaaacaagaaaaggatttgctgatgtcctctaa

SEQ ID NO: 100643 - DNA, 831 bp, Enterobacter aerogenes
atgagttataaagcaatgaagcctaaagttattgcttctattgtattatttaaccattcctatgatgatattaaggatacacttttttcattaagtcatgaagagagtgttgaaagagtaatcctcgttgataatggtggttgtcaatgggctgcctcattgaatgaaccaaaaattagctatataaagtctccttacaacagtggatttggtgctggacataatctggctattaacgcaaatataggttttgacggctactttttaatatgtaaccctgatattagctttaataagcagtcactagataaattagtatcgtttgcatgggaaaatgaatatgattttgtttccccacagattatctataaaaatggtgagcgtcaatatagttgccgtctattgccaacacccggcaatcttttcttaagacgctttcttcctgcaacagctatcaagtatgatgcgacatatgagttgaaggatgccgagtatgataaagtattttcacccccttcggtatctggttgctttatgctcttgacaaatagtttattacaaaagttaaacggctttgatgaacgctattttatgtatttggaagatgtagatttgtgtcgtcgtgctttacagtacacgaaaatctattattgtccgaaaacaacaattattcatgttttcaataagggatcttataaaagtaaattgttgctttggtatcatattcgttctgctattgcctattttaataagtgggggtggttttttgataaaaaacgacatgcttataacgaatcagcattgcgtaatatcccgagaaagctaaattaa

SEQ ID NO: 100644 - DNA, 555 bp, Enterobacter aerogenes
atgaatattattaagaccgacattcctgacgtactgatttttgaaccgcgggtctttggcgatgcgcgaggatatttttttgaaagcttcagcagtaaggtttttgatgaagctgtcggacgtaaagtcgagttcgtgcaggacaatcattcccagtcgcagaaaggggtgttacgtggcctgcattaccagctggatccgcatgcgcagggcaaactggtgcgttgtgttgaaggtgaggtgtttgacgtggcggtagatattcgccgcagttcgccgacctttggtaaatgggtcggggtggtgctcagcgcagaaaacaaacgccagttgtggatcccggaaggctttgcgcatggctttatggcgttgagcgataccgtgcagtttgtctacaaagcgacaaactactatgcgccgcagtcagagcggagcattatctggaacgatcccgagattggaattcagtggccagaattgtcgaatggggttccttctctgtcagaaaaggatctacaagcgttcacattagcggtagcggaagtctacgcataa

SEQ ID NO: 100645 - DNA, 891 bp, Enterobacter aerogenes
atgaagattttactgattggcaaaaacggtcaggtggggtgggagctacaacgttcgctgtccactctcggtgaggtggtcgcggtggactactttgataaagaactgtgcggcgacctgacgaatctcgaaggtatcgctgagaccgtgcgtaccgtccgcccagacgtagtggtgaatgccgccgcgcatacggctgtggacaaggcagaaagtgagcgtgagctttcggatctcctgaatgagaaaggagtggcggttctggctgaagaatcggctaagctgggcgctctgatggtgcattactccactgattacgtctttaatggcgaaggcagtcactatcgcctggaggatgagccgacggggccgctgaatgtctacggcgaaaccaagcgagcgggtgaaattgcgcttgagaaagctaatccccgtcatctgattttccgtaccagttgggtgtatgccacccgcggcgccaattttgccaagaccatgctccgcctggcaggggagaaagagactctctccatcattgacgaccagcacggggcacccaccggggcagaattgctggcagactgtacagcgatagccatccgcgaagaaatgcgtaataagtcggtagccggaacttatcacctggtggccagcggtgaaaccaactggcgtgaatacgcatgttttgtttttgatgtggcgaggaagcatggcgcagagttagctatccaggaagtgaagggcattccgacaaccgcttatccgacaccggcaaaacggcctttaaattcacgattgtcgaatgagaaattccagcaggtgtttggtgtgaggctcccggactggcgtcagggtgttgagcgtgtagtgaccgaagtgttgggtaagtaa

SEQ ID NO: 100646 - DNA, 870 bp, Enterobacter aerogenes
atgaaaggtattgttctggccggaggctccggtacccgtctttatccaatcacacagggtgtctccaaacagctgttgccgatttacgataagccgatgattttctatccggtgtcggtgctgatgctggcggggatccgcgatatcctcattattaccacgccggccgatatgccggcattccagcgtctgctgggtgacggttcacagttcggggtgaacttcagctatgctatccagccgtcgccggatggtctggcgcaggcctttatcattggcgagaagtttatcggcaatgatgcctgtgcgttagtgctgggtgacaatatctattttggccagagcttcggtaagaagctggaagcggcggcggcgaagacgtcgggagcgacggtcttcgggtaccaggtactggatccggaacgttttggtgtggtggagtttgacgagaacttcagggcattgtcgatcgaagagaagccgctgaagccgaaatccgactgggcggtgaccgggctctatttttacgacaacaacgtggtggaaatggccaaagaggttcgcccgtccgagcgtggtgaactggagatcaccaccctgaaccagatgtatctggagcgcggggatttgcaggtcgaacttttggggcgtggatttgcctggcttgacacggggacgcatgacagtctgattgaagcttcacagtttattcataccattgagaagcgccaggggatgaaagtggcctgcctggaagagattgcataccggaataaatggctgtcggcggaaggtgtggctacgcaggccgagcggctcaagaagacggaatatggcgcctatctgaagcgtttgctgagcgagagctaa

SEQ ID NO: 100647 - DNA, 219 bp, Enterobacter aerogenes
atggcaagtaaaggtattgaaaaattagtctctgaggcatgtaaaaaaggatactctgtatttcgcaaaggagacaggatagagatttgtaaacctaacagaaaaatggtgcgtctggttattttacctgatggtacgggatacaggggagatgttgatctaacgctggcaaaagccatcagaacgcaaaagcaaatgaaagaggtgctaggcctctag

SEQ ID NO: 100648 - DNA, 273 bp, Enterobacter aerogenes
atgtcagctaactttaattgtcagattgtttctaccgaacagagtgaggcagttataactggcgaagatgccgttactactatcttggaacaactggaatcagcaggcatccaggtggaatcacaatgccgttctggttattgcggtgcatgtcgactcaagaaaaaatcgggtgatgtgaagtatgataatgacccgctggcttatgttgggcaggatgaaattttgccttgctgttgtcgaccttgtggcctcctggtactgtatatttaa

SEQ ID NO: 100649 - DNA, 312 bp, Enterobacter aerogenes
atgattcattcatttgaagaaaaaaatcttgagaagttatttacgagcgggaaatcgcagtcagggcttcctacggatattactaacagtcttaaaagagcccttaatgagttacacgctgcgggaagcgaagccgacctgatccgtcttaaaagccgtagctatgaaaaaatccaccatacgcggttacgcgaacgtgaaagggcgggcgatatgtcctctatccgcgtgtcttcaaaataccgcctgctgtttacgtgggccaatggtggggctaatcgggtcaaacttaccgctcatgcccatgcttaa

SEQ ID NO: 100650 - DNA, 318 bp, Enterobacter aerogenes
atgcaccatgtagcagagcatcctgaggaagaaatccgggctatcgagttatatacattgttgggccgggaaggcgtgcaggtgcgtctgaacagtctctctgttaaggctatatctcgttgggagcaggctctacctttgcctcctgattttacggggacaccatttgattttctaacggatgctgaacgcgaagaaaggcatcttttgttaatcggacagatgctctgcattgatgaacaggcagaggcccgcgagcgtatcaaacagcgtttagccagtcgtaggaaaggtagcagccagcaaagagctgactga

SEQ ID NO: 100651 - DNA, 390 bp, Enterobacter aerogenes
atgttagagaaaatttattaccttgccctttttctgattgcgatttgcattattcgcggtttcgttttcgcatggagcagacgcagtccattggccctgacgttgaccatcagtgccctggtgatttgtctggctttccatactctgaataactccgtagcaacaagtatggatcagatattgtccggtaccagggactttacacagtgtgacttcattgaccagcaatcagctgaaatcagcggtcgtggctatccggtcattgtcctaatgtgcgatgacggtcaacaggttgttaatgctgacgtttattcacgacagctgatgcagaatcaggattgcaacacgttcagggcggtgacaagttgtcacttactgccagaaaagtaa

SEQ ID NO: 100652 - DNA, 507 bp, Enterobacter aerogenes
atggtgccttttaatcctgttaatttgcttcaaattatgtcatctcacaagatggagacagatgatgtcgcgctaatcgccggtaccgattctgttgcagtggagtcctggttcaaggatggggtcgccagtgagacagcactgcacaacatcgcatgtgcggtcggggtatcgacggaatggattcggggctttgtctccggtaaggatgaaacccttaaggcaaacagtgaaggcctgacgaaagagttgcagaatcttccccctgaagaaatcgccgttctggcaaaaagcttcagtttgcgtttgaaagaaatcagcgaactcgataaccaccagcagagcccagccgggtcgatcgtctcacttaatgaggtttacaatagtgataccgaagagatccttgctacttatcggctactgcctgaaacagaaagacaaaatctatatcgtgtggtttgtttgagacacaaagaactagcacgactttacgaacaatatatttaa

SEQ ID NO: 100653 - DNA, 516 bp, Enterobacter aerogenes
gtgaaaggcgcacataaaaatctttccgtcgacggaaaaaattactgcatgaagcatctcgcgccttttacgtttatggctgaaatcgccaatattccaggccctgttcagataaccattagctacagtaatcatgtcttttccgatcagaaaggaaatggcccggcagtctcagcagatcgttttttctgtgcagacagatatgctgccagtctcaatttacccagaatgctcaccaccaacctcctggcatcctatattgttcctcatatcaacaagagcaacaatgagatgtaccattacatggaggttcatgactatgcgatcttctttgatctgcgcaaggacaacagtcatccgaacgggctgaagctctatgttgtgtcggcatatgaagtgaatcagtggggaaggcattctattccgaagaataagccagttaaattcgcctttgtcgcccaccttcgactgaacggacaaacctactacacatccagaaaagcaaaaaggcgctga

SEQ ID NO: 100654 - DNA, 933 bp, Enterobacter aerogenes
atggacaagcttagcgcgatcatcacgttcatcaatgttgctgatacgggtagtttcacgaaagccgcacagcgtatgagcctgccaaaagccagggtatcgcagcgtattaaggagctggaagctgaactcagcgtcaggcttttcgaacgctccacccgaaccgtacgtatcacagccgccggcgatgagtatctgaaagagtgccggggtttactcagcagcctttcccgcgtggaagaaaatttaaaaggtggcaagaatgccgtctcagggaagctggccatcgatgtgctttcccccttttctcgctgggtaataacaccttttatcaacgagtttattctccggtatccggatatccggcttaacatcagaagcagtgacagcctggtgaatgttattcaacagaatgtggatctcgttatccggggaggcgctcttgaagactcgagccttatcgtcaggccactttgtttaattcccttccagctctatgcctcaccgtgggtggcgcataatctgtcagggaaaaaaaggctcatggacgctgataaccagcagcttctctcctggtttacggatgatgaggctgaactcagatggacgctctgcagacggtcggagacacaagaaattcgcagcaacaaccatatgttcatcagtgaccaggatatggcccttcagattgccgctacgagccggagaatctgcccgggaatgtatctggctgcagaccgcttagtcaaaaaaggactgctcgtcccggtcctgtcagaatggacgctggcgccaaaacaggtttcaattttatatcccagcaaagcccacctgcccaaaaaggttgaagtgttcattgactggatgctggagaccgtcggtcgtatggatttttccagtgtgcactcaccaggtaacccttaccttggatga

SEQ ID NO: 100655 - DNA, 597 bp, Enterobacter aerogenes
atgtgctcatggtgttgggggattgcagattcgctaaaagcactacaggacttttgtcgcgagcggggatttcagtttgtactcaccaatggggggcttcgggcaggtggcggtgacgagtggaacgctgaattcaggaaatttctgaagaatgaatggcatcatatcaataacgtcactggtcagccattcagttatgcgctgctggatctggatgactttaattatgatacggaaccggcatgtcgcgctgtggtcagtgcttatctgatacgcccggaagtcaaattacagtttttccatgaaatacaaaaaaagttttacactgaatcagcagatccaaaagataaaaatttttatcaaagcgtttgtcataaaacgggtattgattatgccgaattcagagagatatttacctccgatctttctgccaatgaaacctgtaaagagttccgtattgtcagggagtatggtgtgaattctttcccgacaatactcattgaaaaaaatgccgtaatcaaaaaacttgtttcaggttatatcgatgaaaaaagcctgattgaaatggttaaagaagcagaagcaaaaatgtattaa

SEQ ID NO: 100656 - DNA, 825 bp, Enterobacter aerogenes
atgcctgaattaccggaagtggaaacgataagacgaagtctgaggcagcatcttatttcgcgaaaaatatctgatacccagatcagaaatccttccctgagatggcctgtatcagcagaactacctgataagctcaaaaaccagatcattgtcgatgtgctgcgtcgtggaaaagtagtgtccctgaagctcagcgacggatatctgctgattcatcccggcatgacaggaaaactgttgctcagggagttgacttacacgcctgaaaagcacgatcaccttgttattacgcttaatgactgcctgctggtttacaacgatgcccgacgtttcgggtacgctgagtgggcagtggagatgggaaaaacgtctgaacgctttcgccttaaaggccccgacccctatgagcctgattttacctttgactatatgaaaatgaagttaaacaggagcagaacggcaatcaaagcgactctgatgaatgataaggttttgttgggtttgggtaatatttacgccagcgagctcttatttcgggcaggcatccatccggaagaaataagctgccgcctgtctgatacgaaaattaatgatattttcaccaatattaagcccctgcttgatgaagcgatttctatgggtggcagcacactacgtgattatgttgacgcccggggccaaaaaggtaatttccagaaggcccatcaagtctataaccgagccggtctaccctgtaataattgccagagtgttgttgtcaaaacatccattgcgggacgaagtacgttctattgcccggcctgccaaccctcttttattgactga

SEQ ID NO: 100657 - DNA, 318 bp, Enterobacter aerogenes
ttgtattttattaataacctgcttttttctgtttttattgtcattttttgtatcggcgtactggcaaacctgacgggcccgaaaggtattgtcgactcctacaagcgatgggggttgccggggtggtttcgttttatcaccgctgcgtttgaagcgctggctgtagccctggtttttacgccttttaaactcattggttatgggcttgcgctcggtgtcatgggtggtgctgtcgtcatcctagttttcaataaagagttcagacccgtcattgcccccctgcttaccgccgcagtcatcatctttctgatgtcataa

SEQ ID NO: 100658 - DNA, 780 bp, Enterobacter aerogenes
atgtccctttccgcaattcagtccatcatcagtaattttaaatccgcagacatcaccgttgttgatttaacccatcagttaaatacgtctttccccacactaaccctgccggccgaatttggtcagacctgggccttcaaaaaagagaacatctcaaattacgatgaaaatggaccggcatggtactggaataacttttcctgtggcgagcataccggcacgcattttgatgcgcctgctcactggatcagcggtcgcgatcgtgaaaacaatacggtagataccatcgatgtcagcaacttcattggcgaagccgtggttatcgatgcggtggatgaggtgcgtcagaacagtaactgggtgctgacaaaagagtacctgcaacgctgggaagaacaacacggtctgatcccggacaatgcctgggtcctgttccgcagcggctggtctgaacgtattaatgaacccgagaattttgccaatctgattgatggcaaaccgcataccccgggccccgatcaggcctgcgtgcagtggatgatcgaggaaagaaacgtgcgggggtttggggtcgaaaccatcaatatcgatgccggattatcatatgactggcctatcccgtatccttgccacaatctgatgctgggatctggacggtttggtcttcagtgccttaacaacttgtcccggctgccggctcgtgatgttctgatcgttgcggcaccgctaaaaattgaagacggctcaggtagcccgctaagggtgctggccatctactga

SEQ ID NO: 100659 - DNA, 1599 bp, Enterobacter aerogenes
atgaaaactgtacagcaagcgacctacgacatccttcgtagtaatgatatgaatatcatcttcggaaacccgggctcgaacgagctgccgtttctgaaaaacttcccggaagatttcacctacgtactgggtctgcaggaggccgtcgttctcggtatcgccgatggatatgcccaggcctccggcaagcctgcgctggttaacctgcattccgcagctggcaccggcaacgcaatgggagcgctggccaatgcctggaactcccactctccgcttatcgttaccgccggtcagcagcaccgggcgatggtttctgttgagccttatctgactaatatcgacgccacgcagctgccgcgcccactggtcaaatggagctacgaaccctccaccgcgcaggaagtcccgtactccatcagccgtgctatccataccgcaatgtcggaagcaaaaggtcctgtctatgtatccgttccgtataatgactgggcgcagacagcggaagcacagagcaattccctgctcagccgtaaggtgaccagccgtcgtgctctggatgcgtcatccctgcaaaccatcaccgacgctatcagccgggctaaaaatcctgtaatggtgcttggcgcagacgtggatgcagacgacgcgaacgatgttgcggtgcagctggctgaaaaacttctctgcccggtctgggcagcgccgtccaccccacgctgtccgttccctaacaagcatcgcctgtttaagggccttctgacatcggggatcaactccatttcagagcagctgtctgcgcatgatttaattctggtcatcggggcgccggtcttccgctatcatcagtatgaagccggggagtacctgcccgctgacgctaaactcattcacatcacctgtgatattaacgaagcggcccgcgcgccagcaggagatgcctgggttgctgatatcaagccggccatgcttcagctgctggacagtgtggatgagaaagagggcgacgtaccggacttcagaaaatcaccggtccaggttaacctgacgtcccctatgcgcccggaaaccgtcttcgacaccctgaactgggctgcgccggacgactccattttcgtcaacgaatcaacgtccaccaccgcagccatgtgggagcgtctgagctttgaaagtcaggggagctactactatgcggccgcaggcggtcttggctttgccatgccggcaggcgtaggtattcagatggcccgcccggatcgccaggtgtttgtggtgatcggcgacggctcctccaactacagtattcaggccctgtggacagctgcgcagtacaacgtgccggtgattttcattgtgatgaaaaacgggacctacggtgcgctgcgctggttcgcctcggtgcttgagattggggatatcccggccttcgacgttccgtctattgattttaccaagattgctgaaggctatggcttgcaggcgtttacagccagcaaacctgaagaacttgagcgcgccattgccagcgcacgccagtcaggtaaaccggcactgatcgaggtggagacctggggcgcactgcacgacatgcaggccaagtaa

SEQ ID NO: 100660 - DNA, 900 bp, Enterobacter aerogenes
atggacatgaatctggttaaagttttcgtggcaatttatgagcaggagagtgtgtccggcgcagctgatatcctgaatattacccagccatcagtaagttatgccctgaagaaaatgcgcgatgaactgaatgatgagctgtttgtccgccagaataccggcatgaaacccacacgccaggcgatcgaaatctatcgcacattcagccaggccgttggtgatatagatgctgttgtcgcctcccgaaagtcatttgattgccggacttccagacacaagttcgttatagccatgtcagatctgggtgagcattattatcttccacaaattttcagggagataagcaaagtcgcgcccggggtggaaatagaaatactgccgctggaaatagcgaggttgcaggaatggctcgataagggctttgttgacgccgcgatatgtaaccggacatatgccgtgcataacgttcactgcgatatcctgcttaaggacagatatgtatgcctcaagggcaggtcgcacccgcgcgtgagggacagcctctcaatggcgcagtttcttaaggaaaagcacatcgtggcatcttcccaggccgggcataacttttatcaggagtggtatgccagtacggacaggaagctgattacggcactgaccgttcccgacctgaatattgttgcccctctggttgagtcttctgactgtatcagcgtcgtgccggaaacctacagcattcagcgggaagtgcatcatgccgttaacgcacttccgctgccgatagatttccccagtatagaggtgtgtctttacagccagaagacactgagaagcgggaaagaaaaactctggtttcttaaaaccctcagggacatttgtcttcagggcggtgcgagcggataa

SEQ ID NO: 100661 - DNA, 903 bp, Enterobacter aerogenes
atgacagaaagactgaagacgacgctggatcagtggatgaacctggtcgccatcagcgagaagggaagtgtgcaggctgcggcagagtccctcaataagagccataccaccgtgttgtattcagttaaaaagctggaaaatcagctggggacggcactggtcgaagttgtggggaaaaaaacgagactgacagcaggtgctgccatgctgcttcgcaaggcaggcagcatgctggagacggccaggcagcttgaaaaaatcagcagcctgctggctgagggctatgagtcgggcatcactgtttccgttgatcacctttgcgatcggcgatggatttatgccccactcacccggttttgcaccgggaatacgttaacgtctgtaaccctgcgagaaacctcgctcagctccacgcgccgtttcgttacagaaaaacgcgctgatattgcgatcattactttacctgtcgaaaacgttccttcctgtttttttggccacgtcaggatgcttcctgtcatctcttgcgggcatgaactcgccgggagaaaggaagttacccaggctgaactgatgaatacgacgcagattgtgctccgcgacctcgggaatgagaagagtactgcaggagaaaacgtgggctggctcaggacgcagcgcaggataactgtcgataattttgattatgcacttgaggccgtgaaatcaggtcttggtttttgtcggttaccggaacatatgattaaacggttcagtgacgccggcataagcatcctgaatgtccaggaaggatttgattatcaggtaccgctgcatatcacgcttccaaaaggggaagagaccgggcctgcggcacgggagctgtttcacctgctattacaggatgcctcgctgcgtagtaattaa

SEQ ID NO: 100662 - DNA, 309 bp, Enterobacter aerogenes
atgtcgaataaactgttacagctgcactttgattttcgtggtccatttggagcggagatgtcacgtcagctgatcgagctggcggaatccatcaaccatgaaccagggtttatctggaaaatatggaccgagaacgaagatcgtcaggaagccggcggcatctatatgtttcaggatgaagacatggcgctggcctatgtcgaaaagcattccgcccgcctgaaacaattcggtgtagatgatgttaaatttaatattttcgatgttaatgagcctttaacgatactgaatcacggtaaggcaggctga

SEQ ID NO: 100663 - DNA, 606 bp, Enterobacter aerogenes
atgaatgttatgaaacttaaagctgcgataagagttaaacgttacagttcatggcgcggacaacgtggtgaaactgtcgataatctccttcaacgaaactttaaggccagccgacctaatgaaaaatgggtcacagacgtcaccgaattcgccgttaacggccgaaaactctatctttctcccatcattgacctcttcaataacgaagtgatttcctacagtatttcagaacgcccaactatgccgatgatagacgacatgttgattaaggcatttgccagaatggatgccgaaagcaagccagttcttcactcagaccagggctggcaataccgccataggtggtatcagtatcagttgcgtgagtttggtgtactgcaaagtatgtcacgcaaaggaaactgcctggacaatgcctgtgcaggatgctttttcggaacgttaaagtcggaatgtttttacatccgaaaattcaatgatgttgatgaactgaaagttgcccttgaggattatatctattactacaatacccgccgtataagccttaaatttaacggactcagcccggttgaataccgcctacagacctatccactgcgaatttaa

SEQ ID NO: 100664 - DNA, 510 bp, Enterobacter aerogenes
atgtcaaaacgcaaatatcctttcgaagtgcgccttgcagtggttatgcactatttaactaccgacgaaggttaccggttaacatctgcacgttttaacatccccagaacacaggtgaggatgtggatagctgcctatgatgcctatggcgaagagggactcagacccaaatataaaggagtgtcagttgaccctgagatccgggttgccgctattaaagacgtgctggaagggaagatgtcctataatcaggtcgctattaaatataagatcgctggtcctggtgttatagctaagtggttgaaagttttcgacaagaatggatatgacggccttcgatctcttcgcgttgggaaaaaaagggagcttcatatgaaagaaacgcctgaagcggttgaggctgcaattgaacgctcaaaagcccagcgtatcaatgaacttgaaaagagagtcaagtatctggaattgaaggttttatacctaaaaaagttgaaagccttggttcggtaa

SEQ ID NO: 100665 - DNA, 186 bp, Enterobacter aerogenes; identical to SEQ ID NO: 23284

SEQ ID NO: 100666 - DNA, 849 bp, Enterobacter aerogenes
atgaaaagaacaatgtcagctgtactgacctgcactctccttgcaggatgcgcgacacaaccatcgagtccagaaaaccgtatgttcacaaaagaacacggtgtttactggcatgccgatcctcaaaagtcagttgcaacgaacgcatacgcacttgcaggtgtaccagtaaatgtagatgaggcagagaattcaggagggggagttgatgaaggtcttgcttcaaaaatgctcctgaacaccgccaccggtgtaataacaggcgggcttaaagctggaattgggatgtttacggcatcactatacagcgaggctgatgctgaatttctaatggttccacagagtgtggttttcgtttctaatcctcgcaatcttgcttatgacgacccatcacttataaaagaaggggctagaattgttatcgagtcaataaaggaccaacctaaaattttgggtgcaacttatgaaggccaaatcaacgccttgaatgcatgcacaatcacaaaatctataatgggaccttgggatagttgcgaacttaaatcaaaggtggaaaattcaggggatgtaggaagtgagttcttcaaataccaggttatccggccagcaactggtgatgaattagctcagctttcgttgccaaaaggtaattactcgataattcgatatactaatatttttagtaagaatgctacatttatgactaataactttccaggttttattctacagcctcaatcaaagaaaacagcacctggatttcctagtgtgacaattaataatcttgaatactattttgttaaaggtgatcttggtaaaaaaggatttcctcataagaaagtaatttaa

SEQ ID NO: 100667 - DNA, 177 bp, Enterobacter aerogenes
atgagcaattttactatctatactattggtgacatagatttcgtctataaagctattaacgggatcgcgttgatcttttccagtcatggttcaaatgagtggctcaggcttgcttcatatgctgcaacaattggcctgttttataaatccctgcggtgggtccttgcccccacataa

SEQ ID NO: 100668 - DNA, 462 bp, Enterobacter aerogenes
atgacgacgaatagcctgaagacggccagcgtccccatggtgacatcaaccggtctgcagtatgcatcctgtacagacgcctgggcggcgatgaaggcttcgttcgcatctccgcagggcgtatcgatcatgaaacatatagggcagatgaatcagattgttgaaccggctaaagaagaatccggacaagaaagtgactttctgcaaggtgtggcgaccatgctttttggaagagctggtcaggctcacaatatcaccaccggggcttttgccctcaaccaaatagataaaggtgtgctgcagtatcgcaagtcgttgggtatagcggctgactaccagcttttcgaggcgagcatgaaacgaaccaacgccatggtcagtcaggggcaactctggctgaacatttcaggcgctgcaatatctttcctggaaattctttcctggaaatgttcagctacttga

SEQ ID NO: 100669 - DNA, 363 bp, Enterobacter aerogenes
atgccggggcgcaatgttgcggctaaatcaggtctgaataaggcgatattagatcagggctggtacgagcttcgccgccagcttgagtataagcaatcatggttgggtgggcaggtactggctgtcaatccggcttacaccagccagaaatgtgcatgttgtggtcataggtcaaaggaaaaccgcaaatcacaagcgaattttgtttgtcttgaatgtggctacaaagagaacgccgacataaacggcgctcgtaatattttagcggcaggacatgccgttttagcctgtgaagtgaacggtgcatcaatgccgtcagcagcaggaaccaagcgactgagcaatcagttagccacccagtaa

SEQ ID NO: 100670 - DNA, 1182 bp, Enterobacter aerogenes
atgcaagaacaacagacggctcataaccgtaaagtaataaagcccatttctgattttttcagcccacccgttgcaggtggtattgtcctgataatgttctctctggccgccattatcgtggcgaattcgtcgctttccgaaggatatgaatcgcttctgaaacacaaagtggttggtctttccgtagagcactgggtgaacgacgccctgatggctgttttctttatgatggtcgggctggagattaagcgtgaacttatcaccggtcagcttgctacctggagtcagcgttctctgccgggatttgccgctttgggcggaatggctgtgcctgccctcatttatgtcggatttaatgcaggcaatgaagaaacactatccggctgggctatccccgccgccaccgatatagcttttgcgctaggtgtgctggcgatgctgggcagccgcgttccagcctcgctgaaaatattcctgtcggcactggcgattcttgacgatatgggtgtagtggtcatcatcgcacttttctataccagtgacatttcgctgttgatgctaggtggcgcggctgcgatggtagccctgttatttattctgaaccgtgccggcgtgacccggcttctgccttacctgctgacaggcggtatactttggtttttcatgcttaagtcaggtgttcatgccactatcgcgggtatcctgctggcgttctttatccctctacgctttcgggatagcgatggaattgtgccgctggaccgacttgagcacgccattaatccctgggtgacgttcataatattgccgttgtttggctttgccaacgctggcgtggcactttctggtttaacaatggatgacctgctgtcaccagtgccggtcggtgtggcgctgggcctgtttctaggcaagcaggcgggcatttttggcttctcgcttctggccgttatttcgggtctggcgaaacgaccagcgaacagcagctggctgcaggtctacggcgtgacgatactatgcggtattggttttaccatgagtttgtttattggcaatctggcattctcaggaagcccgttgttgattgacgaggttaaggtcggtgttctggcaggctcagtactgacagcgttgatgggtattcttatacttcggtttgctccgcgcaaagcaaccagatag

SEQ ID NO: 100671 - DNA, 165 bp, Enterobacter aerogenes
atgaaagctcacgtttttgttatttctatgcttactcgcattgtcgtcacctatgcggtgttactccttggttgcttcttcaccggtaaaacgctaccgaccgttggtgttgtcttgtgtcacttgtcgcgggggcttctgctcagcagctgtcgagggtattaa

SEQ ID NO: 100672 - DNA, 795 bp, Enterobacter aerogenes
gtgcgctggggcagtgaagtgtatcaggctcttcgccaggttcttcttgagaagaggctgtcgaccggtgtgggggatgaaggcggttttgcaccggctgtttcgtcaaatcgcgagccgctggagctgattgtgctggccattgggaaagccgggtaccgccccagtgaagacattgttatctgcatgcatccggcctccagtgagttttaccgggacggcaaatatcatctgcacacagaaaataccgagcttacctcacaggaaatgactaactactatcaaacgttggtgaaaaactttccgattgccctgatcgaagacggactcgctgaggatgactggacgggatggaaaattctgcatgatacgctaggggcacagatggaactggtcggggacgatctgtttgtgaccaatgtgaaatatatccagcgtggtatcgacgataatcttgccaacaccgcattgatcaaactcaaccagattggttccctgagtgaaacctttgatgcggttcaactctgtcatgacaataactggagggcatttatttcgcaccgtagcgttgaaacggtggacagctttattgccgatatgacagtagccatgcgtgccggtcatcttaagacaggggtaccgtgtcggggggagcgtatcgaaaaatacaaccagctcatgagaattgaggatgagctggactcatcggcgcaatttgccggaaagtctgcctttaaatggttttatcgtgtcaatagccccggctcacacgtcggggttattcagggcgtatga

SEQ ID NO: 100673 - DNA, 1428 bp, Enterobacter aerogenes
atgtttagtaataaaactcagcaagttagcttggcagtagcattactattcgctctatgtagtatgagtaatgctacgacgactagccagtcactatcagcacaacacttggaagtgcaggcaaatgagccgttttccgcacatattctggtcagcggtttggatgcgccttgggatatggtatgggggcctgacgggtatttatgggtaactgagcgtaaagctgcgtctattgttcgtatcgatccggaaactggtgagaaaaatgtagcaattacgataagtagcgtccatacgggcccacaacatgaaggtgttcttggcttagcattatcaccaaactttatgaaagccggcggcgataaatatgtttataccgcgtatacctatatgaatggccaagaagagtacgcgaaaattgttcgtttagaatataacccaaaaacaaaaaaactgggtaatgaaaaagaaattctagcaggtttcccggcagggaatgaccataatggggggcgtctacgtttcggaccggatggtaaactctattatacaattggcgaacagggacataaccagggtgcgaatttctgtaaacctattgaagcacaacgcattccaacgaaagttgagctagaaaataaaaattactccgcttatgctggtaaagttctacgtattaatactgatggatcgattccagaagataacccaactatccatggtattaaaagtcacctattcacctatggtcatcgtaatccacaaggtctagtctttgtagataatatcctctattcatctgagcaaggcccttcttctgatgatgaactaaacattctagaagcaggtggaaactatggttggcctcacgtggcgggctttcaggatgatcaagcgtatgtctatgctaactattcaaaggctgaaaactgcccgttgataaaatgggatccgaaccatataccgacaggggtcccattacaaaaagaaactgattggaaagctgccgactttaaagcgccagttaaaaccttcttcacagttagagaaggttacccctataacgatgccagttgtggcatggactctgcctacatctgttggccgactgttgcaccatcaagcgtagcgtactacccggctgatggtgtgattaaaagttggcgtaattccattatcatcagctcaatgaaaaatggtgcgctctatcgtgtactgttgaatcacgacaagaaagatgttcagggtgacgtaacgaaatatttccacacagctaaccgctaccgcatggttctcgtcagcccggatagtcgcaaaatctatgtcgctacagataactttggtaatgtgatggatgagtctaaccatcctacacataatctaagtaaccctggctcaattatcgtcttcgagtatacgggtaagtaa

SEQ ID NO: 100674 - DNA, 1122 bp, Enterobacter aerogenes
atgttagtaagatctcaatattttttaataagtgtaattctatttttatgctttccagcttatgctataaccattcttgtaggtcctgggaagggaattgtgtggtcaggaagtccttatagttttggtgtgacagggacacacggaaataccatgcattcttattcactaggacttggcgcattatattctggtggttcttgcgtttcctcttcattctatgaagctctacctgagggattttcaggttataaggttactactggcatctacgtcataccaagagcccgtgtaaatgggcaattatactatggaccaaaaaaaaatgacccaactagtgccattaatcatattatatcaggtaccatgggttatcctgaaactaaagtaacagatcagaatggaacgccatgggaagtaacttcatcatggtgtactaagttatcagacgtatatcctgtactcggtaaaaataaagaactaaatatcagtggtgactggattgtgtatgctacaggagatcaaataccatcaacaacgatatataagcttagtagtaacttatcgggtctcatacgaacaatatttacaccacagttaggcttcgaatctgataaaggtgaagatcacctgaacccattgttattgtctgatatatctgtcagagtaattggtgtacaatgtagcattaacacacagataaatgttaactttggtgaagttctttacaacgcaaaccttaatgccgagttagcctcagttacatcacccttttccgtcagctgtaaacaaggttctgatcctgtaactgtaaacataaatgcctcctttagggctaatacaggatattataaaggtgatgctacacaattagctttatctgaaggaggtggttatattacaggagagattggtaagggggtaaccggcagtggcgcctgtgtttcacatccttcatctctcagctttgctcaggtacctgttaagttaaccacccttcagtcgactgctcccagtattgatgataataatacaataacttggcgtctctgctcaggaggttcagagctacctgttggtaatatacacgcaagtactgaactcagcattgtattcagctga

SEQ ID NO: 100675 - DNA, 2097 bp, Enterobacter aerogenes
atggatattgctgctgccggaaccattaatcctgaattactggatactggtattccaggacttatgcttaactataacgttaacacaaatcgaacctggaataaaaaaagttctcctaactctaatctttttagcggcatcaacggtggcctaaatcttggagcatggcgtttgcggagtaattatacatacaaccgtaatgaaggaagtacatatagttacagtagttcagattttaacggcactcatttgaagaggacattggtaccttttaaatcggaattatcaatcggagaagttaacacttctgccgatgtttttgatacctttccggccagggccgttatggtaaactctcttgagcaaatgaagccttatagtttacgtggttttgctcctgtcatatctggtaatgctgatactaatgccagagtcacagttatgcaaaataataatattgtttatcagacatacgtctcccctggtccatttgtaatcaatgacttatatcagactgcaattggagccgacctgacggtagttattaaagaggcagatgggcgggtaaggacacagcagattgcatactcatctttacctaatatgttacgacagggggcttataaatatcagctggttgctggtaattataataatcataacagtatgcatacagactcttctcgctttgttcagggtacattaacttatgggcttcccatggatactaccctgtatggaggtttgatggtctctaaaaaatattattcaggtgttttaggcgcaggtatatctatgggtaatttcggggctctttctactgatatcactcagtcgcatataccaaaagaatcaggaaatacatcgttgtctggtcaatcatatagactgcgttattccaaaagtattatggaaacaggtacatctgttgaccttacggcatatcgttattctactaaaaactattataactttacagattataaccgtagaatgcatttatctgattctcaagaatatccttggatatcgaaaagacgtcgaagtagctttcagactagaatctctcaagactttaatgaaattggaatgctctcgctgtctgccagtcgagatgattactggggaagtagtatggtaaataacaacctctctgccagttacaattttacattacacagaataaattttggcgttagctataacattgagcgtataaaaagtaataacaactggcccgagaaccgtactttttatataaacgtacaaattccattcaacttttttgaccgtgatagtataaacagcgcgtatgctacctatatgttatcaaaggataatcatggaagagtacagcagcaaacaagctatagtggaacaatgttagatagtcggctctctttttcagcacagcagacatggagtaatagtaaaaatgatcattcaaccacaggacttaatttaagctatcagggaagcaaggggctaggtagcttgggatatagccaaaatacagaatggcgatcacttaatgctagtctaaatggaggaattattgctcattccggcggtatcactttttcccaagcgcttggcagttcggttgcactggttcatgctccagaagctgtcaatactcggatattaaatggtaacgtaaatactgactcttcgggttatgctgtagttccttatcttgctgattttcagaagaatagtattacactggaccctactactttgccagataatgtagaggtccataagaacacactaaatgtttatcctataaaggactctattgtgcgggccgagtttaaaacacgagcaggttaccaggcgattttcaatattatcgacaaggaagggaaatatattccatttggctctactgtttcagttcttaaagataataacaatgataatagtatgtttattgtaggggacaaaggccaggcatatattagtggacttcctgtgaagggttcattgctaattagatggggcaataatacaataaattcttgtaaagctaattataacttagcaagcagtaacaaaagtaatattatcaaccaatcactgacttgccgatag

SEQ ID NO: 100676 - DNA, 1197 bp, Enterobacter aerogenes
atggtcacccagggagaaaggtgggaactgggccttggagccgaccaaaaactatatgtgaacgttaacaacgttaaagcagtcgctggtttcgataaagctacattacaggttattaatcccgataatagcgtctattccattactgctatggactatgatagcgggtcttcctccctgtctgctgcatggactttagggaatcggaaaaaggcctcctggatgcctacatcaaatgctgatgtagagtatcgtttccgggttacactctttgacaaagcaggctcccgaaaagtattaccggaacagaaatttgtatttgatgaccaactgggtgaatacactcttattgctatacgggaccccgaagcgcaaacaagcgttgttccagggttcacttcgggttatatagcttataaagcgggtatgacagttaatcaaaacccgattaccttaatctatcgtatccccatcaacaatgtaaggaaatacaacaaagctggtttaagttttggctctatcatttcagaagctaacggttacgcctatgtggcggcaacaacagcatataacaacaggtacgatatacataacgggtaccaatggggcggcgctactgcaaactataaccttaaactgggtcccgacacgcctgtcggaccggaaatgcctagtagcgtttggctcacgacggacacaaaaggtgaaattaattcttttaactatttatggaaaacaagtgatctaccggtgaaatttatttcagcgaggatccgtgcttctgcgagaaattatatccaaagagcatttacaggtaacctggaaatctgtcaaatccaaccaggtgagactgagtgcagcgggccggtaccgtggtcaattgctaaaagtggcaatggaggcgtgacatattcttttaaaatgtataatgaggacaagacactttcatcaattaatcaggaaaggaggaactactggaacacaaaccttctaccgaggataaagggatatgactatcaggaagataagaaaaaagtacttttatttgttacccaacccggtaatggtaccttcagagatcaacttcagcttaagtccgctgaactgattgatgctaattcaggtatgcaggtgctgaatggagccaaaatactgagagatcccctcataatttccccaaagcgtaaccatgtgtga

SEQ ID NO: 100677 - DNA, 882 bp, Enterobacter aerogenes
atggatagcgcacgcgcccttgttgccaaaggacggggaatagccctggtcagccgcaccatgggcgtgtcgcgtgcgcagctgtcactgcggattaaccgttctgccgactggcaggacaggcgctgtaaccggcgtaatgacgaagcagacgaagaaatactgtcggctatcctcgacatcatcagcgatatgccgagttatggttatcgacgcgtgtggggcatcctgcgcaagcaacgtcgcacagagggacagccacctgtgaacgccaaacggctttacaggataatgagcgagcataacctgttgttgttgcatgacaaaccagagcgaccgaagcgtgaacataagggcaagatagcggtggcagaaagcgatatgcgctggtgttcagatggcttcgagttcggctgcgacaacggcgaaaaactgcgggtaacgttcgcgctggactgctgcgaccgtgaggccatagactgggcagcaagcacggtaggctatgacagttcgaccgtgcaggatgtgatgctgaggtcggtggaaaagcgcttcggcgacaggctgccggaaacaccagtgcagtggctgacggacaacggttcagcatataccgcgcatgaaacgcggaggttcgccaaagagctgaatctggagccatgtacaacagcggtgagcagcccgcagagcaatggcatggccgaacggttcgtgaagacgatgaaggaagactatatcgcgttcatgccaaaaccggatgtgagaacagccctgcgaaaccttgcagcagcgttcacgcattacaatgaaaaccacccgcacagcgcgctgggatatcactccccgagggaataccggcggcagcggacatcgttaacttaa

SEQ ID NO: 100678 - DNA, 396 bp, Enterobacter aerogenes
atgtctaacactaacgccaattttgagatgaccgggatcctgttagggcaagaagcccgtaaacgtaaaactcctcaggagaagatcgccattatccagcagacgatggagccgggcatgaatgtctcccatgtcgcccgcctgcatggtatccagcccagcctgctgtttaagtggaagaagcaatatcaggaaggcagcctcaccgccgttgcggccggagaggaagtcgttcctgcttctgagcttactgctgctctgaagcaggtccgggaacttcagcgccttctgggcaagaagacgatggaagttgagatcctgaaagaagccgtggagtacggccagtcgcgaaaatggatagcgcacgcgcccttgttgccaaaggacggggaatag

SEQ ID NO: 100679 - DNA, 465 bp, Enterobacter aerogenes
atgttgattaacaataaagttaaaaaagaaataaaggcaaaaagaaagaaggcgtccaaaatattttggacgtgcaattacatcgaaaagaaatatctagaacctattgtactagccctactttggttatctgggataccattgctggcatatcttaagctatccccgcaatgttcacctttgacagcattgctgatatacggatttgggattattacagtactttctgtatggttctatttggatcttcctaaaagctggattgatttacttgaccgtcaaattttgaagtaccgatcagatacatcattcattgatgtactcaaaaatgtgcacactgaagactttattgaccatggcaagataatagtaccaattctcgacattaaatattgggctgttagccaagaatgccaactgaatagactgcttaggaaagaaaatagcgtcaaaatcaaaaaatag

SEQ ID NO: 100680 - DNA, 228 bp, Enterobacter aerogenes; identical to SEQ ID NO: 7358

SEQ ID NO: 100681 - DNA, 861 bp, Enterobacter aerogenes
atggttgacaatgtttttaagaaaaaattggcatcaattaagaacgaacatgtgtcggtgttagatagttacaaagtaagaccatttaaagaaactcatagcgacacagcctgtattgtgcgtattatcgaaatctattcactgaataagctgcgtgctaaaggtgaaaagctgtattcacttacggggttaacagtacctgatacggaagctgtggcgaatgagatcaacctgctcctaagccgttatgcccagttgtgtcgtcaggaagaggaagagttatctttccggcagcgtgaagtgacaaatgcggaagttgcatggaaaagcacattctcaaaaaacggcgtcagtagcattgctgaagccaaaacgaataaaacggggcatgctgaacgagcggatgctgaacggtgttaccatctggctgtttcccggctgaatgagcaacatagccgactgagcacgatcaagcttttaccgggcgtactggccgatgaagtgaactacattggtaagggagtcgagaagcgtttactgaacatatttcctcaatccggccagatccctgctgattttatttctgtatttaatgacggtgacgttgtccgtgatattaaatttattacagacgcactcaaatctttgtctgattccgtgaatgaaattattagccgttgtagcgttccaactgatcgttatgtattaaataacggtggaatggcaagagctatggcttacagggagtactatcgagcagataattatgtattacgttcagtcgtaagtgaccgggattatgttgagcatgtaatgaaatacaatcgggttactgagtacaaaaataaaatcttttcttaa

SEQ ID NO: 100682 - DNA, 1005 bp, Enterobacter aerogenes
atgtatgccttcaaaactgaaaggccggacgcagcacgtcgttatcataataaattcgttactggcactaactatcaggaggaatcaaaaagacgctttgcattaagcgaacccactgaaaatatactgcgtacgtcaattctggaatccgggtggcttattaaaaatatcacgctacgtgatgttaacgccgtgtcaggtaatgcagtcaatattggtgccagtgaactgcataccggacgtgtggatggtggccgtttccacaaaaaaatggcaatcaatggtacggagttctttctgacagagacggatacctgcgcccggatcagctattccgatatgtctcatatttaccataccggcgtgccggatgggtttgagaaaacggttgagagcttttttgcccaggcatatgcgctggacatgctgcgggtcggtttcaatggtgtgtcgattgcaaatactacaaacccggaaatcaataaaaaaggcgaggatgtcaatattggctggcatgcactggcgaaagcctacgggaacggaaagcaaatcatctctgagcctgtcacgctgggagagactggcacctggaaaaatattgatgcgatggccaaccatctgattactgagcttattgctgagcagtttcgtgaagatccccgtctggttgttctggttggggcagagctggcagcacatcaacgcctgaagttatttaatgccgcagaccgcccggctgatgtgaatgctgcacagatggctacaagttctgttgctggccgctttgcgtttattcccccgtttatgccgggtaagcgtctggcagtaacgacgctgaataatctgcatatttacactcaggcgataacacggtggtttcgtgctgagtttgatgatgaaaacagtgaatacgtacattcctacctgcgcaatgaaggctatgcactcggtgaacctgaactgtacgcggctgttgatgagagcgccctgacgtttgctgattga

SEQ ID NO: 100683 - DNA, 591 bp, Enterobacter aerogenes
atgccagcgttaattaatccaggcaatgttcagttttcggttataaatttcttgcctcaccaggaatgcgcgggatatagtttaaaggttgccgcaaaatcggcagccgggcgtaggaacccgtgtaatctaacggcgacacaacacgcgccaggcgtgtttttttgtgtcgtagctttgactcacctaaaatttatggtgtggtggctgactgcatgtttttattttttacgccacatcatcagaattatggtagtccaggcggggcagctttcgggctggccggtatccgttagagccggtattcctacccccgtctgggctaccacccatgagcgtaggaactccggtggtagcgttacccgctatctaacggaggttgccattatggctacagtccctgctttatctcaccctgaatttatctttgtctttctggctgttcgccgtacagaccgtgatgcccgtccacgtcctgtgcgtgtaatcgcagactgcgagcatgctgcacgccttaaacttgccactgaatttatcctgagctttgctgcccacatccctgtgaaaagtgccggggaggtggttgcatga

SEQ ID NO: 100684 - DNA, 237 bp, Enterobacter aerogenes
atgaaatccatgaattttaagcaaggctgcatattgagcgaactgggtgagagtcgtctgttacgggcggcactggccagtgagtttcttgcagaggtcctgtccgttcccacagtgaatggagcgagaactgtttcagcggaaggcgctgcggctttagtggcctgtattgccgaacaacttgatggcgttgttaaggaaaccagcacaattaagggagagatgcgcgatgaataa

SEQ ID NO: 100685 - DNA, 411 bp, Enterobacter aerogenes
atgaataataatcaaaatttaaaggcgcatgctttacgaacagcagtcttacggtactacattgctgatgcattcatttccttaatggagcgtgttcataatgaacctgtttatattgaagatggcgaacgaatagaactcacccacgaaaaagtggtgagcaatattatttaccatattgaaatgccgtgggtgaatgagtttggggctgatgctggttgcatactggccgcagagaaactggaaaaaatgcttaaaccgggctttatgtcagaaaatattcgcctgtcagtttttggtgtcacagagatgcgtgaggtttaccgggatattattttcggtgcacctgatggcgaactacccgaaggttttgaatttgtgaagccggaaggtcaggaggtgctgctgtga

SEQ ID NO: 100686 - DNA, 2688 bp, Enterobacter aerogenes
gtgaaaacactgtctgtatccactatttccggggctgcgattgggcgctggccttatatcctgtcagcattaggtatcaaagtaccgtccgcaggacatcatggggcttgccctgcctgtggtggcaaagatcgctttcgactggacgataaagcggggcgtgggacgtggttttgtaatcagtgcggtcatggcgatggtcttgatctggttcgtctggtgacaggaagaaagataaaagaagccgccgggatggtatctgaggcgcttgcattaccagaaatacaggagaagcccgctttgcccgccaggaaaaaggccacaggaaaagaagcgggtgcggagcgatataccagactcagacagcagtcctgcaatggtgagccggtctatctgacaaacaagggcttacacgggtattcacttcccttgctgtcacaacctttgaatctggccggaataacattttcctccggttcattactgctgccgttgacggatatttccgggaatattaccggtggtcagcttatcaatcctgacggggataaaagtctgctgcccggtagccagctgtctggcgcattcattgccctgaccgatatacccgctgaaacacctgaacaggtgattatcactgagggttttgccacggcgcttaccgtcagtctgctgactgaaggatggatcgtggcggctgtcgctgccaccaatttactgaaggtgacggagcagatccgaaaacgctggccggaaacccggatcattctggccggagataatgatctggctgacgggaaagaaaacaccgggcgtattcaggcagagaaagccgccaaagcggtggatggctgggtaacgctccctccggtacgccataaggctgactgggatgactatcggcaggaagtggggaaagaacgggcgagagatgcctttcgtgaagaaatgacgctgcatggcaaagggcagacccgtttaccagaagggttccggctgacaaaagaatatttgtggtacgacaagctggttaataagtctgatggtgatacggagatacgcaatatcaaaatttgcagcccgttgcgggtgacggcaatcaccagtgatgctgatgggagtaattacgggcgtttgctggaatgggaagataccaacggaaacagccgtaaatgggcaatgccgatggagatgctgggtggcagcggggaagaactgcgccgcgttctgctggttaacgggctttcttacatcaacattaacggtatggccagagcattcctgatggaatatatctcgctgtgtaaaccggacagaaaagttacctgtgtaaataaaacgggctggcacggcggggtttacgttctccaggatgaagtgatagggcgcgaagcccagtcagtcatcttacaaacatcgagcgtgcaggggcgtgattttcgtgtcagcggtacatcagaggaatggcgtgaaaatcttggccgttactgcataaagaatgcccgtctggcctttgcggtgagcctggcatttgctgccccccttctgaaactggttggtatcggcggtggaggttatcacctcaaaggggaatcgacggacggcaaaaccacgacgatgaaagtggctgcatcagtatgtggtggaacagatttctggcatacgtggcgggcgacggggaatgccttagaaggaacggcgagccgccgcaatgatgccacgctgatgctggatgaaatccgggaggttgacggcagggaggcggggaatatcgcttatatgctggctaacgggcagggcaaagccagagccagaacagatggttctgtaagggaaaccaaccgctggaatctgttgtttctgtccaccggggaactgtcactggtagaacatgcggcaagcgccggggaacgtacgtatgccggggttgaggtcagaatgatccagatcccaagcgattcgggcaagtatggcgtgtttgaagaacttcatggcttcagtagcgggaaaaccctggctgagcatcttgagcagcatgtagcgcattatcatggtgcaccattccgcgactggctgcattgcctgaccgctgatctgccggaactgaccagccaggcgaaagccttattgaaagagtacacccggaggctgacgccggaaaatgccgggaatcaggttggccgggctgttacccgttttgctctggttgctatggccggggagctggccacaaaagcgggcatcacaggatggccggagggagaggcctttcgtgccgctcaaagttgtctggctgcatggatggctgaccggggccatacagctaatcaggaagataaagcggcacttgaacaggtacgggacttcatgacgcgtaatcagttcagtcggtttgctgactggaatgacgacaggaaccggcctgtttcaatgatgggattcagaaaagtcgataaaggagacaacgtgacagagccggttgtgacgttctacgttctcccgtcaggctggaaggagatctgtaagggatttgattcgcgtaaggtggccaggttgtgtgtggacgcgggctggctgaaacccggtgaagatggccggacgcaaaacagcattcgcctgccagaaatagggcttaaacgtgtgtaccagttcaatacacaggtactgggaagcgccgaacctgagtaa

SEQ ID NO: 100687 - DNA, 273 bp, Enterobacter aerogenes
atgaagatgatgagaatgtactgccccacatgtcaggcagtagcgcggataggtaaaacaaacaggaaacacccacaactgtacgatgtgtactgctattgctctaatgtggagtgcggtcactcgtttgtgatgaatgttgctttctcccattccgttagtccaagcgcgctgaacgggcaggggagggttaaagagctaattgatgcaattccacccgaggaacgggaaaaggctttaaagttgctgctggctgcgcaaaagaatgggtaa

SEQ ID NO: 100688 - DNA, 1185 bp, Enterobacter aerogenes
atggttgcccgtaatcctataaaaaaacctggtgcacaatctctcagatctttgcaatctttaagttcttgcttggatattacgttagcagatttaaaaactgctattgcaatgccttcccaccaaagatacaagaaaaagcaagtaaaaaaaataaatggtgaacttagagatgtttatgatccacaccagctaataaggcgtattcaaaaaaggataaacaataggatctttaaagagctgatattatggccagattacatttatggctcagttccaaccaataaagatgagaaaaaaaaaggaattgagcggcattatatcgcttgtgcccgtaagcactgtaatgcaaaaacaatacttaaagtagatatcaaaaatttttttgataatattcatagagatatagtatatagtatattttctaaggttttaaaatttaaaggcgaagcattagagtacttaactgatatatgctgttatgacgacactattgttcagggcgctttgacctctagttatatagcatcgttatgtctttttgatgttgaatctgacattgtaaatagagcagaaaggaagaaattagtctatacgagactggtagatgatattacagtttcatcaaaattagttaactacaatatgaatcagattttagatcatattaaagatatgcttgctggtaaagatttacctataaatgaagataaaactcaagtacacaatatatcaactgaatcattaaaagtacatgggttacgaatctcatttaatgaaccacgcttaccttctgatgaggtcggacgtattcgagcgtctgtgcataatttagaaaaactggcaaagaaaaataactcaataacaagtgtagcctataggatagagtataatagatgtgttgggcgcgtgaacaaattaggtaggcttaatcacaataaatataaggtgctatcattaagactaaaagatattcagcctaaggcagcaaaaagagatattgttaaaattgatagggctattaaatttttagagaactcctataaaggtgggaactctaaaaaagattattacaagaaaaaatatgatcttacactatataatcttattattttaagaagaactcccggttttttattgattgaaaaaggattcagagatcgtcttcaaaaggttaaatactga

SEQ ID NO: 100689 - DNA, 252 bp, Enterobacter aerogenes
atgaataaatacagtgaattggagataatagaattaattcgcactaatattgcagaagaaatcaagatgaaaaaggaaaatatcgatatcaacttacctatctcgaaattagaaatggattcacttgctgttactgcactttgtgtcaatctggagaaactactaaatactcccgtaaaaccatatatcgcctgggactatcctactatagcgaaaatggcagcatttcttgccactcagccttctggttaa

SEQ ID NO: 100690 - DNA, 816 bp, Enterobacter aerogenes
atgccaatggcatatatctcaggcagcagtatgtactaccttgaccggggtcagggtattccaattgttttgctgcacggtttcttgggaaatgcatttatgtgggcgcctcaaattgcagcatttgaagatgaatttcggttaatagcccccgacatttgggggcacggcaattctggcgagttaccggatggcacaagtaatttaaccatagtcgctcaccaggtgctgacgttgctcgatagcctggcagttgaaaaattcattctggctggccattctgtcggcggtatgctggcaggagaaatagcagtaaaggtaccggatagggtgattggcctagctttgattgatacacatctggggcaggaaccccctcagactagagaatattttctgaatttaatctcggttctggaagaacataagtatttcacctccactcttatagaggaacttcaggggcttttttttgcatcacacggtaataacattgccagacttaaaagtgccttccacaacgatttgagtaaattgccaagaggcaggattgtcacaagtatggtgcctcttggacgcatgatatttaatcgtcgggacatggctaccgagctttcactgattaatgcagcatccacgcttgttgtttgtgggcagcatgacgtcgtgaggctacctgctgaggcacaggcgatggcagcactaattggttgtcattatgtagaagtaccttgtgctgcacataccccaaatcttgagaacgcagaatttttcacagaaatattaactgaatttatctatcagataattaattaa

SEQ ID NO: 100691 - DNA, 1311 bp, Enterobacter aerogenes
atggtgagagaaaacgtcaggcgaaattcagttgctatcatcggcatgagttgccagtttcctggagcaagagatgcttcctcattttgggagctaataaaagccaataaaccggtcattgggttgccccccgaaagcaggacagagctacatagccatgcacgagcctttaatattcaggtaaaaggtggctacattgaaaattacgaagacttcgatgctggtcgttttcatatcccagagcacgatgccacaatgatggatcctcaacaaaaattagtgctcacaaatgtatgcaacgctattgaggatgctggcctaaatatcaatgatttaaaaggtgacaggacaggtgtatttgtcggagcaatggccaatgacttggcatatcttaaattttcaaatgttgcacaatcaaatgtctccacagtcatcggaaatggattatgcatgattgccaatcgtgtatcttatgaactggattttggcggccccagtatgactgtcgatagtgcttgttcttctgcattagtggcactacatcaggcgttacacgcattgcacaacgatgaatgcgactatgcgctcgtagccggggtaaatattatcctttccgggctgctgcaaaagttctataccgatgcaggcgtcggcgcaatagatggtcgttgtcagtctttcagtaatacagcgtccggtattgggcgtgcagaaggcgtgggcgtgatattacttcagaagttaccacctgataatatatcaacaataacagatagttatggttgtaaggtgccacgccagatatatgccgctatcaacggcagctgcgtcaataatgggggacaaagcagccgctttaccgcaccaaatcaactcgctcagattgcattgttgcaaagggcctataaagatgcacagattggtgctgaggaaattaagtatattgagggacatgggacaggaacaagacaaggagattatatagaaataaatgcgttaaagaaagtattcaaagatcaaacctccccttgcttcttgggttctgtcaaaagcctgattggtcatactgaggcggcatcaggcatggctggtctgataaaaattgctctcatgctttattataaccatatcccccctagtttatacgctgataccccatcagatatgctggatacagaatcacctgtacaactcgttcagaatgcacacacactatgggaacatcgattccagaaacattatatgggtgtaagctcatttgggctgggagggaccaacgcccatactgttctttcaagcgtagcaaggtga

SEQ ID NO: 100692 - DNA, 564 bp, Enterobacter aerogenes
atgacctcaaagtatgcaaagcacacaccgctgtatcgccagtctgaaatatatagccaccagggcgtagatctgagccgctcacttctgtcaggctgggtggattcgtgctaccggttactgtcacagctggaagaggcgcttcgggactatgtgctgactgacggcaagctccatgctgatgacacgcctggcccggtgctgttgccaggtaataagaaaacgaagaccgggcggttgtggacctacgttcgtgacgaccgtaacgccgggtcagagctggcgccggcggtatggttcgcttacagcccggacagaaaaggtatccatccacagacgcatcttgccggcttcaacggtgtgctgcaggcggatgcgtacgccgggttcaacgagctgtaccgcaatggccggataacggaagccgcctgctggtctcacgcccgccggaagatccacgatctgcacgtccgcaccccgccagccctgacggaagaagccctgaggcagatcggtcagttgtactccatagaggggaatgcaggtagagcagcggcttgctga

SEQ ID NO: 100693 - DNA, 312 bp, Enterobacter aerogenes
atgcaggtagagcagcggcttgctgaacgtcagcagaaagcgaaaccgaaaccgctgttgaaatccctggaaagctggctgcgtgaaaagatgaaaaccctgtcgcgacactcggtgctgacaaaagcgttcgcgtacgcacttaaccagtggccggcactgacgtactatgtggaagatggctgggctgaagcagacaacaacatcgctgaaaatgccctgcggacggtcagtttgggtcgtaaaaacttcttgttcttcggttctgaccatggtggtgagcgggcagcactgcagtacagcctgatctga

SEQ ID NO: 100694 - DNA, 444 bp, Enterobacter aerogenes
atgaaaatttatcaggctcagccacaagacatagaaaagattcttcctttgtttatagcgtatcatgacttctataatgttgattctaataaagaagaggcatttcagtatctgctaaatagagtcaaactcggcgaatccgttatttattatattgaagatgataatgaagttgtaggttttacacaattgtacccccttttctgttcacttgaaatgaaacgtatttggttgctttatgatctatttgtaaaagcagaatatagaaagaaaggtattgctaaggcacttattcaacgagcagaacaacttgccgtggagtcaaactcagcatttattatgcttagtactggtatagataatttaaaagcacaatctctctatgagaaaaatggatttgttagagataatgatttttatgtttataacaaaattattgcttaa

SEQ ID NO: 100695 - DNA, 129 bp, Enterobacter aerogenes
atgaccgctcatgcagcggagtttttcactttgaatgaagttaaccgactcaaaatcattcaggacgttgtcgaccggcgtctgaccactcagatggccgtgcagcgcctgggtatttccgatcgctag

SEQ ID NO: 100696 - DNA, 453 bp, Enterobacter aerogenes
atggctaaccgccgtcgcggcaaaccgagcaataaccagctgtctgatggccttgcacagtacgcactcaatattatacgagatcgctataccgattttgggctacgctggcgtgtgagaaactcgcagaactgcacgatgttcacctgtctaaagagactgtccgatcactcatggtcaaagccggtctctggatcccccgcaaaaaagcatggcaaaccactggcattgtacagctacaaagccagcgtcttcagaatcaacaataaaaatgccaccggcggcgatggttatgcccagtttgcccatgcgatgcatgagctgaatatccagactatctgcactaatatcagcgacctgtggaactcgcccatttgtttgttgataatggaaatgacattgagatccgggccgttcttctcggaattatttcgcccagctctccagcattag

SEQ ID NO: 100697 - DNA, 483 bp, Enterobacter aerogenes
atgattaagttattcgatactaaaatgatggttatcctatttgtatccactctatccattgctggtatattttattattttcatggggttcattctgttaatagagggtttaaccttgcgtgttcctctaaaggcgttatgtctgttaatgggtataccttaacttatgttagttcttatagatttaaaaataatggaagaggtgcgactgcgttaactggcaaaatacaagataaggatggtgaaataaaaaatattgggctgcagatctattttgattataattttgattcaggtctattaatgttaaaaactataaatatagttaaacaagttgaaaattcagcttctgaagatcttattaagaaagttttcccctcaatttattacagggttaacagcatgcatactattgctatttttgaaatgggcagtggttatagatttgatttcaatacttaccctgtaatgtattgctattaa

SEQ ID NO: 100698 - DNA, 435 bp, Enterobacter aerogenes
atgttggaagcaagttttgaagatgaaaatgaatatgataacgcgggggatattcatcaacgctttgctcaaagtaaaaaatataaaaatatctgttatgttctattaactcttgttttaattttttctttccttttcattatcgatatttttaatggcaatgtttttactcattatgaaaaagtcaattatagaatggagaaagttataaatggttgtagtgtatatattgatcatgattatccagacaaagggagtaaggttgaagttgtactgatgaaagatattaatatattctgtaataaaaataaatttgcttatttaacatattttgaatactcaagtaattattctattatattttgcaaggaacctatttataaaaataaaaaacgtgatatttgttcatccttgtcgaggttaggtaatgattaa

SEQ ID NO: 100699 - DNA, 876 bp, Enterobacter aerogenes; identical to SEQ ID NO: 39017

SEQ ID NO: 100700 - DNA, 2886 bp, Enterobacter aerogenes; identical to SEQ ID NO: 25667

SEQ ID NO: 100701 - DNA, 987 bp, Enterobacter aerogenes
atgactactgctactactgctaaacccaaagctaaaaccccaacacgtgctaaaaccgccaccagtgctaaaccatcacgcccggcagctgacaaaattgagaaagattcaattttgatggcttattccaaagcgttttatggtgaagaaattccaccatcgaatactggcagtgatatttgtaaaatagaaaaaggcaccgatgacgataagagttacatctggtatatgacagaatctgtcagccgtgtaattgagttaaaggcgcttgaagaaagttctaaactgaagcatttagttggttgtgaacgttctgtaatttacagcgtgaatgttggtgatgtcttcattaatgagatcaatctcgatgaggctgaacaacttcttgaagaatttcccgacatcccacgtgaaaaaacgctcgaagcttttttatcatctcttgatgaaaagcttgttgagttgaatatcagctccattgttacttcagagtctcttcacttcggtaaagataaactgaccaagctgggtgctgttaaagtaagtcaatggcttgatatggttattgatgaggtgcatgttttttataaacgtcagcactttgttgagaccgttgaatctcgtcatgaggacctcaatgacctttatggtaaattgaagcctttgatgagtgaattcgggcttcaagacaaatactatgacttatcgtttaacgagatgatgattcacaaagtaaatggttttgattttgtagttgcagatttaatgccacgactgcttaaacttgaagcatcattgaaagatgatgaaatgaaagctaaagcagctatggaaacaaatcaagctcaagaaattaaagctgtagaaaataatagttttgtaaagggatatgataatacggtatcaagagtactgaaaggtgctgcctgtgttgccattctctatttcggaatctcaaccattatgaacttcattggctataattga

SEQ ID NO: 100702 - DNA, 249 bp, Enterobacter aerogenes
atggcatttcaggtactaaccactactgcagcaagcatcacagagcttaaacgtgatcctatgggcaccttcaatgcaggagaaggtgccccggtagccatactgaatcgcaacgaacccgctttttactgtgtaccgcctgctctgtatgctcaactgatggagcttcttgaagatcaggagctgggtcatattgctgatgagcgaattggtgaggcggtaatcgaggtcagtctagatgacctataa

SEQ ID NO: 100703 - DNA, 285 bp, Enterobacter aerogenes
atgacctataagctggcctttaatgaatcagctctgaaagaatggaaaaaattgggccataccattcgggaacaattcaaaaagaagctcgctgagcgcctgttgaacccacgggtgcccgcatcgcaactccatggacgcaaagaccagtacaaaataaagctccgtggcgcaggctaccgactggtttacagtgtcaacgatgatgttgtaacggtcaccgtaattggcgtcggtaaacgtgagaatgatgatatttacaatttgaccaaacacagaaattaa

SEQ ID NO: 100704 - DNA, 657 bp, Enterobacter aerogenes
atgactccccctgagatcagctttaactacgacaatgccccgctcacctccggcaacacggtctatggtctggagaatatatccattaaactaaacgatgagctgactaaacctactcttctccgcctggaactacgaggggggcctgcatctgatagcgtagtccttggtttcaaccagaatgttgatggtagctacacacctgattacccacggctgtttcctactctggatacgtcgacggataaatacactctcactgcatatgccacagatgctaaaggtaatacgtcccaaaaaagtattcagttcgcctacttccctaaaaatctcgttaccctggagaaactgaaaacactgggcgtggttaaagcactcaaaaccagtgacaacacacctctggcagtcatgcgtaccggccagttgagaaggaacgatggctctcttgcccagggtatgcagacggcaaatatcacggtcagaagcgacgctgagtatgccatcaacattctgggaacggtgatccatcccggggaaactaaagaaatacagcttgacctcggaactggtgaaaactctacggttccgatttttccggctatcaacgggtctacgggtcaaagcaacttcatcatcgagttcccacaacttaactaa

SEQ ID NO: 100705 - DNA, 1176 bp, Enterobacter aerogenes
atgctgctatctgacatccaaataaaaagagcaaaaccgaaggacaaaccctatacgcttaacgatggtatgggactatcactcctcatcgacacagcgggcagcaaaggctggcgtttccgctatcgctttgcaggtaagccaaagatgatttcctttggtgtatatggcgatgtgtcgttggcacaggcacgtaccaaacgtgatgaagcgcgttcgatgttggccaaagggatcaacccaagtgaagccagaaaggcagataagattgctttgcagttcgcacatgagaacagctttgagtctgtggccagagaatggcactcatcgaaaaaagccacctggtcagaggggtatgcaaaagaggttctcaattgtatggaaaaggatatttttccttttatcggccagcgcccaattgagcagattgaaccactagagctgctaaccgtcctgcaaaaaatagagaaaagaggtgcgctagagcaaaccagcaagatccgccgccgttgtggtgaagtgcttcgttatgctgttgccactggcagagcaaagtataattttgcacccgatttagctatcgcactcaacaaacctaaaactcaacacttcccgttcctgactgaaagcgagttgcccgagttcgtcaatgctctggataactatcagggcagtttagtcaccaaatacgccacgcagctgttgatgctaacaggcgtgcgaacaattgaactacgtgcagcggaatgggctgagtttgatttagataatgccttatgggagatccccaaagaacggatgaagaaacgccgcccccatctggttccgttatctactcaggcgatcagcatcctgaaaaagctgcaagaaataactgggaattacagcctcgttttccctgggcgaaacgacgtcaggaaaccaatgagcgaagccagtatcaacaaagtgataaagctgcttggctatcatggtcggttaacgggtcacggcttcaggcataccatgagtactattttgcatgaacatggttttgaaagcgcctggattgaaatgcagcttgcgcatgttgataagaactctattagagggacttataatcatgcgcagtatttagaaccgagaagaaaaatgctaacgttttatagcaaccttatatataaatcatatatatga

SEQ ID NO: 100706 - DNA, 615 bp, Enterobacter aerogenes
atgctgatcggatatgcccgcgtctccaaagccgatggctcgcagtctctcgacctgcagcacgacgccttgcgcgccgcaggtgtcgaacgggacaatatctatgatgatcttgcttccggcggtcgtgatgatcgccctggcttgactgcctgcctcaagtcattgcgtgacggcgatgtgctggtggtctggaagctcgatcgcctcggacgatcgcttgcccatctggtcaacacggtgaaggagctgtcagaccgcaagatcggcctgcgggttctgactggaaagggcgctcagatcgacaccacgactgcgtccggtcgcatggtgttcggaatcttcgccaccttggccgagttcgagcgggatctgatccgagagcgcaccatggcgggtctcgcctccgcgagagcgcgcggtcgcaagggcggacgaaaattcgcgctcaccaaagctcaggtgcgtctcgcgcaagccgccatggcccagcgcgatacttcagtttccgatctctgcaaggaactcggcatcgagcgcgtcactctctaccgatatgtcggtcccaaaggcgagctcagagaccatggaaagcatgttctcggacttacgtag

SEQ ID NO: 100707 - DNA, 774 bp, Enterobacter aerogenes
atggctttatataatataatattatatttcattggatttaggtgtaagagattgttaaatttacaaccacacgaaatgtcagggtataaaaataagagccatccctgctataaagtaacaaaaaagtgtttacagataacattaaagccactaaaaaataacacaggtttcaaacgaacgatgtacccaataacattaggaaaaacaaagataacacaaagagtgattttcttaagcgaatgctcttatatgaaaaaaggatttcattttttactctgtaaacgagctgaagagttaggtatagatattcaatatattgagcttgaaccggaagatgctatcactaacttaattggttattgtagaggtcacgtccaagtaaccgttttatgtgatacacgaagcaggtattttccatatttatttgacatgtttaggaaatttgaaaaatcagctaaaagtaaaacaactgcctggataacaaacttggcgccagagataaccaataaaccagagcgctataatcagagctatgcaaatcgacttactgctctcgaaaaccagatagtaaagttattgatgaaagcatggagaccaaagcagatatctgaactaattggaatagatgttaaaagggtaagctattataaaagaaatgcaatgagaaaaatgggggtgtcaacctcgcatgagctctttcataaatattacggaagcagcaaaataaggaatattgcaatcttatcaaacactgtaatagataaatttgcataa

SEQ ID NO: 100708 - DNA, 537 bp, Enterobacter aerogenes
atgactgatgctattactcaaaagtaccttaaaaccttcaggtactttccggatacacatactcgtaaacactggagaagtttaggtggaagctggcatgactcttacgaccagattttgcttgaacgtgatatttataaaatcgattacccactggtaataaatctcaaaacaaaactaggaacatacataattggttcgtcagatatcccccacgatggtggtgactggaacactctcatggcaaccttgaacaagttggataaccaaaacttacgcattatggcgagtaatataaccagaactaggtattttctagaatcaggaaagacaatagatgatatatcgcttgtagtattaggagtgcatcaacctgatcaattaaaacgaattctctcagggcaaactgaactagctaaatcaaccttgtgtctgttccctaacaactgggatggactctcaaatgcaccacttgatttcaaaataagatttcttgacatcactgaaagtgaatatgggagttgctatgagttttaa

SEQ ID NO: 100709 - DNA, 426 bp, Enterobacter aerogenes
atgtataaaacaacaggtagtcaagtgaagagtgaattcaatcgcatccgccatgcagcatttcttttgcatgttcacattgtgtttgtgaccaagtatcgccgcaaagtttttggtgaattacatatcaacagcgcccgtcagtatgtatctgaggtgtgtggtgattttggcgcagaattaaaggagtgtgacggtgatgctgatcaccttcatatgctgattgaatacccgcctaccgtgcaactatctaagctggtcaactcactcaaagcagtcaccagcaggcggctaaggaatgaatatatcgatctacgagccgcctatagcaaacctgtactttggtcgcgcagttactttgctggctcgtgcggtggcgccccactggaagttgtgaagaagtatattcaaaaccagcggggctaa

SEQ ID NO: 100710 - DNA, 318 bp, Enterobacter aerogenes; identical to SEQ ID NO: 52346

SEQ ID NO: 100711 - DNA, 879 bp, Enterobacter aerogenes; identical to SEQ ID NO: 52347

SEQ ID NO: 100712 - DNA, 285 bp, Enterobacter aerogenes
atggcgcggggtttcggtgttgcgcagcgccgtcagggcaatcagcccgccggtgacgcagaacgccagcgccagccacagggtgcccatctcgccaatgtgcggaatggtgaagctcggaatatagctgccgaacacgccgatgccgacggagtagaccgcccagaaccagcccagggccgagctggagctgtcgctgcggacgttatggataatggcgacgataaacgaatagaggaacagcggataggccaggccgcggatgccgtaaaacagcaggattaa

SEQ ID NO: 100713 - DNA, 186 bp, Enterobacter aerogenes
atgataatcaatgagacattaagtaagataatctttttttctgagttgtggccagcatttttcattctttttattggagtgactactgccttttactgtttggggatgaaaaagacaaccatctactctatgataattacaatgttaattctcctgtatggatatggttatataattaactattga

SEQ ID NO: 100714 - DNA, 390 bp, Enterobacter aerogenes
atgacttttaaaagcaaacttattgttattattattagcttcgttacaagtgtaggagcagaagctagttacttatctgatagaggatgtgcgaaaaaaaaatcaaatctagagcgagagcttgaatatgctcatgtttatgggaatattcatagaatcagaggaattgagagagccctgtctaaacttgatatttattgcactccttctgcaatgcgtgaagagcataatattcgcatcaaggaaaaagaaatgaagattttaaagttagaaaatgaaatctttgaacacaaggattattatgatgcggataaattatataaaaaacagcgaaaactaaaagaggcacgacgagaactttcagaactacaaaagttaggttataattaa

SEQ ID NO: 100715 - DNA, 243 bp, Enterobacter aerogenes
atgaggctggaggtatctgactgcgaacaacggggttgttttcaccggctgcaaattatgagttttctgtggcttctggtatccgactgcgaacaacggggttgttttcaccggctgcaaattatgagttttctgtggcttctggtatccgactgcgaacaacggggttgtcttcacctgctgcacatcatgagtctgtggtggcttcgggtatccgactgcggacaagctgaggggggttaa

SEQ ID NO: 100716 - DNA, 240 bp, Enterobacter aerogenes
atgcgattgattaacctaagcaaacactcccctatggggcgccaggcgtgcgatgcggcactggcgaaacacgttgagctttatggtgccaacgggcgacagaaaacgaagagaacttatacggtggtggttcaaggctcaaagatcactgtagaagttgtaaacagaaaatgcagctatgtggcgatggccatgagctgcgcccgtaggctgcagcatcttcctggacaatgtaactaa

SEQ ID NO: 100717 - DNA, 813 bp, Enterobacter aerogenes
gtgtcgcgtgcgcaactgagcatcagggttcaccggccgtctgactggcaggatcgcagacggcagccccgttttgacgatagcgcagtgttgtcccggataaacacggcggtggctgacctgccaacgtatggttatcgccgtgtgtgggcgctgctgcgacgagagtcagagcgggatggtctgcctgtggttaatgcgaagcgggtgtatcgtattatgagaacacaccatctgcttcttgagcgtaaaccagcggcagctcaacaaaagcgggctcataaagggcgcgtagcggtagctgaaagtaaccggcgctggtgctctgatggcttcgagttccgctgtgacaacggcgaaaaactgcgggtaaccttcgcccaggactgctgtgatcgggaggtaatcgactgggcggcaagcaccggaggctatgataaagaaaccgtgcaggatgtgatgctgggtgcggtggaaaagcgcttcgggcagcatctgccgtcagagccgctggaatggctgacggataacggttcagcttacagagcgcatgaaacaagggcattcgcccggatgctgggactggaaccgcgcacaaccagagtacggagcccggaaagcaacggtatagcagaaagcttcgtgaagacgataaagcgggattacatcagcatcatgccgaaaccggacagccaggcggcggtaatgaatctggcgctggcgttcagtcattacaacgaacatcacccgcacagcgcgctgggatatcgctcaccacgggaatatatacgcaggaaattatcgcaaccgtaa

SEQ ID NO: 100718 - DNA, 402 bp, Enterobacter aerogenes
atgtttaacaccagtcagaataataagatggttgaagtgttatcaggacctgagcggcgtcgacgtcgtactccgcaggaaaaaatagcgattattcagcagacgatggaacccggcatgaccgtgtctcatgtcgcacgcctgcatggcgtcaatgctaaccagatattcaaatggcgaaaacagtacgaagaaggctcactggccgctgtcgctgtcgctgccggtgaggaagtcgtccctgcctccgagcttgctgcggccaataagcaaatccgcgagctccaacgccttctgggcaaaaagacgatggaagccgagatcctcaaagaggctgtggagttcggtcgggcaaaaaaatggattgcgcatgcgcccttgttgcccggggacgacgaataa

SEQ ID NO: 100719 - DNA, 321 bp, Enterobacter aerogenes
atgtccaacgcgggctatatcctgcaaactgggctggcgaaagctttgaacttagctgcggcgaacgccgatagcccctccccggtggcgctgacgcttaccggggctaccaaccgaatgccaaatcgtagcccggataaggcgttagccgctatccggggatcctccccggtggcgctgacgcttaccggggctaccaaccaaatgccaaatcgtagcccggatgaggcgcaagccgctatccggggatcctccccggtagcgctgacgcttaccggggctaccaaccaaatgccaaaccgtagcccggatgaggcgtga

SEQ ID NO: 100720 - DNA, 135 bp, Enterobacter aerogenes
atggcagaaaatcatccatttttcaccgtcgggttgcgagaacccgcggtgataaacagaataatattctgcttttttaatgtttactcagataagatggaacttacgctcccctttgtggatgaggacaattag

SEQ ID NO: 100721 - DNA, 1686 bp, Enterobacter aerogenes
atggcggtggaaaaactgattgtcgatcatattgatacctggaccacggcgctgcagacccgctccacggcagggcgcggcagctcgggcaagattgacctgtacggtattaagaagttgcgcgagctgattctggaactggcggtgcgcggcaagctggtgccgcaggatccgaacgatgaaccggcgtcggtgctgctggagcgtattgcggcggaaaaagccgagctggtgaagcaggggaaaattaaaaagcagaagccgctgccggagattagcgaggaagagaaaccttttgagctgccggtggggtgggagtgggtgcggtttggtagcatctatgaaatggaatatggtaataatttacctcaagaaaaaagatctaattctggcgaatacaatgtatatggctccaatggaattgtaggtacacataacgaagcatgcattaaatctccatgtattgttatcggcagaaaaggttcagcaggggcattaaacctctcagatcaggctgcctgttgggtgacagatgttgcttacagcactatccctccaagtgcgatgtatctcgagtttgtctttatacaatttcataccttaggcctcgatactttgggaaaaggaattaagcccggcttaaatcgtaacgatgcttataatttaacaatagcaattccacctcaaagcgaacagaaagccatcgtatcaaaagtaaatgaattgatgtccctctgcgaccaactggaacagcactccctgaccagtctggacgcccatcaacagctggttgaaaccctgctaaccacgctaaccgacagccaaaacgccgatgagctggccgaaaactgggcgcgtatcagcgagcatttcgacacgctgtttaccaccgaagccagcattgacgcattaaaacagaccattctacagctggcggtgatgggtaaattggtgccgcaggatccgaacgacgaaccggcttctgaactgctcaaacgtattgcgcaggaaaaagtgcaactggtgaaagacgggaaaatgaaaaagcaaaaaccgttgccaccgattagtgatgaagaaaaaccgtttgttaccccaaataattgggaatgggtaagattcggagagattggtgaaataaagggtggtggaacaccaagcaagaataattctgcattttgggcaggtgatataccttgggtttcaccaaaagatatgaaagtagactacatatcaaaaagtgaactctctatatctcaagacgcagtacaaaacagttcagtaactctcatctctgaagagagccttttgtttgttgtccggggtatgatccttgcgcatacattccctgttgctatttctaaaaaagaagtaaccataaatcaagatatgaaagctatatcaacagatttatatcatcctgattttttaattaaaatgatgcaagcctgttcaatccgggtgttatctttagtagatcgctcctctcatggaacatgtaaacttgtttctgataagctttttagcttagttctacctctaccgccattgaaagaacagctacgtatttcatctgaagtggatagctttattaataattgtgaaaagttgaagaaaattattaaagcaacccaacaaacccagctccacctggccgacgccctcaccgacgccgccatcaattaa

SEQ ID NO: 100722 - DNA, 2430 bp, Enterobacter aerogenes
atggctgagctgaacctgagtaccctgacggaagcagacatcatcaccaaacgcgttatgcccgccatccttgatgctggctggaacgacacaacgcaaatcagacaagaggtcaaactccgcgacggtaaggtcatcgtgcgcggcaaagtcgcggcgcgtagaacggtgaaatccgccgatatcgtgctctaccacaaactcaatatgccactagctgttatcgaggccaaagccaataagcatgaaatcggcaaaggtatgcagcaggctctaggttatgcacacctgctggatgttccctttgcatttgcttctaacggcgatggctttatcttccacgataaaacagcaaccggtgcgattgagcgagaaattaccctcgacgaattcccaacgcctgatgaactgtggcagaaatattgcctctggaaaggttataccgccgcccagatgccgatcgttacacaagattattacaacgacggcagcgagaaacggttgcgctactaccagcttcaggccatcaacaaaacgctggaagccgtgtccaccgggcaaaagagattattactggtcatggcaacaggaacgggtaaaacgctgacggcgttccacatcatctggcgcttatggaaagctggcgtaaaaaaacgcatcttgttcctggcggaccgaaacgtccttgttgatcaaacccgacttgatgactttcagcctttcggttctgcaatgaccaaaatcaccgggcgcactctcgatcccgctttcgaaatccatcttgcgctttatcaagcgttaaccggcaatgaagagcatcaaaaagcgtttaagcaggtttcaccagatttctttgatctgattatcatcgacgagtgccaccgcggtagcgcctctgaagacagcgcctggcgtgaaattctggattatttcagcaccgctacccagattggtatgactgccacgccgaaggaaacgcacgagatctccaatagcgactattttggcgatccgatctacacctattcgttgaaagaaggcattgaggatgggttcctcgcaccttacaaagtggtacgtgtcgatattgatgttgatttacagggctggcggcccgtgcgtggccagagtgacctcaacggtgaactgattgacgaccgaatctataaccagaaagatttcgatcgcacgatggtcatcgacgagcgtactgaactggtggcaaaaaccattaccgattacctcaaacgtaccaatccgatggataaaaccatcgtattttgcgaagacattcctcatgctgaacgaatgcgtcgggcgctgatcaatctcaacccggagatggtaaaacgtaacgataaatacgtgatgaaaattaccggcgacgacgaggaaggaaaaggtcagttgcagaatttcagtgacaagaaaaaagaatggccggtaattgtgaccacctcagaactgatgaccaccggcgtgaacgtcaaaacctgcaaactgatcgtgctggatcaaaccatccgctcgatgaccaaatttaagcagattatcggccgtggtactcgcatcgaagaaagctacggcaaactgtggttcaccattctcgactttaaaaaggccactgagctattcgccgatgagcgtttcgacggtatcccggaaaaagtgatggaagccactgcggatgacattaccgacccgaattccgggttcgatgaaaagctggatgaagacgattttgacgtttttgcagaggacgacgttacaggggcagatgaagatccggcaacgtatacaaccggctcattcgacaattcaggcctacttccggaagaagaagacaaccgaatccgcaaattccatattaacggtgtcaccgtaagcgtcgtgtctcagcgcgttcagtactatgatgccgacggcaagctggtcaccgagtcattcaaagattacacccgcaaaaccgtgctcaaagcctgcgcctcactggatgattttgttcagaaatggcaagatgctgaccgcaaagcggcggtaatcaaagagctcgaattgcagggaatcctttgggatgtactggcggaagaggttggcaaagatctcgacccgttcgacatgctctgccatgtggtgtatggtcagccgccgctcacgcgcaaagagcgtgcagacaacgttcgcaagcgtaattatttcactaaatattccgatgtcgcgcagaccgtgctcagtaatctgctggacaaatacgctgatgccggcgtcgaagaaatcgagaatattcaggtgctgaagctcaaaccgttcgaccagatgggaactctgcaggagatcatcaccgacggttttggcgataaaggcacctatatgcaggcagtgatcgacctggaaagcgaaatttaccagcttccttcccgctccgcctga

SEQ ID NO: 100723 - DNA, 1344 bp, Enterobacter aerogenes
atgagcgttgaacagttcggctataaacaggagctccatcgagcgctgaccttccgcgatctgctggtttacggcatgatttttatggtgcccatcgcccctttcggcgtcttcggctacgtctgggatggcgcgcagggcatggtggcgctggcttatctgatcggcatggtggcaatgtttttcaccgccatgagttactggtcgatgtcgcgcgcattcccggtttccggttcggtatacgcttacgctcagcgcggaatacaccctatcgtcggtttttttgccggctggctgatattgctggactacattctggtgccatcgctgctgtatatcgtcagcgcggcggcgctggggccaatgttgccgggcgttccgggctgggtctggattatcggctttatcgcgattaacagcctgattaacttacgcggcattacctttaccgcgcgagcgaataataccattttggttgctgaaatcgtggtcctcgcgatttttgtggtgctgggattgattgcactttattccggagccggggcaggccacctgacgctcgaccccttgtataatgccgataaattcagcctgccgctggtgatgggcgcagtctcgattgccgtactctctttcctcggcttcgatggtatatcgacgctgtcggaagaaaccaaaggcggcgtcgataccgtcggcaaggcctcgttaggcgccctgatgctggtgggtacgctgttcattgcccagacctggattgccgcggatctggcgcagggtatgaaatttggcagcctcgataccgcgttctacgacaccgccaatctggccggcggccaatggctgaaatacgtcaccatgtggtccacggtgatttcctgggggatcgccaacgcgctggttgctcaggcggcggtttcacgcatcctgtttgcgatggcccgcgataagcagctcccgcagctgctggcgaaggtgcatccacgcctgaaaaccccgtatgtcagtaccttatttgtcgcgctgatttcactggtttccggtctctggttctacggcgatatcgacaacctcagtcggctggtgaacttcggcgcgctgatgggctttctggtgctgcacgtggcggtgatcaaccactatctgatccgccaaaagtcgcgcaatctggtgatgcacctgctcttcccggtgattgggctgtgcattatcggctttgtcatttatgagatggatgttgaagccaaagtgctcggcctgagctggctggccgtcggcgtggtgtattacgccattatgcgtctggtgcttaagcgcaacgtggagctgaatctggaagggtaa

SEQ ID NO: 100724 - DNA, 1524 bp, Enterobacter aerogenes
atgaaacttagtgagttcatgggatcatacgtaaatcatccagttgtgtttgttggtgcaggtttcagtcgccgatatttaactggtacgtactcatggcctgaactgttaaaaaaaattgtttatgaaatgaaaggcagctatgacttctattttgattcggctggtaggaatgcaaattcattgggagaggttgatcttccaaaggtggcaagtgaaatagaaattgaatttaatagattattagagtcagataggaacgggaaatttaaatccataaatgaccgatactatgaatatgctgcttctggaaactactcggctagccgaataaaaatatttatatctgagcttgttgatctccatgaaacaaacaataatgaaagttatgcaacagaaatggagttatttgctaaggctagtagaaacatagggtccattatcacaacaaattatgatagattcattgagactctaattggctttaaacctattattggtaacgatattttattaagtaatccttacgggtctgtttataaaatacatggttgtgtatctcatccagagtcaattgtaatctctgaatcggattatgaaagatttcgcgttagcaatcatttaattagggctcaattaatttcattattcattcacaacccaattattttcatcggttatagtattagcgatgaaaatattagagatatattaaaaactattttctcgtacatttcaaaggattctgatttggcagataaagtcaggaagaatttccttttgatagaacgtgaagaaggtagtgactctctagaagttttagaacatgacgtagttattgaaaatatcggcaatataaaaattaataaaataaaaactgataacttcagtggtgtttttgaagaattggtaggacttaaacttcctgtttcatctatggatattaggaaagttgaaagtgttatgagaaaaattaaagaaggaggttctgtaaaagtaaaaattgtaggtgatttggatagtttatctaatgatgaattagttatggcagttggttcagttcagaaaattacatatcattaccaatcagcttcagaaatggttatgaattactttgatataatggattcaagaaatgatgctctaatattgttgttgaataaaattaaagtttcgcgtaatcagtactttactgctcgtggtttttctaccatttgtaacgaaattcaaggtattgaaaatctaaaagagaaccaagaaaggaacttaaatacttattttgactcaatagatccttcagagaaaattgattgcgatacagttgatgaaatacttgctttaggatttaaaacttataaaactgtgcgcattcttttctacaacatttacgtggataatattaatttagataatgtggccgattatctgcgagagggggtggcacttgaaattctaccttcagactataaaagactagttagtttatacgattataagcgatatcctgacgagatttttttgtaa

SEQ ID NO: 100725 - DNA, 417 bp, Enterobacter aerogenes
atgaatattttttcatttgattgcttcgatcttcgagttgtccttaatccgcataatttttacgtagggcaagctaaatctagacttctatcacaattttcagatcttagtgctgaatgtgacctggaagaggaaagatatctcgaacgtacggctaaaaactttgaccctgaaagagatgatccagcagaggcttgcgaaaatgcgacacaaataggtataacacatatgcatgcattgatggatatgaaaaatactgtcactctagctatgaatgctggaatgtaccaccagttcgataaacagttacgtgatttaattcttcgagaatttcgtcattggaataagttaaaagctataaaagatattgtctggcgtactgtaagtatcccggcaaaacggcccattcacttttag

SEQ ID NO: 100726 - DNA, 318 bp, Enterobacter aerogenes
gtggcgccttactcaggcgcggtcagccggattgtgttcaggaccagccggggtacgccgctgctgattatggcgaaacaggccagtggtgaagtggtgccgtttggtgccgaggtgtctgacggtgccggcacggtggtgggcagcgtggggcagtcaggacagatatatgcccgcgttgaaaaaaaccggggccgcctgaccgtgaaatggggcgagcgtaccggacagcagtgtctggttgattacaggctgccggcaggaaaaacggacaggccatcaagtgacatggtccgcctcagcgcgcagtgtcgctga

SEQ ID NO: 100727 - DNA, 1524 bp, Enterobacter aerogenes
atgaaagcgaggcgatatatctttacagcagcgctcctgtttatggtcataatactctccgcagtaatttatcttttaccgtcatggcataaacacagtgacaacggtaaaagagataaccttttagctgctcgtgtcgattttctcctgcgtgatgcccgtttactgggcggggatatcctgcgtcagcctcagccggacctctcatgttcgccggacaccgcgcgtgcactcgaacaggcagcactccggtatccgcatattcatggtgtgtttctttaccacaacggggaaatttactgctcctcgttaaggcagcgctttacacctgatgccacattccaggatgtcacccgttcagctactgacggtaaaaccctgttgctgagcgggatgaaagccttccccggaaaagtctttctggcgtacatccggggaaatcagaaaagtggtgttgtggtgaccattgatgcctactggctgcgacggtggtttgcggccgacggtcagaacggcatccttattggcgacaaagtattagcaagggagcagaccatcactgaagccaggactgtacgttcacgaataacaaatatactgagctcaccgttgtccggaaccagtgtggtctccttccgtcatgacacaccgtatctggttttctggccggcgctggcggtactgatactgacagccggattactgattgttctggcgctggggcggtttcacagaaacgcctttccgacagtccggcagcttgaacaggctatttatgccggagaaattgttccctggtatcagcccattgtggatgccactaccggactggtgaagggggcggaggtcctggcccggtggcatcatccccgtaagggtgtactgcctcccggcacatttattcccctggcggaacgcagcggactgcttattcccatgacatatgctcttcttgaccaggtccggcgggacatggacgttctcaaatttcgtctgccggagaaattttatatctctgtcaacatcagcgccacgccggaaatggttgaggcgctttccgctacgctgacggggttcagactcgcttttctcaaccatctcagactggttgtggagctgacggagcgaacggctgtccggtctgattccccggtcattggtctgctgcgggacctgcgcgctgaaggaattgaaatcgctctggatgattttggtacggccttttccaatatttcaaaaattcaaaaaataccggtgaccatgattaaaatagaccagatgtttatccgaaaattagctgattccatggagtcacagcgcctgactgaaagcattattgaactggccagaaataactgcctgtctgtcgtggcggaaggagtagagacagccttccagtcggagttcctggctgccagaggcgtggcactccagcagggatattactggtcgaaacccctgccggcgatggattttgcccggtatctcatctggcacagaaccgtacccggaaagattaactga

SEQ ID NO: 100728 - DNA, 411 bp, Enterobacter aerogenes
atgactaaaatttcaaaaaacggcattatgtccattattatttttatgattgttgtggcgccggtatcggctgtatcaaagacagctttacctttgagcgccgcccggatatattgcggcattcagtttgatacgataagaaaaagctggaatgcgaccccaccaactgaagttctcgttgatgatgctgtgaatgcgcagaaacaaagtggggtcaaacttactaatgtcggaacaacggaaaggaagtacagagaacaacttattattgcagttactgcaatgaggagtcataaagcggcgttcaacaataactatcaaacttttctgacgagtatggagcaacaggaaaaggcttgtgtattacagttttcatcccccaacaggagaactacagatactggcaaataa

SEQ ID NO: 100729 - DNA, 315 bp, Enterobacter aerogenes
atgcagtattttgtatacaggagcacaggtaaaaacacggcatttccattattaatcgatgtcaccagtgacattattggcgacatcaaccgccgcctggtgatcccattaatgccggcagaacgattggggacaaaccgcgcaccagaacgccttaacccaatgttcacactggttgacgggaaagagtacgtgttgatgacacatgaggcagcaactatccctgttaaggctttaggaactgagtattgcgatgtaagcgggtaccggagtgccatcaaagcagcactcgatttcatgcttgacggcatttga

SEQ ID NO: 100730 - DNA, 483 bp, Enterobacter aerogenes
atgaaattaacagaacccaagctgaatacgctgatcgataatctgaatgtcctgatttgtgaggacagcctgctgacgcgccaggagcgcgaggatttggtccgggccgtcgccgccatcggtgccatgaaagcgcgcgtcagtatgaagaagtccaacgttccggcagcgtcgaaaccaaaggaagagaaacaggaacgtgtgcccgacccacgttttccgcatgccggcgaaccctggcgggaagaagaggggactatgctgcttgatgccctcgaatccgtaccggacgaagctgtgggcgttcatctgttctggctggccgaaaagctggggcgtaccccctacagtgtggcctgtaagatagcggctctccgggacatgccagaagagtggaaagatcagtaccgcaaggtttcggatgatattcgccagtcaggcctgagcatcgcagattatgttcagcataacgggctgaattaa

SEQ ID NO: 100731 - DNA, 567 bp, Enterobacter aerogenes
atgactcaggcgcgccgaccatcgccgctgcagcgccgggtactgattgtgctggccgctctcgatgcgaaacatccggggccggtggcgacaaaggatatcgagcgggtgctggagcagggcggggatgccccggtgtacgggccgaatctccgcgcctcctgccggcgcatggaagccgcgggctggctgcgcaccctgcgcgccccgaatctgcagctggccgtcgagctcacgaatgccggtcgcagcattgcagaaccgctctaccaggaagaacgcaaggctgaaacagcacgacaacggctgactgacgtccggcgtctgccgttacgccagacggctgccggtgatgcggtggagttgcagctggatgacggccattacaccatcagggaagcggcctacgtgatccgtctggacggtaccacctgtctgcagctgacggatgtcggaggtatacgccggataaaagagggcgatcccctgcaggtagccagctggtatcagacctgttttgatgctggcctgccggtcaccatccaggtgaatgagagccggaactga

SEQ ID NO: 100732 - DNA, 258 bp, Enterobacter aerogenes
atggatcaggaaatgacgttttcactcagctatgagcagctgacccggttcgcggaacaacgcatccgggaatgtaaactggacagcgatggcctggcttacatgactgcatcgaccgaggccgccaccgttctgggcttctggtatgaactggccattaatggctatgcctccatgaatgccataaagaggcaagaactcatagacgccgatcacctgcgcctcagaaagctcatctggccggaggctgacaagtaa

SEQ ID NO: 100733 - DNA, 1245 bp, Enterobacter aerogenes
atgattaagagctaccggcagcttacgctgtgtcttttcatactgttgtccacattcggcttctgcctttatctgggttttttttccttctatctggttaaaataaaaaccgacccgctttttatttcagtgctgataggttcaactgcgctgtcaagcctggtgtgggggcctctggccgggcggctcatcgatcggagccgtcaccggttcttctggctgatgattgcgcaggcgtgttgtggctttctggttttcgctttcggaaatcagttgcatttcaggcccgtcgtcacaccagtactggttatatccctttccctcaccgtaaattttgcgacgattatcgttaatcagtatctgctgcctgaacttcacagggattatgaaacgagtgtggccgtggcgtcatatatcagcgggatcgccgttttcgtcaccggattggtactcgccgccttttatgaccgctattcaccctccctgtttttcagtgtggccgccagctgtttcctcctttcggcccttacacttcttcccctgatccgcggtaagacctgcgccggtccggatgaggctgtccctgaaacggaaaaaagagacttcgtcggtatttatcgtcagaccttccggtgtcttaaacgaaactggtttcttgcgctggctatgtgcgtgatggcgtttacggagacgtcgtttaataccaattttgacgttattgcgttttcattaggtaccacaccgtttgctgctgtgtttattctgggagcaatcagcggcgtccttgacagcctggcatcgtggttttatccccgctcggtggggaaaactacggttaacttccggtggcgtttttttctgtgcacctttttgtttattttttcgggagcggccttacttactttctgggactatgacagaaagccgtggtttcttccctctcttgccctgtgccttgaactcacgggtgtatggtggtcaatttttattgccggtcaggtcagggctgcaagtcatgaaggtgaatatggccagaccatggctgcattccgtgttccgcgttcagtggtgacattcttcgggatgaccactataggtacagcgttgcagtccggtgagattgcctgggttttatctgttgataccgccctgctttttcttctgcttgcccttaatgttcatctgtacatgaaaataaatgctgaacgctgcgatatggaaaagtcagctgcgccagtggattag

SEQ ID NO: 100734 - DNA, 903 bp, Enterobacter aerogenes
atgcttgattatatgcttgagcagttcagcaggctgcctgttgactcctggttactcaggaacggtttgaaagactatattgatgaacagctgctctggtgtgaggacagcaatttttcatcaaatttccctttccgggaaaccggtctgcctcaggatttttttcttcagaaaatcatttcctgcgacggtaatgactacctcaccgggccaagatacagaggcggcgatttgaagaagcctttcattgatctggtcgccagctctgctcctctgacccggcgggcaatggcctcaatactggacgtatggcatcccatgggcgcacattcagtccgcgttctccgacccgtgtctgaggatacgcgcggtcgtgccgatcagtttttctatgtcggcggcatcatggatgaaaaaaaagaagctgttatcagcggtcatactgtcagcattgagcgtgcctgccagcagtctgttgagtggtgccttcaggctctggaacttgcctatgccgggacgtattcccgctatcctttcctgaaggataaggtgtttcctgcagatgaagaagacattcgcgatgccattaaggacggaaacctgttcatcatagtttatgaggggtcgcgtgccggttttatcatctgtgataacgcgcgccgggcttttatatccggactgtggatcaccgaggagatcgttattccgcgctttcgcgggaagcatgttgcgggttccgctcaacaggccttactttcttttctcagcatgcccggcacaccggcatcgctatggggaaccatcgaaagcagtaaccttccttcaatacgcgccgctgagcatgccgggagaaagcgggtgatggagtatgcttttctgtatggggaagatgtgcatgattaa

SEQ ID NO: 100735 - DNA, 951 bp, Enterobacter aerogenes
atgattacctttccgatgaaagagctgatgactctgctgacagacactgaaccttttaaaaaggacttcgtattgtcagagggaaatgcctccttctcagaggctttatttaattactcacttcagcatctttttcgcgggatccgtcatcctgaaaaagacatcaaattgctctgctgtggtgatgtctactatcctgccagtgagacgtgtactggcggaatactgggattttacacgatggcccttatgctgctgcgtaagcggacaatcgtattcaaccacctagagaaaaggatgccggaatacttttctctgtacacttatctggctgacaaaaaagggatcctatcgcattacaatatttactggtcgcccgctgacagcaccggtgccggtgcgcataccgatgaccacgatgtggtcatcgtgcagctcgcgggtaagaaaaaatggaagtttgaacacgaagacatcacgctaaaagcgggcgatattctctacgttcggaaagggacgcttcataatccggtaacggaaaacggacaccagtcgctgcacctgacggtggggctcgtttacggagtttcctctttccctgtttttcctgaacccgcgtgtgtggaagatcacgccggcgatatctcagcggtggattttttccggagtatgggcaatctgctcgggggaactgaaccggtattgtatacgggtcaggatgttttaccggatgaggggaattcttacatccggttcacttataaggaaaatgtccttgaattaacgaaagaagtctttcatcacatctttgaacgccggagcctcaacaatttctctgcccggcctggtgctgacaggaaagacgtcatcaacctcattctttctttctataaaacaggtatccccgtggaaattggggcggcccccgttgaaataaaaggaacaagttaa

SEQ ID NO: 100736 - DNA, 927 bp, Enterobacter aerogenes
atgtgtgtaagcatgttaaccggtcacctgactgaatttaatctaaatgtattctaccatcagtcgggagtcctgaccgatcctggcgcactgcttgccgatatagagcatattatccgtagaagaagaagtatttcagaaagcctgctcaatgcccgtgtatttatcaataatggtacgcgggatgactttggttacagcgtgtcgaatcatccccctcgcgaagacgaaggcctcagtgaatggcttgagagaataaccggtgcctccagcttttgtgccgttattaacggactgaacggatggtccgattctctggctcagaagattaatcaggatttcaataaagaatgggtaaaaaaatacggtattccgagtcaggggattgatgtttacagcttcatggggcgatacagcctgacaccttttggtattcacaaagatcaggagcatacgtttctttatcacctcggccccggaatcaaaaaagcttgggtatgggatccgtccataaaagacattgcgccgattgtgaagtctgactcctttaatctgaaggaaactctctcttgggcgacggaggtcactctgcacccgggggatgcattgtttattcctcagaactggtatcatgttctggaaaacccggaattttctgtcacgcttggtattgctccttatgaaatgaaaaggtcacaattacttacttcctttttgtcagatttcctggacgtccataataacgaggacccgtatattacactacctctgatggctgaagctgacgttgaggatattattacagccgttatccctcctgactcaggaaaaaaaaaccttgatgatattgcacagaaaggtctggcacggattataagccggttgaaaagtaacagttttttcaaatatacttccccccccgcataa

SEQ ID NO: 100737 - DNA, 1110 bp, Enterobacter aerogenes
atgcatgaagatgatgttgttataaacagaaatacggtcatcaccgaagaaggtgataaagttgagctcatgcttaatgaaagaagagtcagtgtggcggtcagcggtaagctttaccagcttttaagaaaaataacagaacaggatataggcctcaaagatttgcttactacagacaatgcgcagcttaaagaaatcgcttcgcttttgtacttttacgacatactaatctcccggaaggatgatgatttattaaaagacggcattttgtataaccctgcgcgtatggagaaggtggcattatccatccctgacaccccgcaggaacagtggtgcttttttggtgcaccggcagatttcgcattagatccccccagatctccggctcatggcccctacatataccgtaaattaggacaaaaccacgctgaaatgagggatattggcgacatcgcttataatacaactgataatatatacagctttggaaaaaaaattcagcatgttgtcggcaaaatcagagcgaaaaacaataaggcgatgatgttcggtggtgatcactcgctgacttattttgcagtggcagagatcgcgcggtttatccctgaactcgtgctgatacaactggatgcgcattcggatatcaatacaagcacggataagttaaacgcccctctataccatgcaaattttgtttcaagactcattgctgataatgcaatcaagtcagtgatacagattggtgtcagagagaaaacaatcagatatccaatggattaccttgtgtcttcgtccattaatcagtttagtgcagtaatgagcaacgacgataaagtaaggcttgcatcgttaatcaaggggaaaaatgtctatataagttttgatgccgacgtgctggatcctaatgtttttccgcatgtcacgacgccgctggatgaggggatgaatgaggaaaatataacgaatgttctgagcctggttaagaactcatgcctttccgtcgtgggtgccgatatcatggaattcacatgtggttttgataaaaaagggaacccgtttaaccatgaaatgcccttgctggataaaataatctctctcattatcagctaa

SEQ ID NO: 100738 - DNA, 174 bp, Enterobacter aerogenes
atgtccttgaataaatatggtgagtcacaaaaagataatttgagtaagatcgcggctgacctgtcagctttcagccacgatgatgtcattgtggaagtaaaaaaagacaataataatcatatcgatatcggcggtggtggattgggacgtgatcgccgcgatactggtcactga

SEQ ID NO: 100739 - DNA, 930 bp, Enterobacter aerogenes
atgaagatactgaggcagctgtggaaccagaaagggcttgatgcggcagttgaagatgtacctgaggatcgatacggtttcggtaatatcgcagaaaatatatcccgttccatccttactcttcctcaggaggcttcaaatgttgtcggaatagaaggtgcatggggatcgggtaaaacaagccttcttaatctgatcctgagaaaccttgccctgaaaaaagatgctcacacgcatgtgctgcatatttctccctggctgagtggtggcagtccggttgaagcgctctttcttccggttgccacggttatccagcaggaaatggaaatacgctatcccccgaagggcttcaaaaagctctggcgtaaatatctgttgtcaccggaagctcaaaaagtgattgagtatgctcaggatacttcatcgcgcgtccttccactggttcaatatatcggacagttttccagcattattaactggatagcaggcggaataaaggtattttcagacagccgtctggctgttgatcagaaaaccactacaaagcttcgggctgaaattgcaggacaactggtgagtctggatctgaagttcattgttgtcatggatgatctggaccgactggagccatcccaggtggcggaagtgttcaggcttgtgcgtgcagtagccgatctgccccgctttacccatattctctgttatgacaggcagattatcactcatgccgttgaacatgcgctgaatatcgaagatggcagccgttatctccagaaaatcattcagcttagttttaaattaccccgacctgaagcctttgatttacttaatgaatttcgccagcgggctgaggctctatatcagcaaattaataatcaaccgccagactctggaatggtaagggatctcgtcgcggtgactgatacctaa

SEQ ID NO: 100740 - DNA, 465 bp, Enterobacter aerogenes
atggatgctatagcctatttaaaaagtcatcaaccgtcagataataaattggaaaaagctaaacataagatcattatgggagggtataggttatccaatgatgttaatttttcaaggaagattattgaatattattatgataatgaggaaagaaacgcccgcttttgtaaagtaatctttagtgaaagatattattattgttttgagaatggtgttattaaaacaaggaaaataaaataccacgttaattttatgatttacattataacaatattgctctatattaaccttttttatgtgaagtcttctacggttatttacaacgcacaccttccggcagaaccagttgtcattatagctactggtatatatagttatttgtcatggaaaatactgtgtggatattttagcattcagttaaataaggaaaggttttataatttcctgcgccaagataatagttga

SEQ ID NO: 100741 - DNA, 1215 bp, Enterobacter aerogenes
atgtatattccgcgccccgcaaaactgctcttcaccgtcgatgacggctggaatacgttcctcgaaaaattcggcgacagcgtcactccctggacccgactctgcgttgagcgcatgctcgcctgcgggaccactgagatgggcgttcgtcgtttttgctgttcgtcacccggttgcacccactcccgctttttctgccagagctgtaagtcaaaggcctgcagcgcctgcggttttaaagccaccgagcaatgggtatcgcagcagagccatatcctccccgactgcgactggcaacacatcacctttaccatgtcccatctgctgtggcccttcttcaacagcaactggcctctgctcagtgccctgttccgtgccgccacccgggccatgttacggtgggcccgcaaacagggcgtggaggtcggtattttctgcgccctgcatacgtacggcagacagctcaaccagcatccgcacattcacctctccgtcacccgcggcggcctcgatattaaacacggcgtatggcgagacattttctttaaaaagcacgccgtggaggaaatctggcgcggggcggtcacccgcctgctgcgccacagctataacctgattagccccggcagcctgccggggctggggcatatccgcgataagaagcagtggcagcgctatctgcaggtgcagtacggacgccgatggaaggtccatttcgcgaagaagacccggggagcctggaagagcgtcaaatatctgggccggtacctgaagcgaccgccggtgtcggccgcaaagctcaggcactacagcggtggtgccgtggtacacaactattacgaccaccgcacgcagcagtaccggcagcagacgctgtcacaggaagagatgatcgggcgctacatcagtcatatcccggaaaaacattttaagatggtgcgctactacggctttttgtccagccggaaacggggcgagctgctgccgaaagtgtatgaagccctggatatggaggcgcggaaaaagccggagcagcctggcttcgccgcgctgatgaaggcgttcctgcgcacggacccgtacaaatgcatcctgtgcggcaaccggctgcgctttgtcagcgcagaagctggcaggcatgcgtcggaattagtggtcgaaaggcggcatagtatcgaccgtaaacaatggcttcaggcacagactgcaggataa

SEQ ID NO: 100742 - DNA, 828 bp, Enterobacter aerogenes
atgaataaatacaagttcgaaccctggttgaatcgctggaaactcatccctgacggctcaccattcgtaacccatacatcagaactcctcccggttaaaatatcaaccgatggcatgaaagcgatgctaaaaattacagatgaccaggatgaacaaacaggtaatgcacttatggcatggtggggagggaaaggagctgcgcaggttattgtccatgaaaatgaggcaattcttctggagcgcgccacaggcccctcatctctgtccactatgtccagagaaggtcaggacgcagaggcttgccgtattctgtgccttacagccaatcggctgcacacatgtcagcccccccccataccacaacttaccaatcttcatgactggttctacgcacttaaaccagctgcccagagatatgggggaattctaaagcgttgcgctgaaatatctgaagaactgctatcttcttcgtatgatgtggtcacgttacatggtgatttacatcatggtaacgtccttgattttgggacatcaggctggctggcaattgacccaaaaggcttaaaaggtgagcgtgggttcgattatgccaatattttcacaaatccggatcttggtaatccggattcaggaatagctgttgtgccggaaatatttaaacagcgacttaagattgttaccgaaaccgcaggcctggacaaagagaggctccttatgtggatctgcgcatggtgtggattatccgcggcttggtctttggaaagtaacggcccggtcactgttacaacgaaaatagcagagctggcactatctgaactgcattcctga

SEQ ID NO: 100743 - DNA, 441 bp, Enterobacter aerogenes
atgattgaattaggctcaaatctacttgaaattgatcatgtggggtctacggcagtacctggtctcgcggctaaatccattattgacattgatctgacggttgccgatgctgctgatgagaaaacttatgtatcagcgcttgaaaaccttggatataggctaattgttcgtgaaccccgcttccatggtcatcgtctattccatcatgataatccgagagttaacctacatgtattcacgcaggataccccggaaacagcccggcatttgcttttccgagattggcttagacagtccgagaaggactgcaaattgtatgctaatgccaaatttgaagcagttaaagattgcagttttgatattcaaaaatatcacgagaataaaagtaaagtggtgcatgatatctatcagagaatttttaatcacttaggctttatttga

SEQ ID NO: 100744 - DNA, 1437 bp, Enterobacter aerogenes
atggtccaaagtaattcaccgctgactctaaatcttactgagttagcaaaagcaattgtgcgtaaagaataccgcgcttctgatgtccttgagcacgctattcagcgaattgagacttacgattcaaccctccacgcattttgcactactgattttgattccgccagaaagcaggctgaatcagtagatcggctaattagtgctggaaaatttgcaggccccctggctggtgttcccgtcgccgtaaaagatttgatttgcacggaggggttgcggactacttttggttcgcaattgtatgccgactttgtgccagaagaagacgacatagttgtaaaacgccttaaagcagcgggtgctgtcattctcggtaaaacaaatacctcggagtttgggtacggggcagttggccacaataatttattcccgacgacaagaaatccctggaataccgatctaacgcctggcggatccagtgcaggttctgccgttgctgtttcggcgcgaatggtacctcttgcattagggagcgatggcggtggctccatacgtatccccgcatcactcactggtgtctttggcatgaagccttcctggggccgggtgcctctctatccaagttgtcgggatgaaagatatccggggcaatccggatgggaatctttagagcacattggccctataacccggaatgcgtcagatgcggctcttgctctttcgacgttgagtgggccgtcacagtatgatcgtcattcaatcccgtctgaatcaaatgattggggattaaaaggattagatgacctaaaagattgccgaattgcttatacaaccgatcttggttttgcggttgtagagccggatattattgcagcagttgaggaggccgcctaccgactgagtagtgtatttggctgcgtgaagagggcatttccgctaataggaaataacgaaacgttattagatactattgttgcaatggaaacggatcgtcgcgggttgaaaacgatggctgcggctaagggcgtcgaatttgatggctggcttggtagtattctcgaacgctcctggacgggagaccagtttagtgacgctctttttgaaagaaaacgtgtcgttaatgctatggcaaaatttatgagtgattatgatttcctgatcacaccaacaacggctacagcggcatttcccataaattcatttggcccatcgcacattgctggacaaatattaccaccttcggcatgggttccgttttcagcactagccaacttcacaggcttacctgctgcttctgttcccattggttttacggaagatggacgtccaattggtttacagattatggggcgtcatttggatgatatgggcgtgcttgccctggctgcgattgtggaatcgttgtttccaaatgaacaatggcctggccctgccttatag

SEQ ID NO: 100745 - DNA, 264 bp, Enterobacter aerogenes
atgcactggaactaccgtctgctgagcgatcgggaatggtccggccggaatgctgtggcgctcagtgcgggcgtgaacggcatttatctctcacgggccaacctcgatgtcgcttttgacgacagcggccgacagataaatccgctgacagcgcgtctgacagggaacgtagcgggggtaatgaagctgtttaatcgctgtggctggctggctggctggcagagcctgagtctggtgcctccctgccccaccagtttatgctga

SEQ ID NO: 100746 - DNA, 420 bp, Enterobacter aerogenes
atgtacggaacctgtgaaaccctctgccggttgttgcgtgagcagtaccccgcagagaccccgctgaacctcattgtctggtccccggcggatatcgaagcgctggccgacggaatggaatatgccgtttcggagcaggacacaagggcggtactggcgcgtatggacgccattccggaggaacaacggcttgagtcgggcgtgtctgccggtgcggtgatgggtctgattgaacaggtgaaagaggccgcgtcgggagtggtggtgccggtggaactgtttgaaaccctgctgataaccgctgaacaggcattgtggcacagggaatgggccgcccgggatgagaaccatccggtgccggaaagcgttacccgtcgcctggctgacgcggcgaaagttcgcgcgttactgaaaaaatga

SEQ ID NO: 100747 - DNA, 534 bp, Enterobacter aerogenes
gtgaaaaaaaccaggcaaggaatgagcaggcccccgccgcaacgacggaacgcgcgggcgcgaaacggcgttgccccgaagaggcccggcagcattaccgccgggctggtgagagcggcgcatccgtttacggatgccgcaagcgtgatgttgcccctgcgacagtgcgatggaagcccgacagggcggagacggtttaccggctccgtttacgacagcgccggttcccgccagggaagtcgcccacagtcatatcgtccgggaagaaaagccgacaggacagcgatatcagccagtacgccaccggtatggccactattgccaacggcaacggcaacggcaacggcaacggcaacggcaacggcaacgcaggtattatcaccggaacagaaataccgccgaccagctgcagctcacaggtattcataccctgacaccacaggaacatcagacactggcggagatgcgcggcgccgcaggcgcggcgtacttcgccggcaggcagcgcctgccagggttttgcgcgcgggctga

SEQ ID NO: 100748 - DNA, 375 bp, Enterobacter aerogenes
atgaacacacagaacgtcaacgtcaaaaccgccaccaaagaatcttccgaaagatgggggaaaacctcgtccctgcgtactgatggctttgtgcgcaatatccattcccgtaacccgttcgatgttattcgcgcggacgtggtgctggcccgtatggaaatacaggctaaccgggggtgtggtctgcactacgagatttacgagtcccgcctgttgggaatggccatgcgttatctcgtcgaactgccgcttaaagatcgtccggttttcatcggtgcggcgtcgaagcggggttacacgctgacgctgtcggaagaagaccatgcacatggtgagtgtgcccgactgatgaacgaactggcggcagattactaa

SEQ ID NO: 100749 - DNA, 294 bp, Enterobacter aerogenes
atgagcatgagcaacggtatcactaacagcacgtccggattcaacgcatgggagaaaagcgcgctcagcgagcttgaaagcctgcaaaaccgcgtcagtaaagccctgatgaagtaccagagcaatacgggcaaaacggcgctgggcgagtctgcaaaccgctatatgggcgaactcagaaccgctgtcacgcgcatcctgaaagccacgccagccattcagcagaaagtcgacgggattgccgacatgctgcacctgatggcgcatttttccggcatcacgtttgacgaataa

SEQ ID NO: 100750 - DNA, 627 bp, Enterobacter aerogenes
atgaaccttaaaatttttaccatgctggtcggggcgctgctggcggctgcctgcgtacaggccgatggcctgacagacgagcagcaactttttcgtgctctgcgggagcagagtgccgcgatacgccagcttccgcagaacgccgcaaccatgccggacgtcaacgcccttttgcaggacaaactctccggggctgaccggcagtggataggtgatatgcagcgccgggtgcagtcatctgtcgcaccggacagtgaggcccgtccggacgctttgtatttcctgtcattttccatccccgaagaggggctgaagcagatggtcccggcggcaacgcgctttcatattccggcgctgattaatggtctcgtggataacaacttccgcaaaaccgtggaatcggtttttcgtctggcgaaggagaacaatcagggtggggtgcagatagatccgcggcagttcagcaaatacggcatcaccacggttccggccctggtggtgacctgtgatgccggatatgaccgccttactggcaacctgaaactgaaggaagcgctggagcggattgctgcagaaggggattgtgccgatacggcgaagaaattgctgaaggagggtgcatcgtga

SEQ ID NO: 100751 - DNA, 816 bp, Enterobacter aerogenes
gtgaagcggacactccctgtagccttcctgttgcttgttaccggggctaatgcaaccgcagccagtcccgaaccgtcgcaaaccgcatttcctccgtcagccctttcatccaccggaacctatgtggatacgcccattgtgggctggcactggtacaacgaacctcagccagaagaggaggttgaatcggatgatgacactgtcccgctcagcgtcctgccgccaaacctgcagatgtcacttctgcagaagctgacaaaagaaaagctcaacagcgccatattgtccccttccccggagaaagctgcggactacctgcgcattcagtcctatctgatgaacctgtccgggcagtttacgcagtcagccaaaaaggcgttgttgctgtatccggacctcgattacaacctggagcacagccgctataacggtaccgcaaccctgcagcagacggcggcccgtcagctgcagaatgatgccattcataacctggggcagcgctatggtctgttcctgttttaccggggtaacaatccgcaggatatgcagatggcggccacggtgcaccagttctcacaacagtatgggctgtcactgataccgatcagcatggacggtgcgcgcagcgaagtcctgccacagacccggcaggacagtggccaggcggcgaagatgggcgtcagccagttcccggccctgatgcttgttgagccgggcagtgagcagtatcagccactggcgtacggatttatgacccaggatgacctggcccgccgcttcctcgacgtggccaccgactttaaggcgcaatactaa

SEQ ID NO: 100752 - DNA, 438 bp, Enterobacter aerogenes
atgaaaaaacaaacaatcgcattatgggttattggaagcgcgttatatatcgcggggtgtttctggctgtatctcggtacgctgaactttgatgggctggatttatacatgcgacgagaagataccgcctatgcaattgattgcagaataacggctctgcaggggattattattgcgctgacgccggtgtattgcctgtggctggagtattgggttaccgggcactttgcccgggtatcgatatggtgccgtcgctatggtggatgccttttgtctgcggcggtttctgcggtatggatctggtttcaaagccataccgtgattatgtatccttatcacagtaattatgcggggagcatacttatttctctctggtgcggattgattttaaatcactgtataatgcgagcgcgccgcgcaaggataatatcaagataa

SEQ ID NO: 100753 - DNA, 1194 bp, Enterobacter aerogenes
atgaaaatagtggtcagaattactctgttgtttacatgtattgcaccactttacctcagtgcggtatatatcatgctgacactgtcaaagaacgagtactacagcggtataaatcagcgtattgaaaccgcactctcatcagcatcgggagcatctgagccagacctgacattaatgtcccaccgtatgattacctccgatatgcaggatggtcttatctcgccacaaaatgcaaaaaaggcattcagtaataccgctggtttctttaatgaagtaaagcgtgcatgcctgaaagaaagcactcaaaaaacaaaagatattctttcctgtgcgaataaaactcttggcaaccatttttattattacccggcaagagaaactgcttctgcatgggccggacattactctgactgcgattcaaatgtttatctccttcttgatgttctgcaactgtttaataaaaccgccagcattgtgtatgccccaggccatgcctttctttcctggaccgatgaacagaccggattacctgcatggtgggaaaccacctcagacgaaaaccatggtcgcatggctgatttgagcagggacgacttataccgcaaaaccctgggttccttttattaccgcccacaatcgactcattatgctgagcaattttatgcctccgtagtaacactgaagagtctcccaacagaattaaaaccggagaggctggaccaggctgtcagacgatacccggacaatccgtttgttgacgatatccggtatagtctgaaaaaacctctcacggagactgacatcagtctgcttaatgcacagttacaggcagacgtatcctccgtgacgaaaaaataccttctggcaaattattattttgaaaacggtaataagaaactggctgcagactatctcagcaatatcagcatcgataattgtgatgccgaatgtcgtccgctcatgataatgacacacccatttagtcacatctggtttgtggcagctgacttattgaataagaaatcattaaaaaatcattttggtgaattccctatggataaaagaccctattctatttctgctatccaggaacacgcttatggtgtggcaattctttttatcttgatattatccttgcgcggcgcgctcgcattatacagtgatttaaaatcaatccgcaccagagagaaataa

SEQ ID NO: 100754 - DNA, 330 bp, Enterobacter aerogenes
atgaataaatcatttctgatgaggacggccttcgtcctcttcctgctggctgttgtctgctgtgtggcgggtatcgtggcctggaaattttggcatatcatgtttgagtcgctgaaatacggcaccacggattacacacagctgaacgtcgaaaaccaggcaatgaaaacgccgttaaatctggtgatgtacagcatgccggtggggtttggttgtgcggccgtggggttactggcttcagcgagcctggcttatgttcttggggcgatggaggccgttgtggctcatgtgtcgcgcaggctgaaccgcaaggacgggtcgcatgagtaa

SEQ ID NO: 100755 - DNA, 390 bp, Enterobacter aerogenes
atgaagtggaagtttcccaaaatcataccagtgctactcgcttttgttgttattcattcagtaaatgtcaaagctatagctgatagtgatggtttgtctatcgaaaattatgaagcaataaaagatgaagcgtctagagggatggcgtcgtcgcagcttgtcttagatgcctctatgcaatcaatgttggaagctataatttactttaatgttttagcaaaaattgatacgggccgtgcttttatatgccctccggaggcgatgagaggtagtgatttacgcaacttaatagattcattcagaaataaacatgctgaaaaaatcaaaaaagaagatagggttgcactggtagctattatggctttaaaagaagattactcgtgtaggtga

SEQ ID NO: 100756 - DNA, 231 bp, Enterobacter aerogenes
atgaattgttctgataatgtcagttctgatgctgtattgcctgaagaaaatatttcgtcttcgtgtcagacaggaatgggacatgcccatataaaacaccttctgcctatgatgaaatggaataatgatgacttcattattatttatgatccggctgttgcctttcggaatgcaacttctgaggagatgattatctcgctgtcatgtgaatatgccagggagcaaaaatga

SEQ ID NO: 100757 - DNA, 5142 bp, Enterobacter aerogenes
atgctgagtattgcaacggcagtagattccgcaggttattacatggcgcaggataactattattttcttggcagcatggaagcccgctggatggggaaaggggcagaggagctggggctggcgggcatggtgagtgagcatgatttcggcgaggcgctggcggggcgactgcctggcgatattgatctgacccgaatggtgggggggaagaatgtgcaccgtacaggctatgacctgaccttcggtgccccgaaaaccgcctcggtcctgatggtggtgcacggggaccaggcgctgctgaaagcctggaacgagtcagtggcagaaacactggcggagatagagaagacggtgacaacccggcagatggtggacggtgtgaaccagaccctggtgaccggcaaagcggttatcgccaccttcaatcacgacaccaaccgcgacctggacccgcatgttcatacccacagcgtgtttctgaatgcgaccccaactgaagacggctggcgtacgctggcgaccgacacgaaggggaagtctgggtttattgaacatatttatgcgcagcagattgcctggggcaagctcaatctggcgaagtttcgccaaaaggccgaagcgctggggcacgccacggtggataccgggccgaacgggctgtgggagtttgagggggtgcctaaggcggagtattcgcagcgccgtcagaccatcgtggataccgtcggagccgatgctccccggcatatccgggatattgccgcactggatacccgcaaggtgaagcaggttaatccggataaggatgaactgctgacccgctggcatgagacgggggagcgtgccggattcgactatcgtgcgtaccggcagggtgtggaggcccgcctgcagacgatggagagtggcaaggcaatacgcccggagacgaccccggacgatgttcgtcaggcggttagcctggcgatttctcagctcagtgaaaaacgtacccgttttacttattccgatgtgctgaaccggacgctgaacagtctcgatgcgagggagcggattgcggtgatggcgcgttctgccattgaactggcgattgagggccagcagttgataccgctggatcgggagaaaggtctgtttacctcctccattcatctgctggacgaactgagcctgcagcaactggccggggagatgaaatccactgtggtggtctctggcggtgttcccgcccggtcctctccgtctgcaccggtgatgcagcagattgaagcagaccgtccttcactggcgattgtcagccagcccggaggcgcgggcggtatgcgtgaatcggtgctggcaggcgtgcagctggcgcagtcacaggggcgggacgtggtggtgctggccaccgaccgcagcagtgagcactggctggctgagcaatccgggctgacggataaagtgataaccctgaaagggctgtcagaggccccgttgccggcgaacagtacgctgattgtggccggtgcggagaagctctccgtccgtgatgcgctgacggtcaccgaccaggcgcttcgcgcccagtcgcagcttctgctgatggacagtggcgggcgcagcgggacaggtaatgccctgcagacgctggaggcggccggggtgacccgctaccgggtggaaacggaacgcaccgtggccgtcagcgtggtcagtgagccggacaagcgccagcgttatacggtactggcccgggattatgtggcgatggtgagccagggagagaatgtggtggtccaggccagcggcgagcgcgagcagcagtcgctgacggcagagttgcggcagacgctgcaggagaaagggctgctcgggagtaaaacagcgaccatcgacacgctggttccgcagtggctggacagcaaaaaccggcgccagctggatacgtaccgggagggcatggtgctcgagcaacgcgcgccggacagccgggtatctcagcgctataccattgaccgcgtcagcgcggagacccgttccctgatgctggtcggtgaggatggccagcgtcaggggatgaagctcagtcaggtggacagcagctggagcctgtaccggtcacagaccgttgatattgccgaaggggagaaactgacctggctggcgcgacagggaaaacagcgtgccggtgacagtgtcacggtcactgccgtgcgcaagaacagtctggtggtggagcaggacgggctgaagcgcgtgattcgtaccgacgaaccgctgaaggccggatatggctacgttacctcaccgggaaagcgcgtcagtgagcagggcacggtactggccgcagtctctggccgggataccggggcaacaatgctcaataccctggcccgcagcggcgaacacatacagctgtataccccgctggcgaacgatgaggccgaacgacgcctgtcccgctcaccgctgtaccgggccgcgctggcgcaggtaaatccgcagaacggtgaactggctgacgcgctgtcggcggcgcaggaggctctgatgagtccggctgagaaagcggtgcgtcaggcggtgtcgctgacccaggggagtgaagtggtgttcagccgacctgatgtactggcaaatgccctgccgttgcacccctccctgcgtcagggggatgtggaccaggagctggcccgacaggtgcagaccggggaaattatcccggtgccgggaccgaaaggcatcgcacagcagctgtatgtgacggtcgcgagttatgaggcggagaagcgcgtcattcgtctggtggtggaagggctggacacgcaggcgccactcctgagccacgccgacccggcgttgttcgccgggctgacgtccggacagcagcaggcctccggcctgatactggagagcactgaccgcttcatcggcatacagggctacgccggggtggggaaaaccactcagctgaaaaccgtactggcggcccttgatacactgccggcagaccagcgaccggaggttattggtctggctccgacccacagggcggtgggtgagatggccgatgtgggcgtcaaagcgcagacgctggcgagcttcctgatggatatggagcgccgcattcagggcggcgaacgaccggacttcagccggaccctgtttctggtggatgagagctcgatggtgggcaaccgggatatggccgatgcgatgggccatatcgccgccggtggtggtcgtgcggtgctgagcggtgaccgggaccagctgctaccggtggataacggcgcaccgttcaccctgttgcaggagcgtagcccgttagataccgccatcatgcaggacattgtgcgtcagagtccggcactgaaaccggctatcgaatcggtcattgcccgccaggtcccggcggcactggataccatccgcagcgtgacgccggatacggtgccgagaacgccggggcgctggtcaccgacgcaatccgtggtggccatcccccagacgaaagaacagaaggaagagcagggggaccgggtgatacaggccatcgccgatgactttaccggtcgtaccccggaggcgagggacaatacgctgattgtcacccagaccaacgccgacaagaacgccatcaataccgccatccacgctcagctgcaggcgcgcggtgagcttggccgggaggtcacgattaccgtactggaccgggtgaaaacgcagaccgacaggctgaagtcggtagcagggatggctgcgcagcacggtaatattgcgctgattaacgaccgttactacaccattcgtgccgggcaggacagccgccagaacggctatgtcgaactgattgatgagaccggtcaggcacaggcgttgtcggcctttgagagcagcctgcgggacatcgcggtgtttaaaccccgtgagattgctgtatcggtcggggagaaggtcagtttctcccgttctgaccgcgagcgcggacgtgaagcgaacagcaactggaccgtcaccggcgtgacaaaagacggcgagctgcagctgactcagggggaggagagccgcatcctgaacccgaacgccgacctggccgaccgtcatctggactacggctatgccggaacagcgcacaaggcccagggagccagcgcactgtatgtcatcgtacttgccggcgtggacggtggacgccaggcactggcctccctgcgcgatgcgtatgtcggtctgtcgcgtgtaaaagcacatgtacaggtctataccgacaatctgggcaagtggctgacgaaggtctctcagcctgcagagcggcagacggcccacgatgtgttgctggccgacaatgaccgtcaggcagcgaccgcacagcagctatgggaaaaggccacgccattgtctgacagcgccctggggcgtgcgctggcaacgcagctgccggaggcgggcgaggcccgctttatccacggcagccggaaatatccggcgccgcatgtggcgttgccggtgcatgatgccagcggcgtgcagcgggcagtattgttgcgggaggtgcagcttgatggcgatggccgattacgaggcttaagtgataacgcgcgcctgctcgggagtgaagatgccacactggtgatattccggcaaagcgaaaccggcctgacccgtcaggccacggacctggcagaggcccgacagctggggcagcagcatcccggcgacggtattgtggtcgtcagtggtgaatccccccccgatgccatcatgaagcatctgagtggtggtctggtcctgtcggacagcgccagcgctgatatttctcatcacccggccgacacgccggacccggtcagcctcaaaacgccggaagagcagcggatggcgaaggcgctggcagaagaggcacgacgccagcagcagccggaggctgttccgcatttacctggtgacgccgaacgtcaggataccctgcaacaggcagagcgcgctgaatcccgtgcgctgcagcgtgaggctgaacagtcccggcagcaggagcaggccgggctgagtcaggtcatacagcaggatcgtcaacagacgcgtcagcgggaaagcgtgaccgaccagcttcaccgggttgagcgcgagatagtgaaagagaaagaaattggtgagtaa

SEQ ID NO: 100758 - DNA, 642 bp, Enterobacter aerogenes
atgagtaagtacgagcgcccgtttgtatatactagatataatagcatgttttttttggttgtggttatgatttcatctatcgcaacattaattccgtctgttatgctgtatcatgtcagcttggacatggctttttcatttatgtttacttcagagtttttaattgcgtttttgatttatttgttttatttaaggaagcttccagagtgtagaatacgaataaaaacagatgtagcgacagccaagacctcagctctttcattccttacaatcatttttattcagcttgtagtttactgttatagggactatttgtatcattttgagccatcgcagataaactggatagcggttttggtagcaactctggtcgtaccctactatgaagagatcgtttacagagtctgtgctttcggttttctgtgctcaatctttagaaaaaacctactcatacctagtttgattacatctgtgtttttttgtgttatgcattcgcagtattataacattctggaccaagcgattctttttgttgtgtctatgttgctgttaaaggtaagaataaagagtaaaggcattttctatcctatggtaatacatgccggtatgaatttttttgttctaatgttaaatattctatga

SEQ ID NO: 100759 - DNA, 1260 bp, Enterobacter aerogenes
atgattatggacatatttagaagtgaggcattaaaatatcatagtgataccgagtgcggtgatattgtcatacctgcgtcattcagtatggccgtatgtgctattgccacattatttatatttatgagcatggctctgttcgtctgttatggtagttatacccgtaaagctcacctgaccggtatcgttatgccttcatccgggctggtaaaaattacaccgcaatattccggttatataactcagttgaccgcctcagaaggtcagcatgttgttgctggtgagcctctctaccatattaacggcgagcattttaacgggcagggatccggtactctagctgccatgagtctttctctcagaacacagtatgcgatgctggcgtctcagcaggcgctggaatcacgtgacaaccagcagcagcaggtcgcgttaaggcagagaattgtctctctacaactacaggtcaaaagtgcggaactgcgactgcaactggctgaaagtcaggtcgggctgaccacatccgtcatgaggcgctataaagaactagccggcacgcattacgtatcagatatcgaataccagcagaaacaaatagaggtctctacggcgcagcaaaacgttgaagatcagcgacaggggcttctgcagttacgcactacgatagaagccactgaagacgatcttaaccaccttatcgtccaggggggaagtcgtagggctgaactggacagacagctacaagagatcaggcaacagcaggaggaacttgctgggcaggagaacttcacattgacggcaccggtatcaggtactgttgctgcggtgctggtcagacagggacagtctgtcagagcattagagcccgtgatgacagtagtgccggataatgccagcctgcagatagaactttatgccgccagtcagaatgccggttttattcagcccggacagcgggtagcactgcgctttgccgccttcccttatcagaagtttggcgttcagtacgggactatccatgaaatcagtcgtacaacgctgacaccttcggatttactctccgtgtccccagtaacctggaaggagaatgaagggcgctatcgagtcatcgtcatacctgagaacacttttatcttggcttatggaaaaaaagaatcccttcgccccggtatgactcttgagggggacgtcaaccttgatacacgtcatttatgggaatggatgacagaacctctctggagcctgaaaggaaaaatgtaa

SEQ ID NO: 100760 - DNA, 2205 bp, Enterobacter aerogenes
atggaatcactgaactggacagggaggagacaccttccccttattcgccagacagaatcagctgaatgtggcctggcgtgtctggcgatgatggcctgttggcatggttttcagacagacttacctacacttcgtgaacgcttcagtatcagtactcaggggatgacgctgcagagactgatcgaatgcgcagctggtatccggttgtcctcacgtgcagtcaggttagagccggaagacctgaaatctcttaccctcccttgtattctccactggaacatgaatcatttcgttgttctccataaagttcgcaggagtagactggtcattcatgatccggataaggggaaaatgatactctccctgcaggacgcaggaaagcacttcaccggtgttgcacttgagctgatgccggccagcgattttacggtcagagatgaaagaaagaaaattcaactgcgccaactgactggtaagacacccggcctgctggcggcaatgtcacggatcatcatctttgcactgtcactggagatccttgcgctgggaagcccactgctcaatcaattggtgatcgatgaagtcctggtggctgccgatcaaagtctgttgactgtggttatcattgcactgttgctattgtcactgacacaaatgctgctgtcgctggcccgccaatgggccagtatcaccctgtccgtcaattttaacatgcagtggactgcccgagttttccaccacctggtccgtctccctttggcctggtttgatgcgcgcagtagaggaagtattaatgcccgttttgaagcggtagataccatccagcaggcgctgaccacgcaggtactggaaggtattctggatgtactacttgtggtgactgcgctttgcatgatgttgctatacagccctgaaatgactctgatagcggtactggcagcggtcatctatggtgtactgagagcgctgtggtatccatccctgcgacagtcagctgaagatgcctgggatgccggtgccagggaatccggacattttcttgaaactctcaacgggatcctgagtctgagaattaacggtgtcactactcatcgtgaagccgcttggctaaatcttaatgtcacccgcagaaatacgcagttacgacagagtcgacagctgatgtgctatgacattgtgcacaccctgactggtagtgtggtatcggcaattattttgtggaaaggcgcgggtgaagtgctgaacggtaccttcaccgttggtatgctggttgcttatttatcgtaccagatgcgtttttcctcgagtatcagtagcctgactgacaagttttttgcctggcgtatgctcgatgtctataacgagcgtctggcagacattgtgctcaccccgacagaaggctatcaacaacaaacagttcaggatgatagcagcacttcaatcgtcccctctatattccaggacagagtagctgaagatactgacctcccgttatcactcgcgcatataatattcagccataagggtagtaacatgccgatactccgcggagtatcgctgacgctgcaaccaggtgaagtggtggctattactggaaaatccggatgtggtaagtcgacgctggtaaagctgatcctgggaattcatattcctgatgaagggacgattaggacatttggcataccacatatacatccggattatttccagatacgtcggcgcattggcaccgtactgcaggaggaccaccttttcagaggttctattgcagataatatcatttttttcagtgaagaccgtaaccatgaacgaatgatccagtgtgctcgcctggcactcatcgaaagcgatgttatggcaatgccaatgggatatcagacattaattggtgaaaccggtggtgggctttccggagggcaaaagcaacgtattttgttggcaagggcgctgtataaaaaaccgggatttttgctactggatgaagcgactagtcatcttgatgttgagagtgaaatccagataagtcggacgctacgtcaacttaaaattcctgtactgctgatagcccatcggccggaaaccatagcatctgcagatcgggttctgtgtctgaccgacggatactttacggatctgacgcatcagtacacaaaaggtaccgattatctggttagtgattttactgatagtgtggatataacttag

SEQ ID NO: 100761 - DNA, 1194 bp, Enterobacter aerogenes
atgttagttttcactgacctgaggcgcacacctgaactttcggaaatggcagagtgtctgggtattattgacggccaaccctttctcatcggggaggatggggtatttgaccgtgaagttaatgcctttttacggtctctggttgatccatcgagcccgggacgtaatacctggcgtacctatgcctatcatcttgcccggtttttgagctggcttgagcgacaacaaatagcctggcgtgcggtcgatcgtagtgttctacgacactactacacgcagaggcgattcagccagaaacaccccgtctcagcccggacgtggaacaatattgctgcagcgttgacgcgtttttatgaatgggccgccatgaccggggaaatagccaaaagtcccgttacatatcgcgatatcaggtcgggacgcatgactgccgccccgggttcgcaacgggccaggtctgcgattatggagtcagtcccggccagcccggttcgttatcttcctctgagagtttaccttgcacgattcaggcccgcctttggggggacacgaacagcggagcgggatcgcgcctttgccgatttgctgatttcaacagggatgcgaattaatgaggcaaacagcctgcttctgggggatctgcccgatcccgatgccgtggaatgtcgggggaaaaagacggttcccctgacgttacaccggggaacaaagggccggaaggttcgcgtcatccgtattcccgtgcacgtgcttcgcacggtgttccggtatatcgcagaagatcgtgaaaatgccgttgccatgctaagcgcccgtgaacgcccggcagaactgtggctgtcagagtccggcagaccgatgaaaacggcgcggtggcacgctgttttccggcgggcgtcacgacggtcaggcgtttcctgtaccccccacatgctgcgtcatgcgtttgccattcaccagctgacggcaatgatccagcgtttacttgccgaccctgtatgggtgacaccgtcacagcctccttatcaggtactgctcagggatcccctccggcagctgcagcggcttctgggccatgcgagtatggccacgacgtttatttatctcgactgcttggaggagaccgacaggttgcttgacgacagcctgggcaactggacggtgcctttacaacccatggtggatgagcaatga

SEQ ID NO: 100762 - DNA, 1800 bp, Enterobacter aerogenes
atgacctcagaacatcaccgcattcatgacgacacgccctggctggctcccggggtgcttgatctgcgcgtccgtttcggcaaaatttttgacctcggtgcgcatattgaacgcccctttatcgctgaaatggcagggattgccgtctggcatatgacccaggttgacggcagcctgacggcctggtcttccgtcagatcggtgttgtcagcgtggggcagtttctgcgctttcctgaacggggatattgccggcggtcagcctgaacccctgacggcccgtgatttaacgccgcatcactttgtccggtttgtggcctggctgttgccggcttatcccactcagagttcgcgttcagggatattttactgcctgagcggctgtctgcatgccctgctggctaaccggcccgatatgcttcagtccgggtttgtggtgccggttttccccgaacggctggcgaccacaccgggcgtcaggcgggagccctataccgatgaggaaatgttcaagatagtccgggtatgccgtgcagaaatcgcttcggttattcaccggttcagaacgggaaaaaagctgattgcagcggggaaagacccgtccggatatcagcgggaagcctggcgttcaccggctaacgtgctgtggtatgtacaccatgccatgaatggtgccccatttctggattcctgtaccgacaaatcggcgcatgcctcactgggtgcggcttttgcgaagcggaaagcaggatacccctcgagagatgagatttatcgctatctgtatcctcatcttgaggatctgacgccgtttatcatcctgctgcacgcgcttctggatgaaaacccgcactgcattatggcgctgaagctgagcgatattgaacccgctgaagacgcccggctctgtcgtattcgcttcgtcaaaacgcgtccggtccggaaagagttcaccaaaatctacggaaatacgtccatctggtcgcccggccgcgttatccgcatggttgaacttatcacccgctcattacgtcagtggacacatgatcccgatattaaaaacagtttgtgggtttatctggcccgccgtgcggagccggttcatgcggttccacagggcgaaaccacccggatggtgatggcattcggaaaaaaacacggcctcccgggccttcagctcgcgcggtttcgcgtgaccagcctgtccagagcataccgccgtaccggcagtctggcactgattaaagacagggcgaggcatgcacagatgcagacaacgatcgattacttaacgaaccccggaacgcatcagctgcatcaggccagcatccgtgccgcgcagacggaagcgcagatcctcctggccggaacggtcattgcaccagagcgtgatgagcacgaaatcactctgatatcagaaaatcttcgcatgggcgtggcggaagcccggcgcctgattaccggtgaacaggacgtattcgttgcctcctgtcgcgacttctataaccggcctgatggctctccggatacgccctgcgatcggccgtttgcctgtttttcatgccgtaatgccgtctggacggccaggatactgcccagacttatccggttcagggattttctgacggagcagagagcgcatctccccacggatgaatggcagcggcgctttggttttccatggcgggcaatcacagaggccatcctgccttcgttccggccagaaattatctccctggcggaaacggcggcgcaggatgaggtgcttcatattcctgcaaccatgaaggggaacggatga

SEQ ID NO: 100763 - DNA, 1938 bp, Enterobacter aerogenes
atgagtatcacgcagaaacggacagaaaccgccattccagcggcgcgggtcgggccttttgtcaggcccgagaccattatagcggaaggggatggggtgataacccgcttctccgatcctgagtggaacgttgctccgcttatcggggcaacaagcattccatcggggaataaggtggtgagattcgattttgatgtcacgcccggtcagagaggcagtgccgtagcggatcagtccctgattcaggttgccaaagagctggctttcgcccgactgctggttcctcccgccggtatgcgccggaaatcagccagcacggttatcgttgacgtgagtaatctgagcctgttcagccgctggctgctcaggcgtggcatccggcatttctccggtgttacccaggaaatggttgatgaatttcgtgaacatctgatgataaacaggggctgggaaacaggcgatcgccgggggaagaggcagacgctgcagattgtcctgatcctgcgaaccctgcagcgcctgtgggaatacagggaggttctttccgttccgctttcattttatccctggcagggggcaaacccgcgcgttgtcaccggatttcagaaacaccggggagaagagaataaaacgccggtcattccggatgacattctggcggtaatggggaaacacgccatccggtatattgatattttcagtcaggacatcatccgtctgcgcacccggctggaagatatgcggtgcgagcgtctggcgctgggcctcagtcggaagcgggtccagtctgagattgactggcacatcttcagacgtttcactaaaaatcttgcactgacccccgatccggatacggaccagccatggcgtaaagtgtggtctgcttattctgaatttcgccatgaagaacgcatgcttatcgcagcctgttatatcgtcgtggcctggctgagcggaatgcgggtttctgaaatccttgccatcagggacgcgtcggttgtgtctgaaaaaggaccggatggccagccgcacctgaaggtgaaatcaacgctgttcaaggggatccccgagccgcaggggcgaaaggaaacgtgggttattgtacccccggtggcgaatgcgctgaaaacgatcgcggcggccaccatctggtaccgatccagtccgggtgatgtaatcttcagaaatagcatggggcagcccctgaaaacgggcgtcattaacaaatacatcaacctgttccgggaccatgtgacaaccttattcccgtcataccccgttcctcccggagaggacggtaccccatggccgttccacacccggcagtttcgtcgcacgctggcccgccatatcgcacgtcagccatttggggtcattgccggcatgctgcagtacaagcatgttcacgttgcgacgtttgaggggtatgccggcagtgaaaacctgagcacctggcggagcctgctgaggcaggagcggctactggcgaatgctgattttcttgatgaggttgcgcatgacgtcgtggatgggtgtgttaccgggccgaaaggggaacagatgctgcaggcgtttcggggcagcgccggagaccgacgggatgatgacgttgcgtattatctgcgacataaagcgaagcatttttaccccggcctgctgaattactgctttttcgaacctgaaacggcaatgtgcctggcaggagagaagacggatgcacaggtatcgccggtcatgtcgtactgccatccggaccggtgcgccaattcctgcatctccgcgaagcataaacccgcctgggaggctgccatcgctgacgcggaggtcatgcggcgggtacctaaactgagtccgctgcagcgggttgctctggatcaggaaatcgcacgtatgcgtaaagcgattatccatttgcaggaggttcaccatggctcgtaa

SEQ ID NO: 100764 - DNA, 450 bp, Enterobacter aerogenes
atggctcgtaatccccgacaggaagtggcgttgcggcgcagatatgccatcagcagggataaaacccggatggcctttgagcaggtgcttgctgacattgcagcaaatccttcagcaccggtcacagagaaagcattgtatgaagcagcgggtcgctcccgggccacgctgaaccgttatccggatatcaaggaaagactggcagatatccgggcaggcagggcaccagagagtccgggcaaaggtaaagcggctccagagcaggcaggggaaaatcatcgactacgggttttacagcagacaagcacaacgctggcacagcgggtggcgatcctgtcagtggccgttcaggatcttgagcgcaggaattcgtcgctggtgaggcttctgcggcagcataaagtcgccataccggttgaactggtcgttaataacacaggagaaaaataa

SEQ ID NO: 100765 - DNA, 828 bp, Enterobacter aerogenes
atggatacgttcaagttaaaaccctggctaaatcgatggaacctcattcctgatggtactccatttataactcatacatcccagttatatccagtcaaaacagcagcacgtagtgttaaagctatgttaaaagttacggatgatactgatgaacaagccggtaatgcactaatggcatggtggggagggaatggtgcggcacaggtttttgcccatgaaaatgaagctattcttctctcaagagccacaggttccacgtctttatcagctatgtcccgtgaagatcaggacgaggaagcatgtcgtattttgtgtattactgcgaaccggcttcatacattccccaaaagaccattaccccagcttacacctctacatgagtggttttatcctctcaagccagccgccatgaaatatggcggtatcctgacacgttgcgcagaaatttcggaagaattgctttcttctccacgagacgtggttgcattacatggtgacttacatcacggtaacgtgcttgattttgaaaaatctggctggttggccattgacccaaaaggactaataggtgaacgaggattcgactttgccaatatttttactaatccggatctaggtaatcccgagcctcgtgtcgcgactataccggagatatttaaagagcggctaaatattgtttctgagacagcagaactagacagagatcgccttctcaaatggataattgcatggtgtgggctttcaacaacatggtccctcgagagtaatgatgcaacatcaattgcagcaaatgttgctaagctggcgattaccgaattggataagtaa

SEQ ID NO: 100766 - DNA, 174 bp, Enterobacter aerogenes
atgatagcgaaagatcagtttgctgctcatgttggtctgggctggacggataaaaaacacgatgtctgcgttcagtttaaaaacggtgttcgcatattccatgtgattgaacatacgcctgaggcgcttgatatctggctcaatgagttagcccagagagataccgaacagtaa

SEQ ID NO: 100767 - DNA, 228 bp, Enterobacter aerogenes
atgattaaagtccttgttttctttaatgctgaatcctgtaaagtcatgaccgttctggaaggtatatcctctatcagacaggaatatccaaacggtgaagaaacacatcttcggattatgtctgcaggttttccttccttaactggcgatcatggctttgtttacgtggctactgacagggagttaacgtcacaggagatacttgatgcggccaggaaatatttatag

SEQ ID NO: 100768 - DNA, 129 bp, Enterobacter aerogenes
atgataaaaccatggatttataacagaataaatttgctggcttacaattcatcctggctctttaaatcctttaccagtcattgcaaagttattttttctgaattgagcgaacgtgacgaacagctgtag

SEQ ID NO: 100769 - DNA, 348 bp, Enterobacter aerogenes
atgggacagtacaacgggcgaagcaaaatatctgagcagctaaaatacggctcggccactgacatctccatctcatcaactaacaggcttgatgagttctggcccctggttcttcacattaccaacagcgcgcgatacgggattccatatgaaatgatcagctgccatttcttcagtctccttgccagacacgtcctgtttcatccactcccgggaagcttccggtaccaggacaagcggtcgccggtgatgtatatcaacgaggccgtaacaatcagaaacccttcctcctcatcactacgctcaaacatgaagattggctggccgtctctacggcggatgaaataa

SEQ ID NO: 100770 - DNA, 186 bp, Enterobacter aerogenes
atgcgaagtctcctgactaaaggagtatgtcttgcgttagcgttgtccgccgccgggacggctcaggccgctcagaaagagagccatgacgacaaactcaccgggataaccattttcgctcaaaaagagtctcaggaaagccaatgggacagtacaacgggcgaagcaaaatatctgagcagctaa

SEQ ID NO: 100771 - DNA, 741 bp, Enterobacter aerogenes
gtgattagccgtgttcgtgactccacccacgtacttgatggtctgctgtatcacgaaagtgatcttgaaatcacggagcattacaccgatacggcaggtttcacggaacatgtttttgcgctgatgcatctgctggggttcgcttttgcaccaaggatccgggatcttcatgacaaacggttgtttattcaggggaaggctgataaatatccgactctacagtcaattatttccacaactccactgaatatcaaggatatagaaacccactggggtgaaattctgaggctggcgacctcaataaagcagggaacggtgaccgcttctctgatgctgaaaaagctggccagctatccgaagcagaatgggcttgccaaagcgctgagggaaatctgccacattgagcgaacactgtttatgctggactggttccgcgatcctgcattgcgtcgcagggttcaggccggtctgaacaaaggagaagcccgcaatgcccttgccagagccgtcttcatgcatcgtcttggcgaaattagggatcgtggtctggaaaaccaaagttaccgcgccagcggccttacgctgatcacagccgcgatcacattgtggaataccgtgtatatagaaaacgccattaatcagttgaaaaagaaggagctgccactgaatgatcaattgctgtcacacctgtctccactgggctgggagcacattaatctgacgggagactatatctggtga

SEQ ID NO: 100772 - DNA, 816 bp, Enterobacter aerogenes
atggtgatcaccccctcaggtattgaccggcaatactatgaaatttgcgcaatgaacgagctgaagggagcgctgcgggtcggtgatatctggggccggggttcccgacgctataaaaacttcgatgactatcttatgccaggagacgatttcgaaaaattattaaataataatcagttaaatatacctgtcgaaacagattgcgaagcctaccttaaggcaaggctgacactgctggcctcccgcctggaggaagttaacacaatggccgttaccggggatcttcccgatgtggatatttcagataaaggtctgaagattacaccgctgaataacagcgttccttccacaatatcaccactggccgatctgatttacaacatgttgccgcacccaaaaattacagaaatactggatgaagttgagcgatggacaacctttacgcgacattttacccatctcaagaacccacttacccgcccgcaggataaccgtttgctgcttaccaccatcctggctgatggcatcaatctggggctgaccaaaatggcagagtcctgtccgggaaccacgcgagcttcgctggaaaacatgcaggcatggtatatccacaatgaaacatactctgctgcactggctgaactggttaatgcccagaagtctcgtccgctggcggcattatggagagacggttcaacctcatcttctgacggccataattttcgggttggcagccatggccgctatgcgggtcaggtcaacctgaagtacggtcaggaaccgggaatacagttttatacgcacatttctgactag

SEQ ID NO: 100773 - DNA, 1071 bp, Enterobacter aerogenes
atgaaattgacgattactgtcctgttaatggtgctgctctgcacgacgctgccaacctgcgcgacgctgccgtcaaccagcaccacgaatctgacgaccagctttgataccgacgcccttccttcacccctttatatcctgaacaatcaggtcgcgggggaagggagtgaggccatgaacgtggccatggtgtgcaacagcagtactgacacgactaacggcgcatgtccaaccgtgccggtatggacggacgaatccggcgctggcgctggcagtattcccctgcgttttactcaggaccgtaccggcaccaccaaagatatcgttataactgctaccaggggtaatggcggattaacgcgtcaaccctggacgtctgccaattctcaatcccaaaaggcgccagtatttaattactatctctcacaaagtgcgcttggcaatctgacggacggtgtctggcgcgcgaccctcattatgaattatcaaaaatacggacaaacaacaaaaattggcacctggaccgcaaacctggtgctgacggtaatcagcaaacgtgcgcagcaagtgtacctgccggcctttccctccaccgcggccaccgttgacctgaacctgaccagcagcgtgggatcgtaccggtccaccaccgcgagcggcagcacatcgctggacatgtgcctgtatgatggtaacaacggaacgggaaaaataatcaaccttattttcaaggatgagggagcacctgcacccggacgacaggcgggactattttcagtataccggacgagtggaggcaaatcagacgcggcgaaccgcattgattacgctttgagtgtgcataaccccgtcaccggcatagcgcagagcgtggtgaacggtaccgggatagtgtggaatacggcgacccatttcaccgggcggctggtgactctgccaggatatagcacgcagacctactgcgtcccagcgccgctgacgttcacaaccccgccttttacggtatccggcaaacagtctggaaaatacacgggcacgttaagtattatctacacgccctccacggggtaa
